United States Patent Application Publication US 2011/0183924 A1 - sequence listing, part 256

SEQ ID NO: 732980 - DNA, 743 bp, Homo sapiens
  misc_feature (517)..(518): n is a, c, g, or t
gcctactactactactactaaattcgcggccggtcgactgcttatcacaatgaatgttctcctgggcagcgttgtgatctttgccaccttcgtgactttatgcaatgcatcatgctatttcatacctaatgagggagttccaggagattcaaccaggaaatgcatggatctcaaaggaaacaaacacccaataaactcggagtggcagactgacaactgtgagacatgcacttgctacgaaacagaaatttcatgttgcacccttgtttctacacctgtgggttatgacaaagacaactgccaaagaatcttcaagaaggaggactgcaagtatatcgtggtggagaagaaggacccaaaaaagacctgttctgtcagtgaatggataatctaatgtgcttctagtaggcacagggctcccaggccaggcctcattctcctctggcctctaatagtcaatgattgtgtagccatgcctatcagtaaaaaagatttttgagcaaaaaaaaaaaacaanncaaaacaaacaaacacccaaacgaaaccacagccaatcctagccctccacaccaccacaccaccaccacaccgatacgcgctgcgcgctagcccaaaaccaagaacacacatgaggcgccgccgcgccccagcaaaaattatcaacacatctcgtggcggcgcccagacatctaacacgcttaccggcccaaagagcggacagaggggggctccacaaaaacggg

SEQ ID NO: 732981 - DNA, 664 bp, Homo sapiens
ggtgcttgttggctttaacatccacaatgaacacaagtgtgttgttgtcttctatcttcttcgtggtgactcagtggtcagcggaaacttgatgatagcgtagtggtcaagcttgtatctcctgggagcgactcttccaaagatatttgggctgcctcgggagttgcagcgtcttgggccgccggaaggtgggtgacgtacggatcttctttttttgtgtggctgtggacacctttcaacactgtcttcttggcctttaaatccttcgctttggtttcggctttaggaggggcaggagcttccttcttcactttcggcgccatcttgtgaaaagggaaagtttcctttctaataccattttcacttctcccgaattttgtggatcgtttcttggtatctaccccagatttcaagagtgttggctggatcttacggattgtgaagtcttcatttccctgtggtgagatctgaggcatgattttaaacagtgtgagggaaggagatctccaggcactttaatagaatggagaagcaggatgggatttgagaggaaatctgattttgaaaaaaggagaactagagttgagttcgtaattaactagcaccttaaaggtcattcagcatgcccatctgcacagtgggtgtaatcaccctacagaacaaa

SEQ ID NO: 732982 - DNA, 501 bp, Homo sapiens; identical to SEQ ID NO: 323914

SEQ ID NO: 732983 - DNA, 723 bp, Homo sapiens
ggatgtacctgtctataaggagtcctgcttatcacaatgaatgttctcctgggcagcgttgtgatctttgccaccttcgtgactttatgcaatgcatcatgctatttcatacctaatgagggagttccaggagattcaaccaggagtaagtcttggcttttcaatgtttattatgttattgcagcctggtagatggacctgtctgcagatgaaagcctttgtgtttctgtttgtttgtttctttgttttttgagatagtcatgctctgtctcccaggctggagtgcagtggcaccatttcagctcactgcaaactcctcctcccgggttccagtgattctacctcctcagcctcccaagtagctgggactacaggtgtgtgccatcatgcctggctaatttttgtatttttggtaaagatggggctttgccacgttggccaggctggtctcgaactcctgacctcaggtcatctgcccgccacagcctcccaaagtgttgggattacaggtgtgagccactgtgcctggcctcacttgggcagccttctaagaacacagtagcctgggccctgtacccagagatactgatttcattgttctagggtaaggctgagacatgggtggctttcaagtacccaagatgtttcacatgtgcacccagggttgaaaaccaccgatgcaaagcaaagggaagtgtagaagtgagattctcatccagagat

SEQ ID NO: 732984 - DNA, 503 bp, Homo sapiens; identical to SEQ ID NO: 323908

SEQ ID NO: 732985 - DNA, 725 bp, Homo sapiens
ggatgtacctgtctataaggagtcctgcttatcacaatggggctcccaaacttggctgtgcagtggaaactccgggggaattttgaagaacactgacacccatcttccaccccgacactctgatttaattgggctgcagtgagaacagagcatcaatttaaaaagctgcccaggatcacatcttggagatgaaaaggtgaaatcaaatgttgtaaacggttttaagaatgtggatatatagtagcaaattgttctccttaacgattgttcaaaaatgttctcctgggcagcgttgtgatctttgccaccttcgtgactttatgcaatgcatcatgctatttcatacctaatgagggagttccaggagattcaaccaggaaatgcatggatctcaaaggaaacaaacacccaataaactcggagtggcagactgacaactgtgagacatgcacttgctacgaaacagaaatttcatgttgcacccttgtttctacacctgtgggttatgacaaagacaactgccaaagaatcttcaagaaggaggactgcaagtatatcgtggtggagaagaaggacccaaaaaagacctgttctgtcagtgaatggataatctaatgtgcttctagtaggcacagggctcccaggccaggcctcattctcctctggcctctaatagtcaatgattgtgtagccatgcctatcagtaaaaaagatttttgagcaaa

SEQ ID NO: 732986 - DNA, 548 bp, Homo sapiens
  misc_feature (403)..(403): n is a, c, g, or t
  misc_feature (410)..(410): n is a, c, g, or t
  misc_feature (428)..(428): n is a, c, g, or t
  misc_feature (444)..(444): n is a, c, g, or t
  misc_feature (458)..(458): n is a, c, g, or t
ggatgtacctgtctataaggagtcctgcttatcacaatgaatgttctcctgggcagcgttgtgatctttgccaccttcgtgactttatgcaatgcatcatgctatttcatacctaatgagggagttccaggagattcaaccaggaaatgcatggatctcaaaggaaacaaacacccaataaactcggagtggcagactgacaactgtgagacatgcacttgctacgaaacagaaatttcatgttgcacccttgtttctacacctgtgggttatgacaaagacaactgccaaaaaaaaaacaacacaaaacaacaaaaaaaaaaaaatttgtggggcggccctgggcccccggaaaaagtttttaagacccttcgttgggggcgcgggggccccacttgggtangggacangggccaaagggggcccanagagaacccgggcaanagaaggggggggtncccccataaaaagccgcgggaaccgcgtcgaccatccagggtgcgggacacggcttataccggccacagcgaaatcgccgcggagggggc

SEQ ID NO: 732987 - DNA, 359 bp, Homo sapiens
  misc_feature (3)..(3): n is a, c, g, or t
gcngccgcctactactactaaattcgcggccgaaacaaacacccaataaactcggagtggcagactgacaactgtgagacatgcacttgctacgaaacagaaatttcatgttgcacccttgtttctacacctgtgggttatgacaaagacaactgccaaagaatcttcaagaaggaggactgcaagtatatcgtggtggagaagaaggacccaaaaaagacctgttctgtcagtgaatggataatctaatgtgcttctagtaggcacagggctcccaggccaggcctcattctcctctggcctctaatagtcaatgattgtgtagccatgcctatcagtaaaaaagatttttgagcaaa

SEQ ID NO: 732988 - DNA, 385 bp, Homo sapiens
ggatgtacctgtctataaggagtcctgcttatcacaatgaatgttctcctgggcagcgttgtgatctttgccaccttcgtgactttatgcaatgcatcatgctatttcatacctaatgagggagttccaggagattcaaccaggatgtttctacacctgtgggttatgacaaagacaactgccaaagaatcttcaagaaggaggactgcaagtatatcgtggtggagaagaaggacccaaaaaagacctgttctgtcagtgaatggataatctaatgtgcttctagtaggcacagggctcccaggccaggcctcattctcctctggcctctaatagtcaatgattgtgtagccatgcctatcagtaaaaaagatttttgagcaaa

SEQ ID NO: 732989 - DNA, 760 bp, Homo sapiens
  misc_feature (3)..(3): n is a, c, g, or t
gcngccgcctactactactaaattcgcggccgtcgacaaggagtcctgcttatcacaatgaatgttctcctgggcagcgttgtgatctttgccaccttcgtgactttatgcaatgcatcatgctatttcatacctaatgagggagttccaggagattcaaccaggaaatgcatggatctcaaaggaaacaaacacccaataaactcggagtggcagactgacaactgtgagacatgcacttgctacgaaacagaaatttcatgttgcacccttgtttctacacctgtgggttatgacaaagacaactgccaaagaatcttcaagaaggaggactgcaagtatatcgtggtggagaagaaggacccaaaaaagacctgttctgtcagtgaatggataatctaatgtgcttctagtaggcacagggctcccaggccaggcctcattctcctctggcctctaatagtcaatgattgtgtagccatgcctatcagtaaaaaagatttttgagcaaaaaaaaaaaaaaaaaaaaaaaacatttgggggggcggccgggcccagaaaaaggttttaaacaccattcgtgtgggggcggcgggcccagtgggttacggacaccttgggccaaagggggcccaaagagaaaccggggccagacatgggggtgggtctcccccataaaaaccgcggcggcaccgggggtctggaccaatccagagggtcggggccacggtcaccacgggtcccgaaccaaaataggagg

SEQ ID NO: 732990 - DNA, 768 bp, Homo sapiens
  misc_feature (3)..(3): n is a, c, g, or t
  misc_feature (623)..(623): n is a, c, g, or t
  misc_feature (630)..(630): n is a, c, g, or t
  misc_feature (648)..(648): n is a, c, g, or t
  misc_feature (664)..(664): n is a, c, g, or t
  misc_feature (678)..(678): n is a, c, g, or t
gcngccgcctactactactaaattcgcggccgtcgacaaggagtcctgcttatcacaatgaatgttctcctgggcagcgttgtgatctttgccaccttcgtgactttatgcaatgcatcatgctatttcatacctaatgagggagttccaggagattcaaccaggaaatgcatggatctcaaaggaaacaaacacccaataaactcggagtggcagactgacaactgtgagacatgcacttgctacgaaacagaaatttcatgttgcacccttgtttctacacctgtgggttatgacaaagacaactgccaaagaatcttcaagaaggaggactgcaagtatatcgtggtggagaagaaggacccaaaaaagacctgttctgtcagtgaatggataatctaatgtgcttctagtaggcacagggctcccaggccaggcctcattctcctctggcctctaatagtcaatgattgtgtagccatgcctatcagtaaaaaagatttttgagcaaaaaaaaaacaacacaaaacaacaaaaaaaaaaaaatttgtggggcggccctgggcccccggaaaaagtttttaagacccttcgttgggggcgcgggggccccacttgggtangggacangggccaaagggggcccanagagaacccgggcaanagaaggggggggtncccccataaaaagccgcgggaaccgcgtcgaccatccagggtgcgggacacggcttataccggccacagcgaaatcgccgcggagggggc

SEQ ID NO: 732991 - DNA, 752 bp, Homo sapiens
gcctactactactactactaaattcgcggccggtcgactgcttatcacaatgaatgttctcctgggcagcgttgtgatctttgccaccttcgtgactttatgcaatgcatcatgctatttcatacctaatgagggagttccaggagattcaaccaggaaatgcatggatctcaaaggaaacaaacacccaataaactcggagtggcagactgacaactgtgagacatgcacttgctacgaaacagaaatttcatgttgcacccttgtttctacacctgtgggttatgacaaagacaactgccaaagaatcttcaagaaggaggactgcaagtatatcgtggtggagaagaaggacccaaaaaagacctgttctgtcagtgaatggataatctaatgtgcttctagtaggcacagggctcccaggccaggcctcattctcctctggcctctaatagtcaatgattgtgtagccatgcctatcagtaaaaaagatttttgagcaaaaaaaaaaaaaaaaaaaaaaaacatttgggggggcggccgggcccagaaaaaggttttaaacaccattcgtgtgggggcggcgggcccagtgggttacggacaccttgggccaaagggggcccaaagagaaaccggggccagacatgggggtgggtctcccccataaaaaccgcggcggcaccgggggtctggaccaatccagagggtcggggccacggtcaccacgggtcccgaaccaaaataggagg

SEQ ID NO: 732992 - DNA, 760 bp, Homo sapiens
  misc_feature (615)..(615): n is a, c, g, or t
  misc_feature (622)..(622): n is a, c, g, or t
  misc_feature (640)..(640): n is a, c, g, or t
  misc_feature (656)..(656): n is a, c, g, or t
  misc_feature (670)..(670): n is a, c, g, or t
gcctactactactactactaaattcgcggccggtcgactgcttatcacaatgaatgttctcctgggcagcgttgtgatctttgccaccttcgtgactttatgcaatgcatcatgctatttcatacctaatgagggagttccaggagattcaaccaggaaatgcatggatctcaaaggaaacaaacacccaataaactcggagtggcagactgacaactgtgagacatgcacttgctacgaaacagaaatttcatgttgcacccttgtttctacacctgtgggttatgacaaagacaactgccaaagaatcttcaagaaggaggactgcaagtatatcgtggtggagaagaaggacccaaaaaagacctgttctgtcagtgaatggataatctaatgtgcttctagtaggcacagggctcccaggccaggcctcattctcctctggcctctaatagtcaatgattgtgtagccatgcctatcagtaaaaaagatttttgagcaaaaaaaaaacaacacaaaacaacaaaaaaaaaaaaatttgtggggcggccctgggcccccggaaaaagtttttaagacccttcgttgggggcgcgggggccccacttgggtangggacangggccaaagggggcccanagagaacccgggcaanagaaggggggggtncccccataaaaagccgcgggaaccgcgtcgaccatccagggtgcgggacacggcttataccggccacagcgaaatcgccgcggagggggc

SEQ ID NO: 732993 - DNA, 873 bp, Homo sapiens
ggatgtacctgtctataaggagtcctgcttatcacaatggggctcccaaacttggctgtgcagtggaaactccgggggaattttgaagaacactgacacccatcttccaccccgacactctgatttaattgggctgcagtgagaacagagcatcaatttaaaaagctgcccagaatgttctcctgggcagcgttgtgatctttgccaccttcgtgactttatgcaatgcatcatgctatttcatacctaatgagggagttccaggagattcaaccaggaaatgcatggatctcaaaggaaacaaacacccaataaactcggagtggcagactgacaactgtgagacatgcacttgctacgaaacagaaatttcatgttgcacccttgtttctacacctgtgggttatgacaaagacaactgccaaagaatcttcaagaaggaggactgcaagtatatcgtggtggagaagaaggacccaaaaaagacctgttctgtcagtgaatggataatctaatgtgcttctagtaggcacagggctcccaggccaggcctcattctcctctggcctctaatagtcaatgattgtgtagccatgcctatcagtaaaaaagatttttgagcaaaaaaaaaaaaaaaaaaaaaaaacatttgggggggcggccgggcccagaaaaaggttttaaacaccattcgtgtgggggcggcgggcccagtgggttacggacaccttgggccaaagggggcccaaagagaaaccggggccagacatgggggtgggtctcccccataaaaaccgcggcggcaccgggggtctggaccaatccagagggtcggggccacggtcaccacgggtcccgaaccaaaataggagg

SEQ ID NO: 732994 - DNA, 881 bp, Homo sapiens
  misc_feature (736)..(736): n is a, c, g, or t
  misc_feature (743)..(743): n is a, c, g, or t
  misc_feature (761)..(761): n is a, c, g, or t
  misc_feature (777)..(777): n is a, c, g, or t
  misc_feature (791)..(791): n is a, c, g, or t
ggatgtacctgtctataaggagtcctgcttatcacaatggggctcccaaacttggctgtgcagtggaaactccgggggaattttgaagaacactgacacccatcttccaccccgacactctgatttaattgggctgcagtgagaacagagcatcaatttaaaaagctgcccagaatgttctcctgggcagcgttgtgatctttgccaccttcgtgactttatgcaatgcatcatgctatttcatacctaatgagggagttccaggagattcaaccaggaaatgcatggatctcaaaggaaacaaacacccaataaactcggagtggcagactgacaactgtgagacatgcacttgctacgaaacagaaatttcatgttgcacccttgtttctacacctgtgggttatgacaaagacaactgccaaagaatcttcaagaaggaggactgcaagtatatcgtggtggagaagaaggacccaaaaaagacctgttctgtcagtgaatggataatctaatgtgcttctagtaggcacagggctcccaggccaggcctcattctcctctggcctctaatagtcaatgattgtgtagccatgcctatcagtaaaaaagatttttgagcaaaaaaaaaacaacacaaaacaacaaaaaaaaaaaaatttgtggggcggccctgggcccccggaaaaagtttttaagacccttcgttgggggcgcgggggccccacttgggtangggacangggccaaagggggcccanagagaacccgggcaanagaaggggggggtncccccataaaaagccgcgggaaccgcgtcgaccatccagggtgcgggacacggcttataccggccacagcgaaatcgccgcggagggggc

SEQ ID NO: 732995 - DNA, 519 bp, Homo sapiens
ggatgtacctgtctataaggagtcctgcttatcacaatggggctcccaaacttggctgtgcagtggaaactccgggggaattttgaagaacactgacacccatcttccaccccgacactctgatttaattgggctgcagtgagaacagagcatcaatttaaaaagctgcccagaatgttctcctgggcagcgttgtgatctttgccaccttcgtgactttatgcaatgcatcatgctatttcatacctaatgagggagttccaggagattcaaccaggatgtttctacacctgtgggttatgacaaagacaactgccaaagaatcttcaagaaggaggactgcaagtatatcgtggtggagaagaaggacccaaaaaagacctgttctgtcagtgaatggataatctaatgtgcttctagtaggcacagggctcccaggccaggcctcattctcctctggcctctaatagtcaatgattgtgtagccatgcctatcagtaaaaaagatttttgagcaaa

SEQ ID NO: 732996 - DNA, 598 bp, Homo sapiens
  misc_feature (3)..(3): n is a, c, g, or t
gcngccgcctactactactaaattcgcggccgtcgacaaggagtcctgcttatcacaatgaatgttctcctgggcagcgttgtgatctttgccaccttcgtgactttatgcaatgcatcatgctatttcatacctaatgagggagttccaggagattcaaccaggaaatgcatggatctcaaaggaaacaaacacccaataaactcggagtggcagactgacaactgtgagacatgcacttgctacgaaacagaaatttcatgttgcacccttgtttctacacctgtgggttatgacaaagacaactgccaaagaatcttcaagaaggaggactgcaagtatatcgtggtggagaagaaggacccaaaaaagacctgttctgtcagtgaatggataatctaatgtgcttctagtaggcacagggctcccaggccaggcctcattctcctctggcctctaatagtcaatgattgtgtagccatgcctatcagtaaaaaagatttttgagcaaaacacttgaatatgtgtgtccttttaatttataatttatgtatgcattgatttaatacacattataaagaatacaaacatttaaaaa

SEQ ID NO: 732997 - DNA, 888 bp, Homo sapiens
ggtgcttgttggctttaacatccacaatgaacacaagtgtgttgttgtcttctatcttcttcgtggtgactcagtggtcagcggaaacttgatgatagcgtagtggtcaagcttgtatctcctgggagcgactcttccaaagatatttgggctgcctcgggagttgcagcgtcttgggccgccggaagaatgttctcctgggcagcgttgtgatctttgccaccttcgtgactttatgcaatgcatcatgctatttcatacctaatgagggagttccaggagattcaaccaggaaatgcatggatctcaaaggaaacaaacacccaataaactcggagtggcagactgacaactgtgagacatgcacttgctacgaaacagaaatttcatgttgcacccttgtttctacacctgtgggttatgacaaagacaactgccaaagaatcttcaagaaggaggactgcaagtatatcgtggtggagaagaaggacccaaaaaagacctgttctgtcagtgaatggataatctaatgtgcttctagtaggcacagggctcccaggccaggcctcattctcctctggcctctaatagtcaatgattgtgtagccatgcctatcagtaaaaaagatttttgagcaaaaaaaaaaaaaaaaaaaaaaaacatttgggggggcggccgggcccagaaaaaggttttaaacaccattcgtgtgggggcggcgggcccagtgggttacggacaccttgggccaaagggggcccaaagagaaaccggggccagacatgggggtgggtctcccccataaaaaccgcggcggcaccgggggtctggaccaatccagagggtcggggccacggtcaccacgggtcccgaaccaaaataggagg

SEQ ID NO: 732998 - DNA, 896 bp, Homo sapiens
  misc_feature (751)..(751): n is a, c, g, or t
  misc_feature (758)..(758): n is a, c, g, or t
  misc_feature (776)..(776): n is a, c, g, or t
  misc_feature (792)..(792): n is a, c, g, or t
  misc_feature (806)..(806): n is a, c, g, or t
ggtgcttgttggctttaacatccacaatgaacacaagtgtgttgttgtcttctatcttcttcgtggtgactcagtggtcagcggaaacttgatgatagcgtagtggtcaagcttgtatctcctgggagcgactcttccaaagatatttgggctgcctcgggagttgcagcgtcttgggccgccggaagaatgttctcctgggcagcgttgtgatctttgccaccttcgtgactttatgcaatgcatcatgctatttcatacctaatgagggagttccaggagattcaaccaggaaatgcatggatctcaaaggaaacaaacacccaataaactcggagtggcagactgacaactgtgagacatgcacttgctacgaaacagaaatttcatgttgcacccttgtttctacacctgtgggttatgacaaagacaactgccaaagaatcttcaagaaggaggactgcaagtatatcgtggtggagaagaaggacccaaaaaagacctgttctgtcagtgaatggataatctaatgtgcttctagtaggcacagggctcccaggccaggcctcattctcctctggcctctaatagtcaatgattgtgtagccatgcctatcagtaaaaaagatttttgagcaaaaaaaaaacaacacaaaacaacaaaaaaaaaaaaatttgtggggcggccctgggcccccggaaaaagtttttaagacccttcgttgggggcgcgggggccccacttgggtangggacangggccaaagggggcccanagagaacccgggcaanagaaggggggggtncccccataaaaagccgcgggaaccgcgtcgaccatccagggtgcgggacacggcttataccggccacagcgaaatcgccgcggagggggc

SEQ ID NO: 732999 - DNA, 751 bp, Homo sapiens
gcctactactactccccggggggcggccgcgtcgacctgcttatcacaatgaatgttctcctgggcagcgttgtgatctttgccaccttcgtgactttatgcaatgcatcatgctatttcatacctaatgagggagttccaggagattcaaccaggaaatgcatggatctcaaaggaaacaaacacccaataaactcggagtggcagactgacaactgtgagacatgcacttgctacgaaacagaaatttcatgttgcacccttgtttctacacctgtgggttatgacaaagacaactgccaaagaatcttcaagaaggaggactgcaagtatatcgtggtggagaagaaggacccaaaaaagacctgttctgtcagtgaatggataatctaatgtgcttctagtaggcacagggctcccaggccaggcctcattctcctctggcctctaatagtcaatgattgtgtagccatgcctatcagtaaaaaagatttttgagcaaaaaaaaaaaaaaaaaaaaaaaacatttgggggggcggccgggcccagaaaaaggttttaaacaccattcgtgtgggggcggcgggcccagtgggttacggacaccttgggccaaagggggcccaaagagaaaccggggccagacatgggggtgggtctcccccataaaaaccgcggcggcaccgggggtctggaccaatccagagggtcggggccacggtcaccacgggtcccgaaccaaaataggagg

SEQ ID NO: 733000 - DNA, 759 bp, Homo sapiens
  misc_feature (614)..(614): n is a, c, g, or t
  misc_feature (621)..(621): n is a, c, g, or t
  misc_feature (639)..(639): n is a, c, g, or t
  misc_feature (655)..(655): n is a, c, g, or t
  misc_feature (669)..(669): n is a, c, g, or t
gcctactactactccccggggggcggccgcgtcgacctgcttatcacaatgaatgttctcctgggcagcgttgtgatctttgccaccttcgtgactttatgcaatgcatcatgctatttcatacctaatgagggagttccaggagattcaaccaggaaatgcatggatctcaaaggaaacaaacacccaataaactcggagtggcagactgacaactgtgagacatgcacttgctacgaaacagaaatttcatgttgcacccttgtttctacacctgtgggttatgacaaagacaactgccaaagaatcttcaagaaggaggactgcaagtatatcgtggtggagaagaaggacccaaaaaagacctgttctgtcagtgaatggataatctaatgtgcttctagtaggcacagggctcccaggccaggcctcattctcctctggcctctaatagtcaatgattgtgtagccatgcctatcagtaaaaaagatttttgagcaaaaaaaaaacaacacaaaacaacaaaaaaaaaaaaatttgtggggcggccctgggcccccggaaaaagtttttaagacccttcgttgggggcgcgggggccccacttgggtangggacangggccaaagggggcccanagagaacccgggcaanagaaggggggggtncccccataaaaagccgcgggaaccgcgtcgaccatccagggtgcgggacacggcttataccggccacagcgaaatcgccgcggagggggc

SEQ ID NO: 733001 - DNA, 678 bp, Homo sapiens
attcgcggccgcgtcgacggagtcctgcttatcacaatgaatgttctcctgggcagcgttgtgatctttgccaccttcgtgactttatgcaatgcatcatgctatttcatacctaatgagggagttccaggagattcaaccaggatgtttctacacctgtgggttatgacaaagacaactgccaaagaatcttcaagaaggaggactgcaagtatatcgtggtggagaagaaggacccaaaaaagacctgttctgtcagtgaatggataatctaatgtgcttctagtaggcacagggctcccaggccaggcctcattctcctctggcctctaatagtcaatgattgtgtagccatgcctatcagtaaaaaagatttttgagcaaaaaaaaaaaaaaaaaaaaaaaaaaaaaaaaaaaaaaaaggcgcaaaaaaaaaaaaaaaaaaaaaaaacatttgggggggcggccgggcccagaaaaaggttttaaacaccattcgtgtgggggcggcgggcccagtgggttacggacaccttgggccaaagggggcccaaagagaaaccggggccagacatgggggtgggtctcccccataaaaaccgcggcggcaccgggggtctggaccaatccagagggtcggggccacggtcaccacgggtcccgaaccaaaataggagg

SEQ ID NO: 733002 - DNA, 933 bp, Homo sapiens
ggtgcttgttggctttaacatccacaatgaacacaagtgtgttgttgtcttctatcttcttcgtggtgactcagtggtcagcggaaacttgatgatagcgtagtggtcaagcttgtatctcctgggagcgactcttccaaagatatttgggctgcctcgggagttgcagcgtcttgggccgccggaagaatgttctcctgggcagcgttgtgatctttgccaccttcgtgactttatgcaatgcatcatgctatttcatacctaatgagggagttccaggagattcaaccaggaaatgcatggatctcaaaggaaacaaacacccaataaactcggagtggcagactgacaactgtgagacatgcacttgctacgaaacagaaatttcatgttgcacccttgtttctacacctgtgggttatgacaaagacaactgccaaagaatcttcaagaaggaggactgcaagtatatcgtggtggagaagaaggacccaaaaaagacctgttctgtcagtgaatggataatctaatgtgcttctagtaggcacagggctcccaggccaggcctcattctcctctggcctctaatagtcaatgattgtgtagccatgcctatcagtaaaaaagatttttgagcaaaaaaaaaaaaaaaaaaaaaaaaaaaaaaaaaaaaaaaaggcgcaaaaaaaaaaaaaaaaaaaaaaaacatttgggggggcggccgggcccagaaaaaggttttaaacaccattcgtgtgggggcggcgggcccagtgggttacggacaccttgggccaaagggggcccaaagagaaaccggggccagacatgggggtgggtctcccccataaaaaccgcggcggcaccgggggtctggaccaatccagagggtcggggccacggtcaccacgggtcccgaaccaaaataggagg

SEQ ID NO: 733003 - DNA, 918 bp, Homo sapiens
ggatgtacctgtctataaggagtcctgcttatcacaatggggctcccaaacttggctgtgcagtggaaactccgggggaattttgaagaacactgacacccatcttccaccccgacactctgatttaattgggctgcagtgagaacagagcatcaatttaaaaagctgcccagaatgttctcctgggcagcgttgtgatctttgccaccttcgtgactttatgcaatgcatcatgctatttcatacctaatgagggagttccaggagattcaaccaggaaatgcatggatctcaaaggaaacaaacacccaataaactcggagtggcagactgacaactgtgagacatgcacttgctacgaaacagaaatttcatgttgcacccttgtttctacacctgtgggttatgacaaagacaactgccaaagaatcttcaagaaggaggactgcaagtatatcgtggtggagaagaaggacccaaaaaagacctgttctgtcagtgaatggataatctaatgtgcttctagtaggcacagggctcccaggccaggcctcattctcctctggcctctaatagtcaatgattgtgtagccatgcctatcagtaaaaaagatttttgagcaaaaaaaaaaaaaaaaaaaaaaaaaaaaaaaaaaaaaaaaggcgcaaaaaaaaaaaaaaaaaaaaaaaacatttgggggggcggccgggcccagaaaaaggttttaaacaccattcgtgtgggggcggcgggcccagtgggttacggacaccttgggccaaagggggcccaaagagaaaccggggccagacatgggggtgggtctcccccataaaaaccgcggcggcaccgggggtctggaccaatccagagggtcggggccacggtcaccacgggtcccgaaccaaaataggagg

SEQ ID NO: 733004 - DNA, 812 bp, Homo sapiens
ggatgtacctgtctataaggagtcctgcttatcacaatggggctcccaaacttggctgtgcagtggaaactccgggggaattttgaagaacactgacacccatcttccaccccgacactctgatttaattgggctgcagtgagaacagagcatcaatttaaaaagctgcccagaatgttctcctgggcagcgttgtgatctttgccaccttcgtgactttatgcaatgcatcatgctatttcatacctaatgagggagttccaggagattcaaccaggatgtttctacacctgtgggttatgacaaagacaactgccaaagaatcttcaagaaggaggactgcaagtatatcgtggtggagaagaaggacccaaaaaagacctgttctgtcagtgaatggataatctaatgtgcttctagtaggcacagggctcccaggccaggcctcattctcctctggcctctaatagtcaatgattgtgtagccatgcctatcagtaaaaaagatttttgagcaaaaaaaaaaaaaaaaaaaaaaaaaaaaaaaaaaaaaaaaggcgcaaaaaaaaaaaaaaaaaaaaaaaacatttgggggggcggccgggcccagaaaaaggttttaaacaccattcgtgtgggggcggcgggcccagtgggttacggacaccttgggccaaagggggcccaaagagaaaccggggccagacatgggggtgggtctcccccataaaaaccgcggcggcaccgggggtctggaccaatccagagggtcggggccacggtcaccacgggtcccgaaccaaaataggagg

SEQ ID NO: 733005 - DNA, 805 bp, Homo sapiens
  misc_feature (3)..(3): n is a, c, g, or t
gcngccgcctactactactaaattcgcggccgtcgacaaggagtcctgcttatcacaatgaatgttctcctgggcagcgttgtgatctttgccaccttcgtgactttatgcaatgcatcatgctatttcatacctaatgagggagttccaggagattcaaccaggaaatgcatggatctcaaaggaaacaaacacccaataaactcggagtggcagactgacaactgtgagacatgcacttgctacgaaacagaaatttcatgttgcacccttgtttctacacctgtgggttatgacaaagacaactgccaaagaatcttcaagaaggaggactgcaagtatatcgtggtggagaagaaggacccaaaaaagacctgttctgtcagtgaatggataatctaatgtgcttctagtaggcacagggctcccaggccaggcctcattctcctctggcctctaatagtcaatgattgtgtagccatgcctatcagtaaaaaagatttttgagcaaaaaaaaaaaaaaaaaaaaaaaaaaaaaaaaaaaaaaaaggcgcaaaaaaaaaaaaaaaaaaaaaaaacatttgggggggcggccgggcccagaaaaaggttttaaacaccattcgtgtgggggcggcgggcccagtgggttacggacaccttgggccaaagggggcccaaagagaaaccggggccagacatgggggtgggtctcccccataaaaaccgcggcggcaccgggggtctggaccaatccagagggtcggggccacggtcaccacgggtcccgaaccaaaataggagg

SEQ ID NO: 733006 - DNA, 797 bp, Homo sapiens
gcctactactactactactaaattcgcggccggtcgactgcttatcacaatgaatgttctcctgggcagcgttgtgatctttgccaccttcgtgactttatgcaatgcatcatgctatttcatacctaatgagggagttccaggagattcaaccaggaaatgcatggatctcaaaggaaacaaacacccaataaactcggagtggcagactgacaactgtgagacatgcacttgctacgaaacagaaatttcatgttgcacccttgtttctacacctgtgggttatgacaaagacaactgccaaagaatcttcaagaaggaggactgcaagtatatcgtggtggagaagaaggacccaaaaaagacctgttctgtcagtgaatggataatctaatgtgcttctagtaggcacagggctcccaggccaggcctcattctcctctggcctctaatagtcaatgattgtgtagccatgcctatcagtaaaaaagatttttgagcaaaaaaaaaaaaaaaaaaaaaaaaaaaaaaaaaaaaaaaaggcgcaaaaaaaaaaaaaaaaaaaaaaaacatttgggggggcggccgggcccagaaaaaggttttaaacaccattcgtgtgggggcggcgggcccagtgggttacggacaccttgggccaaagggggcccaaagagaaaccggggccagacatgggggtgggtctcccccataaaaaccgcggcggcaccgggggtctggaccaatccagagggtcggggccacggtcaccacgggtcccgaaccaaaataggagg

SEQ ID NO: 733007 - DNA, 784 bp, Homo sapiens
ggatgtacctgtctataaggagtcctgcttatcacaatgaatgttctcctgggcagcgttgtgatctttgccaccttcgtgactttatgcaatgcatcatgctatttcatacctaatgagggagttccaggagattcaaccaggaaatgcatggatctcaaaggaaacaaacacccaataaactcggagtggcagactgacaactgtgagacatgcacttgctacgaaacagaaatttcatgttgcacccttgtttctacacctgtgggttatgacaaagacaactgccaaagaatcttcaagaaggaggactgcaagtatatcgtggtggagaagaaggacccaaaaaagacctgttctgtcagtgaatggataatctaatgtgcttctagtaggcacagggctcccaggccaggcctcattctcctctggcctctaatagtcaatgattgtgtagccatgcctatcagtaaaaaagatttttgagcaaaaaaaaaaaaaaaaaaaaaaaaaaaaaaaaaaaaaaaaggcgcaaaaaaaaaaaaaaaaaaaaaaaacatttgggggggcggccgggcccagaaaaaggttttaaacaccattcgtgtgggggcggcgggcccagtgggttacggacaccttgggccaaagggggcccaaagagaaaccggggccagacatgggggtgggtctcccccataaaaaccgcggcggcaccgggggtctggaccaatccagagggtcggggccacggtcaccacgggtcccgaaccaaaataggagg

SEQ ID NO: 733008 - DNA, 678 bp, Homo sapiens
ggatgtacctgtctataaggagtcctgcttatcacaatgaatgttctcctgggcagcgttgtgatctttgccaccttcgtgactttatgcaatgcatcatgctatttcatacctaatgagggagttccaggagattcaaccaggatgtttctacacctgtgggttatgacaaagacaactgccaaagaatcttcaagaaggaggactgcaagtatatcgtggtggagaagaaggacccaaaaaagacctgttctgtcagtgaatggataatctaatgtgcttctagtaggcacagggctcccaggccaggcctcattctcctctggcctctaatagtcaatgattgtgtagccatgcctatcagtaaaaaagatttttgagcaaaaaaaaaaaaaaaaaaaaaaaaaaaaaaaaaaaaaaaaggcgcaaaaaaaaaaaaaaaaaaaaaaaacatttgggggggcggccgggcccagaaaaaggttttaaacaccattcgtgtgggggcggcgggcccagtgggttacggacaccttgggccaaagggggcccaaagagaaaccggggccagacatgggggtgggtctcccccataaaaaccgcggcggcaccgggggtctggaccaatccagagggtcggggccacggtcaccacgggtcccgaaccaaaataggagg

SEQ ID NO: 733009 - DNA, 796 bp, Homo sapiens
gcctactactactccccggggggcggccgcgtcgacctgcttatcacaatgaatgttctcctgggcagcgttgtgatctttgccaccttcgtgactttatgcaatgcatcatgctatttcatacctaatgagggagttccaggagattcaaccaggaaatgcatggatctcaaaggaaacaaacacccaataaactcggagtggcagactgacaactgtgagacatgcacttgctacgaaacagaaatttcatgttgcacccttgtttctacacctgtgggttatgacaaagacaactgccaaagaatcttcaagaaggaggactgcaagtatatcgtggtggagaagaaggacccaaaaaagacctgttctgtcagtgaatggataatctaatgtgcttctagtaggcacagggctcccaggccaggcctcattctcctctggcctctaatagtcaatgattgtgtagccatgcctatcagtaaaaaagatttttgagcaaaaaaaaaaaaaaaaaaaaaaaaaaaaaaaaaaaaaaaaggcgcaaaaaaaaaaaaaaaaaaaaaaaacatttgggggggcggccgggcccagaaaaaggttttaaacaccattcgtgtgggggcggcgggcccagtgggttacggacaccttgggccaaagggggcccaaagagaaaccggggccagacatgggggtgggtctcccccataaaaaccgcggcggcaccgggggtctggaccaatccagagggtcggggccacggtcaccacgggtcccgaaccaaaataggagg

SEQ ID NO: 733010 - DNA, 1491 bp, Homo sapiens
tttcgaccccgcgtccggacggaactgccacgatgctgccactttggactctttcactgctgctgggagcagtagcaggaaaagaagtttgctacgaaagactcggctgcttcagtgatgactccccatggtcaggaattacggaaagacccctccatatattgccttggtctccaaaagatgtcaacacccgcttcctcctatatactaatgagaacccaaacaactttcaagaagttgccgcagattcatcaagcatcagtggctccaatttcaaaacaaatagaaaaactcgctttattattcatggattcatagacaagggagaagaaaactggctggccaatgtgtgcaagaatctgttcaaggtggaaagtgtgaactgtatctgtgtggactggaaaggtggctcccgaactggatacacacaagcctcgcagaacatcaggatcgtgggagcagaagtggcatattttgttgaatttcttcagtcggcgttcggttactcaccttccaacgtgcatgtcattggccacagcctgggtgcccacgctgctggggaggctggaaggagaaccaatgggaccattggacgcatcacagggttggacccagcagaaccttgctttcagggcacacctgaattagtccgattggaccccagcgatgccaaatttgtggatgtaattcacacggatggtgcccccatagtccccaatttggggtttggaatgagccaagtcgtgggccacctagatttctttccaaatggaggagtggaaatgcctggatgtaaaaagaacattctctctcagattgtggacatagacggaatctgggaagggactcgagactttgcggcctgtaatcacttaagaagctacaaatattacactgatagcatcgtcaaccctgatggctttgctggattcccctgtgcctcttacaacgtcttcactgcaaacaagtgtttcccttgtccaagtggaggctgcccacagatgggtcactatgctgatagatatcctgggaaaacaaatgatgtgggccagaaattttatctagacactggtgatgccagtaattttgcacgttggaggtataaggtatctgtcacactgtctggaaaaaaggttacaggacacatactagtttctttgttcggaaataaaggaaactctaagcagtatgaaattttcaagggcactctcaaaccagatagtactcattccaatgaatttgactcagatgtggatgttggggacttgcagatggttaaatttatttggtataacaatgtgatcaacccaactttacctagagtgggagcatccaagattatagtggagacaaatgttggaaaacagttcaacttctgtagtccagaaaccgtcagggaggaagttctgctcaccctcacaccgtgttaggagactactgttatttgaccaatgaattgacttctaataaaatctagtggtgatgcaaaaa

SEQ ID NO: 733011 - DNA, 535 bp, Homo sapiens
atgctgccactttggactctttcactgctgctgggagcagtagcaggaaaagaagtttgctacgaaagactcggctgcttcagtgatgactccccatggtcaggaattacggaaagacccctccatatattgccttggtctccaaaagatgtcaacacccgcttcctcctatatactaatgagaacccaaacaactttcaagaagttgccgcagattcatcaagcatcagtggctccaatttcaaaacaaatagaaaaactcgctttattattcatggattcatagacaagggagaagaaaactggctggccaatgtgtgcaagaatctgttcaaggtggaaagtgtgaactgtatctgtgtggactggaaaggtggctcccgaactggatacacacaagcctcgcagaacatcaggatcgtgggagcagaagtggcatattttgttgaatttcttcagggtaattactcccggattgcataaaagcctgtacacatggttttccagattatctttccaaaaaaaaaaaaaaaag

SEQ ID NO: 733012 - DNA, 570 bp, Homo sapiens
atgctgccactttggactctttcactgctgctgggagcagtagcaggaaaagaagtttgctacgaaagactcggctgcttcagtgatgactccccatggtcaggaattacggaaagacccctccatatattgccttggtctccaaaagatgtcaacacccgcttcctcctatatactaatgagaacccaaacaactttcaagaagttgccgcagattcatcaagcatcagtggctccaatttcaaaacaaatagaaaaactcgcttaaaaaaaaaaaatttggggggggcggggccggaagaaggtcttcctaaaaaccccatctgggttgtgggcggcgcggggcgccacgatgggtatggtagaccgcgtgcgccaacagcgcgtgttcccaaggagaaacccgggcgccacagaactgcggcggctgtggtcttccccaaaaaaaaaacgcgccggggggggcaccgggcgggctcttctgacaaccccagaaggggggtccagaggggcaccaccggggctcactcccgcgaggccctaggacgccaaataaattgcccaccaagg

SEQ ID NO: 733013 - DNA, 971 bp, Homo sapiens
tatccttctgggggattgcaggaaaagaagtttgctacgaaagactcggctgcttcagtgatgactccccatggtcaggaattacggaaagaccctccaatttcaaaacaaatagaaaaactcgctttattattcatggattcatagacaagggagaagaaaactggctggccaatgtgtgcaagaatctgttcaaggtggaaagtgtgaactgtatctgtgtggactggaaaggtggctcccgaactggatacacacaagcctcgcagaacatcaggatcgtgggagcagaagtggcatattttgttgaatttcttcagtcggcgttcggttactcaccttccaacgtgcatgtcattggccacagcctgggtgcccacgctgctggggaggctggaaggagaaccaatgggaccattggacgcatcacagggttggacccagcagaaccttgctttcagggcacacctgaattagtccgattggaccccagcgatgccaaatttgtggatgtaattcacacggatggtgcccccatagtccccaatttggggtttggaatgagccaagtcgtgggccacctagatttctttccaaatggaggagtggaaatgcctggatgtaaaaagaacattctctctcagattgtggacatagacggaatctgggaagggactcgagactttgcggcctgtaatcacttaagaagctacaaatattacactgatagcatcgtcaaccctgatggctttgctggattcccctgtgcctcttacaacgtcttcactgcaaacaagtgtttcccttgtccaagtggaggctgcccacagatgggtcactatgctgatagatatcctgggaaaacaaatgatgtgggccagaaattttatctagacactggtgatgccagtaattttgcacgttggaggtataaggtatctgtcacactgtctggaaaaaaggttacagga

SEQ ID NO: 733014 - DNA, 1083 bp, Homo sapiens
atgctgccactttggactctttcactgctgctgggagcagtagcaggaaaagaagtttgctacgaaagactcggctgcttcagtgatgactccccatggtcaggaattacggaaagacccctccatatattgccttggtctccaaaagatgtcaacacccgcttcctcctatatactaatgagaacccaaacaactttcaagaagttgccgcagattcatcaagcatcagtggctccaatttcaaaacaaatagaaaaactcgctttattattcatggattcatagacaagggagaagaaaactggctggccaatgtgtgcaagaatctgttcaaggtggaaagtgtgaactgtatctgtgtggactggaaaggtggctcccgaacatcaggatcgtgggagcagaagtggcatatttcgtgaattcttcagtcggcgttcggttactcaccttccaacgtgcatgtcattggccacagcctgggtgcccacgctgctggggaggctggaaggagaaccaatgggaccattggacgcatcacagggttggacccagcagaaccttgctttcagggcacacctgaattagtccgattggaccccagcgatgccaaatttgtggatgtaattcacacggatggtgcccccatagtccccaatttggggtttggaatgagccaagtcgtgggccacctagatttctttccaaatggaggagtggaaatgcctggatgtaaaaagaacattctctctcagattgtggacatagacggaatctgggaagggactcgagactttgcggcctgtaatcacttaagaagctacaaatattacactgatagcatcgtcaaccctgatggctttgctggattcccctgtgcctcttacaacgtcttcactgcaaacaagtgtttcccttgtccaagtggaggctgcccacagatgggtcactatgctgatagatatcctgggaaaacaaatgatgtgggccagaaattttatctagacactggtgatgccagtaattttgcacgttggaggtataaggtatctgtcacactgtctggaaaaaaggttacagga

SEQ ID NO: 733015 - DNA, 854 bp, Homo sapiens
atgctgccactttggactctttcactgctgctgggagcagtagcaggaaaagaagtttgctacgaaagactcggctgcttcagtgatgactccccatggtcaggaattacggaaagacccctccatatattgccttggtctccaaaagatgtcaacacccgcttcctcctatatactaatgagaacccaaacaactttcaagaagttgccgcagattcatcaagcatcagtggctccaatttcaaaacaaatagaaaaactcgcttcacatactagtttctttgttcggaaataaaggaaactctaagcagtatgaaattttcaagggcactctcaaaccagatagtactcattccaatgaatttgactcagatgtggatgttggggacttgcagatggttaaatttatttggtataacaatgtgatcaacccaactttacctagagtgggagcatccaagattatagtggagacaaatgttggaaaacagttcaacttctgtagtccagaaaccgtcagggaggaagttctgctcaccctcacaccgtgttaggagactactgttatttgaccaatgaattgacttctaataaaatctagtggtgatgcaaaaaacacacacaacaaaacaacttggggggggcccggccggaaaatttaaaccccgtgggcgggcccgatgttgaccgggctcacgcggccagaccgggcggacacgggggttcccaaaaaccgggcggcgtcgcaaccaggggccgggcaggtcaacggcagcgacccgcccgcgcaccccccctgcccccccgcgccccaccgctaccctcgggccccacccgcctatttcttacgccca

SEQ ID NO: 733016 - DNA, 567 bp, Homo sapiens
atgctgccactttggactctttcactgctgctgggagcagtagcaggaaaagaagtttgctacgaaagactcggctgcttcagtgatgactccccatggtcaggaattacggaaagacccctccatatattgccttggtctccaaaagatgtcaacacccgcttcctcctatatactaatgagaacccaaacaactttcaagaagttgccgcagattcatcaagcatcagtggctccaatttcaaaacaaatagaaaaactcgcttgaaattttcaagggcactctcaaaccagatagtactcattccaatgaatttgactcagatgtggatgttggggacttgcagatggttaaatttatttggtataacaatgtgatcaacccaactttacctagagtgggagcatccaagattatagtggagacaaatgttggaaaacagttcaacttctgtagtccagaaaccgtcagggaggaagttctgctcaccctcacaccgtgttaggagactactgttatttgaccaatgaattgacttctaataaaatctagtggtgatgcaaaaa

SEQ ID NO: 733017 - DNA, 736 bp, Homo sapiens
tcaccctggggaattccaagacattgtccttgaaggaggctccaagctcaggacctcaggatgggagatgaggagaagcggaacagggccatcacggcccgcaggcagcacctgaagagcgtgatgctgcagatagcggccacggagctggagaaggaggagagccgccgtgaggcagagaagcagaactacctggcggagcactgcccgccgctgcatatcccgggctccatgtctgaagtgcaggagctctgcaaacagctgcacgccaagatcgatgcggctgaagaggagaagtacgacatggaggtgagggtgcagaagaccagcaaggagctggaggacatgaaccagaagctatttgatctgcggggcaagttcaagcggcccccactgcggagggtgcgcatgtcggccgatgccatgctcaaggccctgctgggctcgaagcacaaggtgtgcatggacctgagggccaacctgaagcaggtcaagaaggaggacacagagaaggagcgggacctgcgagacgtgggtgactggaggaagaacatcgaggagaagtctggcatggagggccggaagaagatgtttgagtccgagtcctaggccactcgctgcccctacgcctgccccggtgcccggctcccagcagaacatactagggagatgcacccagagcctgccagggagggctggcctcaccaccaccgtcaataaaggatttgaatcccca

SEQ ID NO: 733018 - DNA, 484 bp, Homo sapiens
  misc_feature (441)..(441): n is a, c, g, or t
aagcggaacagggccatcacggcccgcaggcagcacctgaagagcgtgatgctgcagatagcggccacggagctggagaaggaggagagccgccgtgaggcagagaagcagaactacctggcggagcactgcccgccgctgcatatcccgggctccatgtctgaagtgcaggagctctgcaaacagctgcacgccaagatcgatgcggctgaagaggagaagtacgacatggaggtgagggtgcagaagaccagcaaggagctggaggacatgaaccagaagctatttgatctgcggggcaagttcaagcggcccccactgcggagggtgcgcatgtcggccgatgccatgctcaaggccctgctgggctcgaagcacaaggtgtgcatggacctgagggccaacctgaagcaggtcaagaaggaggacacagagaaggancggacctgcgaacgtgggtaggaggtgaagatcctgtagagtg

SEQ ID NO: 733019 - DNA, 692 bp, Homo sapiens; identical to SEQ ID NO: 76836
  misc_feature (43)..(43): n is a, c, g, or t
  misc_feature (45)..(45): n is a, c, g, or t

SEQ ID NO: 733020 - DNA, 515 bp, Homo sapiens
  misc_feature (43)..(43): n is a, c, g, or t
  misc_feature (45)..(45): n is a, c, g, or t
  misc_feature (472)..(472): n is a, c, g, or t
tgctgaggtactctaaggatctccctcctacccacgggaacangncatcatggcccgcaggcagcacctgaagagcgtgatgctgcagatagcggccacggagctggagaaggaggagagccgccgtgaggcagagaagcagaactacctggcggagcactgcccgccgctgcatatcccgggctccatgtctgaagtgcaggagctctgcaaacagctgcacgccaagatcgatgcggctgaagaggagaagtacgacatggaggtgagggtgcagaagaccagcaaggagctggaggacatgaaccagaagctatttgatctgcggggcaagttcaagcggcccccactgcggagggtgcgcatgtcggccgatgccatgctcaaggccctgctgggctcgaagcacaaggtgtgcatggacctgagggccaacctgaagcaggtcaagaaggaggacacagagaaggancggacctgcgaacgtgggtaggaggtgaagatcctgtagagtg

SEQ ID NO: 733021 - DNA, 393 bp, Homo sapiens; identical to SEQ ID NO: 80745

SEQ ID NO: 733022 - DNA, 1074 bp, Homo sapiens
ggagtgcctgcagccggtgctgtccacagggagctccagcccttctcacactcgacccgcagaaaccacccaccttcaccatgtctgacgaggaagttgaacaggtggaggagcagtacgaagaagaagaggaagcccaggaggaagctgcagaagtccatgaggaacatgaaccaggaggacgttcaagaagaggagaaaccgagacccaaactcactgctcctaagatcccagaaggggagaaagtggacttcgatgacatccagaagaagcgtcagaacaaagacctaatggagctccaggccctcatcgacagccactttgaagcccggaagaaggaggaggaggagctggtcgctctcaaagagagaatcgagaagcgccgtgcagagagagcggagcagcagaggattcgtgcagagaaggagagggagcgccagaacagactggcggaggaaaaggccagaagggaggaggaggatgccaagaggagggcagaggacgacctgaagaagaagaaagctctgtcttccatgggagccaactacagcagctacctggccaaggctgaccagaagagaggcaagaagcagacagcccgggaaatgaagaagaagattctggctgagagacgcaagccgctcaacatcgatcaccttggtgaagacaaactgagggacaaggccaaggagctctgggagaccctgcaccagctggagattgacaagttcgagtttggggagaagctgaaacgccagaaatatgacatcaccacgctcaggagccgcattgaccaggcccagaagcacagcaagaaggctgggaccccagccaagggcaaagtcggcgggcgctggaagtagagaggccagaaaggcccctcgaggcagagaccctccgccctcttgcacaccagggccgctcgtgggactccacatcctccagcccccacaatcctgtcaggggctccctgacagtcctgggggtggagaggccatcccggggcgtcccccgcgtctgtgtccttgctgccttcatcccctggggcctgtgaataaagctgcagaaccccc

SEQ ID NO: 733023 - DNA, 508 bp, Homo sapiens
ggagtgcctgcagccggtgctgtccacagggagctccagcccttctcacactcgacccgcagaaaccacccaccttcaccatgtctgacgaggaagttgaacaggtggaggagcagtacgaagaagaagaggaagcccaggaggaagctgcagaagtccatgaggaacatgaaccagaggacgacctgaagaagaagaaagctctgtcttccatgggagccaactacagcagctacctggccaaggctgaccagaagagaggcaagaagcagacagcccgggaaatgaagaagaagattctggctgagagacgcaagccgctcaacatcgatcaccttggtgaagacaaactgagggacaaggccaaggagctctgggagaccccacaatcctgtcaggggctccctgacagtcctgggggtggagaggccatcccggggcgtcccccgcgtctgtgtccttgctgccttcatcccctggggcctgtgaataaagctgcagaaccccc

SEQ ID NO: 733024 - DNA, 334 bp, Homo sapiens; identical to SEQ ID NO: 80747

SEQ ID NO: 733025 - DNA, 752 bp, Homo sapiens
ggagtgcctgcagccggtgctgtccacagggagctccagcccttctcacactcgacccgcagaaaccacccaccttcaccatgtctgacgaggaagttgaacaggtggaggaggaagcccaggaggaagaggaagttcaagaagaggagaaaccgagacccaaactcactgctcctaagatcccagaaggggagaaagtggacttcgatgacatccagaagaagcgtcagaacaaagacctaatggagctccaggccctcatcgacagccactttgaagcccggaagaaggaggaggaggagctggtcgctctcaaagagagaatcgagaagcgccgtgcagagagagcggagcagcagaggattcgtgcagagaaggagagggagcgccagaacagactggcggaggaaaaggccagaagggaggaggaggatgccaagaggagggcagaggacgacctgaagaagaagaaagctctgtcttccatgggagccaactacagcagctacctggccaaggctgaccagaagagaggcaagaagcagacagcccgggaaatgaagaagaagattctggctgagagacgcaagccgagggccgctcgtgggactccacatcctccagcccccacaatcctgtcaggggctccctgacagtcctgggggtggagaggccatcccggggcgtcccccgcgtctgtgtccttgctgccttcatcccctggggcctgtgaataaagctgcagaaccccc

SEQ ID NO: 733026 - DNA, 1074 bp, Homo sapiens
ggagtgcctgcagccggtgctgtccacagggagctccagcccttctcacactcgacccgcagaaaccacccaccttcaccatgtctgacgaggaagttgaacaggtggaggagcagtacgaagaagaagaggaagcccaggaggaagctgcagaagtccatgaggaacatgaaccaggaggacgttcaagaagaggagaaaccgagacccaaactcactgctcctaagatcccagaaggggagaaagtggacttcgatgacatccagaagaagcgtcagaacaaagacctaatggagctccaggccctcatcgacagccactttgaagcccggaagaaggaggaggaggagctggtcgctctcaaagagagaatcgagaagcgccgtgcagagagagcggagcagcagaggattcgtgcagagaaggagagggagcgccagaacagactggcggaggaaaaggccagaagggaggaggaggatgccaagaggagggcagaggacgacctgaagaagaagaaagctctgtcttccatgggagccaactacagcagctacctggccaaggctgaccagaagagaggcaagaagcagacagcccgggaaatgaagaagaagattctggctgagagacgcaagccgctcaacatcgatcaccttggtgaagacaaactgagggacaaggccaaggagctctgggagaccctgcaccagctggagattgacaagttcgagtttggggagaagctgaaacgccagaaatatgacatcatgaatgtccgggccagagtgcagatgctggccaagttcagcaagaaggctgggaccccagccaagggcaaagtcggcgggcgctggaagtagagaggccagaaaggcccctcgaggcagagaccctccgccctcttgcacaccagggccgctcgtgggactccacatcctccagcccccacaatcctgtcaggggctccctgacagtcctgggggtggagaggccatcccggggcgtcccccgcgtctgtgtccttgctgccttcatcccctggggcctgtgaataaagctgcagaaccccc

SEQ ID NO: 733027 - DNA, 1093 bp, Homo sapiens
ggagtgcctgcagccggtgctgtccacagggagctccagcccttctcacactcgacccgcagaaaccacccaccttcaccatgtctgacgaggaagttgaacaggtggaggagcagtacgaagaagaagaggaagcccaggaggaagctgcagaagtccatgaggaacatgaaccaggaggacgttcaagaagaggagaaaccgagacccaaactcactgctcctaagatcccagaaggggagaaagtggacttcgatgacatccagaagaagcgtcagaacaaagacctaatggagctccaggccctcatcgacagccactttgaagcccggaagaaggaggaggaggagctggtcgctctcaaagagagaatcgagaagcgccgtgcagagagagcggagcagcagaggattcgtgcagagaaggagagggagcgccagaacagactggcggaggaaaaggccagaagggaggaggaggatgccaagaggagggcagaggacgacctgaagaagaagaaagctctgtcttccatgggagccaactacagcagctacctggccaaggctgaccagaagagaggcaagaagcagacagcccgggaaatgaagaagaagattctggctgagagacgcaagccgctcaacatcgatcaccttggtgaagacaaactgagggacaaggccaaggagctctgggagaccctgcaccagctggagattgacaagttcgagtttggggagaagctgaaacgccagaaatatgacatcaccacgctcaggagccgcattgaccaggcccagaagcacagcaagaaggctgggaccccagccaagggcaaagtcggcgggcgctggaagtagagaggccagaaaggcccctcgaggcagagaccctccgccctcttgcacaccagggccgctcgtgggactccacatcctccagcccccacaatcctgtcaggggctccctgacagtcctgggggtggagaggccatcccggggcgtcccccgcgtctgtgtccttgctgccttcatcccctggggcctgtgaataaagctgcagaaccccccccccttcacagtctgtac

SEQ ID NO: 733028 - DNA, 927 bp, Homo sapiens
ggagtgcctgcagccggtgctgtccacagggagctccagcccttctcacactcgacccgcagaaaccacccaccttcaccatgtctgacgaggaagttgaacaggtggaggagcagtacgaagaagaagaggaagcccaggaggaagctgcagaagtccatgaggaacatgaaccaggaggacgttcaagaagaggagaaaccgagacccaaactcactgctcctaagatcccagaaggggagaaagtggacttcgatgacatccagaagaagcgtcagaacaaagacctaatggagctccaggccctcatcgacagccactttgaagcccggaagaaggaggaggaggagctggtcgctctcaaagagagaatcgagaagcgccgtgcagagagagcggagcagcagaggattcgtgcagagaaggagagggagcgccagaacagactggcggaggaaaaggccagaagggaggaggaggatgccaagaggagggcagaggacgacctgaagaagaagaaagctctgtcttccatgggagccaactacagcagctacctggccaaggctgaccagaagagaggcaagaagcagacagcccgggaaatgaagaagaagattctggctgagagacgcaagccgctcaacatcgatcaccttggtgaagacaaactgagggacaaggccaaggagctctgggagaccctgcaccagctggagattgacaagttcgagtttggggagaagctgaaacgccagaaatatgacagggccgctcgtgggactccacatcctccagcccccacaatcctgtcaggggctccctgacagtcctgggggtggagaggccatcccggggcgtcccccgcgtctgtgtccttgctgccttcatcccctggggcctgtgaataaagctgcagaaccccc

SEQ ID NO: 733029 - DNA, 753 bp, Homo sapiens; identical to SEQ ID NO: 80755

SEQ ID NO: 733030 - DNA, 606 bp, Homo sapiens
ctccctcggaggagccggggacagggctgagcagacccccttctctggctgcaggagaagcgccgtgcagagagagcggagcagcagaggattcgtgcagagaaggagagggagcgccagaacagactggcggaggaaaaggccagaagggaggaggaggatgccaagaggagggcagaggacgacctgaagaagaagaaagctctgtcttccatgggagccaactacagcagctacctggccaaggctgaccagaagagaggcaagaagcagacagcccgggaaatgaagaagaagattctggctgagagacgcaagccgctcaacatcgatcaccttggtgaagacaaactgagggacaaggccaaggagctctgggagaccctgcaccagctggagattgacaagttcgagtttggggagaagctgaaacgccagaaatatgacagggccgctcgtgggactccacatcctccagcccccacaatcctgtcaggggctccctgacagtcctgggggtggagaggccatcccggggcgtcccccgcgtctgtgtccttgctgccttcatcccctggggcctgtgaataaagctgcagaaccccc

SEQ ID NO: 733031 - DNA, 772 bp, Homo sapiens
ctccctcggaggagccggggacagggctgagcagacccccttctctggctgcaggagaagcgccgtgcagagagagcggagcagcagaggattcgtgcagagaaggagagggagcgccagaacagactggcggaggaaaaggccagaagggaggaggaggatgccaagaggagggcagaggacgacctgaagaagaagaaagctctgtcttccatgggagccaactacagcagctacctggccaaggctgaccagaagagaggcaagaagcagacagcccgggaaatgaagaagaagattctggctgagagacgcaagccgctcaacatcgatcaccttggtgaagacaaactgagggacaaggccaaggagctctgggagaccctgcaccagctggagattgacaagttcgagtttggggagaagctgaaacgccagaaatatgacatcaccacgctcaggagccgcattgaccaggcccagaagcacagcaagaaggctgggaccccagccaagggcaaagtcggcgggcgctggaagtagagaggccagaaaggcccctcgaggcagagaccctccgccctcttgcacaccagggccgctcgtgggactccacatcctccagcccccacaatcctgtcaggggctccctgacagtcctgggggtggagaggccatcccggggcgtcccccgcgtctgtgtccttgctgccttcatcccctggggcctgtgaataaagctgcagaaccccccccccttcacagtctgtac

SEQ ID NO: 733032 - DNA, 753 bp, Homo sapiens
ctccctcggaggagccggggacagggctgagcagacccccttctctggctgcaggagaagcgccgtgcagagagagcggagcagcagaggattcgtgcagagaaggagagggagcgccagaacagactggcggaggaaaaggccagaagggaggaggaggatgccaagaggagggcagaggacgacctgaagaagaagaaagctctgtcttccatgggagccaactacagcagctacctggccaaggctgaccagaagagaggcaagaagcagacagcccgggaaatgaagaagaagattctggctgagagacgcaagccgctcaacatcgatcaccttggtgaagacaaactgagggacaaggccaaggagctctgggagaccctgcaccagctggagattgacaagttcgagtttggggagaagctgaaacgccagaaatatgacatcatgaatgtccgggccagagtgcagatgctggccaagttcagcaagaaggctgggaccccagccaagggcaaagtcggcgggcgctggaagtagagaggccagaaaggcccctcgaggcagagaccctccgccctcttgcacaccagggccgctcgtgggactccacatcctccagcccccacaatcctgtcaggggctccctgacagtcctgggggtggagaggccatcccggggcgtcccccgcgtctgtgtccttgctgccttcatcccctggggcctgtgaataaagctgcagaaccccc

SEQ ID NO: 733033 - DNA, 1025 bp, Homo sapiens
ggagtgcctgcagccggtgctgtccacagggagctccagcccttctcacactcgacccgcagaaaccacccaccttcaccatgtctgacgaggaagttgaacaggtggaggaggaagcccaggaggaagaggaagttcaagaagaggagaaaccgagacccaaactcactgctcctaagatcccagaaggggagaaagtggacttcgatgacatccagaagaagcgtcagaacaaagacctaatggagctccaggccctcatcgacagccactttgaagcccggaagaaggaggaggaggagctggtcgctctcaaagagagaatcgagaagcgccgtgcagagagagcggagcagcagaggattcgtgcagagaaggagagggagcgccagaacagactggcggaggaaaaggccagaagggaggaggaggatgccaagaggagggcagaggacgacctgaagaagaagaaagctctgtcttccatgggagccaactacagcagctacctggccaaggctgaccagaagagaggcaagaagcagacagcccgggaaatgaagaagaagattctggctgagagacgcaagccgctcaacatcgatcaccttggtgaagacaaactgagggacaaggccaaggagctctgggagaccctgcaccagctggagattgacaagttcgagtttggggagaagctgaaacgccagaaatatgacatcaccacgctcaggagccgcattgaccaggcccagaagcacagcaagaaggctgggaccccagccaagggcaaagtcggcgggcgctggaagtagagaggccagaaaggcccctcgaggcagagaccctccgccctcttgcacaccagggccgctcgtgggactccacatcctccagcccccacaatcctgtcaggggctccctgacagtcctgggggtggagaggccatcccggggcgtcccccgcgtctgtgtccttgctgccttcatcccctggggcctgtgaataaagctgcagaaccccc

SEQ ID NO: 733034 - DNA, 1044 bp, Homo sapiens
ggagtgcctgcagccggtgctgtccacagggagctccagcccttctcacactcgacccgcagaaaccacccaccttcaccatgtctgacgaggaagttgaacaggtggaggaggaagcccaggaggaagaggaagttcaagaagaggagaaaccgagacccaaactcactgctcctaagatcccagaaggggagaaagtggacttcgatgacatccagaagaagcgtcagaacaaagacctaatggagctccaggccctcatcgacagccactttgaagcccggaagaaggaggaggaggagctggtcgctctcaaagagagaatcgagaagcgccgtgcagagagagcggagcagcagaggattcgtgcagagaaggagagggagcgccagaacagactggcggaggaaaaggccagaagggaggaggaggatgccaagaggagggcagaggacgacctgaagaagaagaaagctctgtcttccatgggagccaactacagcagctacctggccaaggctgaccagaagagaggcaagaagcagacagcccgggaaatgaagaagaagattctggctgagagacgcaagccgctcaacatcgatcaccttggtgaagacaaactgagggacaaggccaaggagctctgggagaccctgcaccagctggagattgacaagttcgagtttggggagaagctgaaacgccagaaatatgacatcaccacgctcaggagccgcattgaccaggcccagaagcacagcaagaaggctgggaccccagccaagggcaaagtcggcgggcgctggaagtagagaggccagaaaggcccctcgaggcagagaccctccgccctcttgcacaccagggccgctcgtgggactccacatcctccagcccccacaatcctgtcaggggctccctgacagtcctgggggtggagaggccatcccggggcgtcccccgcgtctgtgtccttgctgccttcatcccctggggcctgtgaataaagctgcagaaccccccccccttcacagtctgtac

SEQ ID NO: 733035 - DNA, 878 bp, Homo sapiens
ggagtgcctgcagccggtgctgtccacagggagctccagcccttctcacactcgacccgcagaaaccacccaccttcaccatgtctgacgaggaagttgaacaggtggaggaggaagcccaggaggaagaggaagttcaagaagaggagaaaccgagacccaaactcactgctcctaagatcccagaaggggagaaagtggacttcgatgacatccagaagaagcgtcagaacaaagacctaatggagctccaggccctcatcgacagccactttgaagcccggaagaaggaggaggaggagctggtcgctctcaaagagagaatcgagaagcgccgtgcagagagagcggagcagcagaggattcgtgcagagaaggagagggagcgccagaacagactggcggaggaaaaggccagaagggaggaggaggatgccaagaggagggcagaggacgacctgaagaagaagaaagctctgtcttccatgggagccaactacagcagctacctggccaaggctgaccagaagagaggcaagaagcagacagcccgggaaatgaagaagaagattctggctgagagacgcaagccgctcaacatcgatcaccttggtgaagacaaactgagggacaaggccaaggagctctgggagaccctgcaccagctggagattgacaagttcgagtttggggagaagctgaaacgccagaaatatgacagggccgctcgtgggactccacatcctccagcccccacaatcctgtcaggggctccctgacagtcctgggggtggagaggccatcccggggcgtcccccgcgtctgtgtccttgctgccttcatcccctggggcctgtgaataaagctgcagaaccccc

SEQ ID NO: 733036 - DNA, 1025 bp, Homo sapiens
ggagtgcctgcagccggtgctgtccacagggagctccagcccttctcacactcgacccgcagaaaccacccaccttcaccatgtctgacgaggaagttgaacaggtggaggaggaagcccaggaggaagaggaagttcaagaagaggagaaaccgagacccaaactcactgctcctaagatcccagaaggggagaaagtggacttcgatgacatccagaagaagcgtcagaacaaagacctaatggagctccaggccctcatcgacagccactttgaagcccggaagaaggaggaggaggagctggtcgctctcaaagagagaatcgagaagcgccgtgcagagagagcggagcagcagaggattcgtgcagagaaggagagggagcgccagaacagactggcggaggaaaaggccagaagggaggaggaggatgccaagaggagggcagaggacgacctgaagaagaagaaagctctgtcttccatgggagccaactacagcagctacctggccaaggctgaccagaagagaggcaagaagcagacagcccgggaaatgaagaagaagattctggctgagagacgcaagccgctcaacatcgatcaccttggtgaagacaaactgagggacaaggccaaggagctctgggagaccctgcaccagctggagattgacaagttcgagtttggggagaagctgaaacgccagaaatatgacatcatgaatgtccgggccagagtgcagatgctggccaagttcagcaagaaggctgggaccccagccaagggcaaagtcggcgggcgctggaagtagagaggccagaaaggcccctcgaggcagagaccctccgccctcttgcacaccagggccgctcgtgggactccacatcctccagcccccacaatcctgtcaggggctccctgacagtcctgggggtggagaggccatcccggggcgtcccccgcgtctgtgtccttgctgccttcatcccctggggcctgtgaataaagctgcagaaccccc

SEQ ID NO: 733037 - DNA, 1075 bp, Homo sapiens
cagtacgaagaagaagaggaagcccaggaggaagctgcagaagtccatgaggaacatgaaccaggaggacgttcaagaagaggagaaaccgagacccaaccgcactggcttttctcttgcatgtgtgcttgtgccttttgccacctggaagacaccgcagaggaggacgcggaagaggagaaaccgagacccaaactcactgctcctaagatcccagaaggggagaaagtggacttcgatgacatccagaagaagcgtcagaacaaagacctaatggagctccaggccctcatcgacagccactttgaagcccggaagaaggaggaggaggagctggtcgctctcaaagagagaatcgagaagcgccgtgcagagagagcggagcagcagaggattcgtgcagagaaggagagggagcgccagaacagactggcggaggaaaaggccagaagggaggaggaggatgccaagaggagggcagaggacgacctgaagaagaagaaagctctgtcttccatgggagccaactacagcagctacctggccaaggctgaccagaagagaggcaagaagcagacagcccgggaaatgaagaagaagattctggctgagagacgcaagccgctcaacatcgatcaccttggtgaagacaaactgagggacaaggccaaggagctctgggagaccctgcaccagctggagattgacaagttcgagtttggggagaagctgaaacgccagaaatatgacatcaccacgctcaggagccgcattgaccaggcccagaagcacagcaagaaggctgggaccccagccaagggcaaagtcggcgggcgctggaagtagagaggccagaaaggcccctcgaggcagagaccctccgccctcttgcacaccagggccgctcgtgggactccacatcctccagcccccacaatcctgtcaggggctccctgacagtcctgggggtggagaggccatcccggggcgtcccccgcgtctgtgtccttgctgccttcatcccctggggcctgtgaataaagctgcagaaccccccccccttcacagtctgtac

SEQ ID NO: 733038 - DNA, 1056 bp, Homo sapiens
cagtacgaagaagaagaggaagcccaggaggaagctgcagaagtccatgaggaacatgaaccaggaggacgttcaagaagaggagaaaccgagacccaaccgcactggcttttctcttgcatgtgtgcttgtgccttttgccacctggaagacaccgcagaggaggacgcggaagaggagaaaccgagacccaaactcactgctcctaagatcccagaaggggagaaagtggacttcgatgacatccagaagaagcgtcagaacaaagacctaatggagctccaggccctcatcgacagccactttgaagcccggaagaaggaggaggaggagctggtcgctctcaaagagagaatcgagaagcgccgtgcagagagagcggagcagcagaggattcgtgcagagaaggagagggagcgccagaacagactggcggaggaaaaggccagaagggaggaggaggatgccaagaggagggcagaggacgacctgaagaagaagaaagctctgtcttccatgggagccaactacagcagctacctggccaaggctgaccagaagagaggcaagaagcagacagcccgggaaatgaagaagaagattctggctgagagacgcaagccgctcaacatcgatcaccttggtgaagacaaactgagggacaaggccaaggagctctgggagaccctgcaccagctggagattgacaagttcgagtttggggagaagctgaaacgccagaaatatgacatcaccacgctcaggagccgcattgaccaggcccagaagcacagcaagaaggctgggaccccagccaagggcaaagtcggcgggcgctggaagtagagaggccagaaaggcccctcgaggcagagaccctccgccctcttgcacaccagggccgctcgtgggactccacatcctccagcccccacaatcctgtcaggggctccctgacagtcctgggggtggagaggccatcccggggcgtcccccgcgtctgtgtccttgctgccttcatcccctggggcctgtgaataaagctgcagaaccccc

SEQ ID NO: 733039 - DNA, 909 bp, Homo sapiens
cagtacgaagaagaagaggaagcccaggaggaagctgcagaagtccatgaggaacatgaaccaggaggacgttcaagaagaggagaaaccgagacccaaccgcactggcttttctcttgcatgtgtgcttgtgccttttgccacctggaagacaccgcagaggaggacgcggaagaggagaaaccgagacccaaactcactgctcctaagatcccagaaggggagaaagtggacttcgatgacatccagaagaagcgtcagaacaaagacctaatggagctccaggccctcatcgacagccactttgaagcccggaagaaggaggaggaggagctggtcgctctcaaagagagaatcgagaagcgccgtgcagagagagcggagcagcagaggattcgtgcagagaaggagagggagcgccagaacagactggcggaggaaaaggccagaagggaggaggaggatgccaagaggagggcagaggacgacctgaagaagaagaaagctctgtcttccatgggagccaactacagcagctacctggccaaggctgaccagaagagaggcaagaagcagacagcccgggaaatgaagaagaagattctggctgagagacgcaagccgctcaacatcgatcaccttggtgaagacaaactgagggacaaggccaaggagctctgggagaccctgcaccagctggagattgacaagttcgagtttggggagaagctgaaacgccagaaatatgacagggccgctcgtgggactccacatcctccagcccccacaatcctgtcaggggctccctgacagtcctgggggtggagaggccatcccggggcgtcccccgcgtctgtgtccttgctgccttcatcccctggggcctgtgaataaagctgcagaaccccc

SEQ ID NO: 733040 - DNA, 1056 bp, Homo sapiens
cagtacgaagaagaagaggaagcccaggaggaagctgcagaagtccatgaggaacatgaaccaggaggacgttcaagaagaggagaaaccgagacccaaccgcactggcttttctcttgcatgtgtgcttgtgccttttgccacctggaagacaccgcagaggaggacgcggaagaggagaaaccgagacccaaactcactgctcctaagatcccagaaggggagaaagtggacttcgatgacatccagaagaagcgtcagaacaaagacctaatggagctccaggccctcatcgacagccactttgaagcccggaagaaggaggaggaggagctggtcgctctcaaagagagaatcgagaagcgccgtgcagagagagcggagcagcagaggattcgtgcagagaaggagagggagcgccagaacagactggcggaggaaaaggccagaagggaggaggaggatgccaagaggagggcagaggacgacctgaagaagaagaaagctctgtcttccatgggagccaactacagcagctacctggccaaggctgaccagaagagaggcaagaagcagacagcccgggaaatgaagaagaagattctggctgagagacgcaagccgctcaacatcgatcaccttggtgaagacaaactgagggacaaggccaaggagctctgggagaccctgcaccagctggagattgacaagttcgagtttggggagaagctgaaacgccagaaatatgacatcatgaatgtccgggccagagtgcagatgctggccaagttcagcaagaaggctgggaccccagccaagggcaaagtcggcgggcgctggaagtagagaggccagaaaggcccctcgaggcagagaccctccgccctcttgcacaccagggccgctcgtgggactccacatcctccagcccccacaatcctgtcaggggctccctgacagtcctgggggtggagaggccatcccggggcgtcccccgcgtctgtgtccttgctgccttcatcccctggggcctgtgaataaagctgcagaaccccc

SEQ ID NO: 733041 - DNA, 2399 bp, Homo sapiens
actaactctacctttctggcttcagggggaggagagttagatcatgcatttgtccgatccatctctgttcacaggacaccagacatcagagacagagagaaaaattcaaagggccaacccgtctttcctttgggcaggtgctatctagacctgaagtagcgggaagagcagaaaggatggggcagccatctctgacttggatgctgatggtggtggtggcctcttggttcatcacaactgcagccactgacacctcagaagcaagatggtgctctgaatgtcacagcaatgccacctgcacggaggatgaggccgttacgacgtgcacctgtcaggagggcttcaccggcgatggcctgacctgcgtggacctggatgagtgcgccattcctggagctcacaactgctccgccaacagcagctgcgtaaacacgccaggctccttctcctgcgtctgccccgaaggcttccgcctgtcgcccggtctcggctgcacagacgtggatgagtgcgctgagcctgggcttagccactgccacgccctggccacatgtgtcaatgtggtgggcagctacttgtgcgtatgccccgcgggctaccggggggatggatggcactgtgagtgctccccgggctcctgcgggccggggttggactgcgtgcccgagggcgacgcgctcgtgtgcgcggatccgtgtcaggcgcaccgcaccctggacgagtactggcgcagcaccgagtacggggagggctacgcctgcgacacggacctgcgcggctggtaccgcttcgtgggccagggcggtgcgcgcatggccgagacctgcgtgccagtcctgcgctgcaacacggccgcccccatgtggctcaatggcacgcatccgtccagcgacgagggcatcgtgagccgcaaggcctgcgcgcactggagcggccactgctgcctgtgggatgcgtccgtccaggtgaaggcctgtgccggcggctactacgtctacaacctgacagcgccccccgagtgtcacctggcgtactgcacagaccccagctccgtggaggggacgtgtgaggagtgcagtatagacgaggactgcaaatcgaataatggcagatggcactgccagtgcaaacaggacttcaacatcactgatatctccctcctggagcacaggctggaatgtggggccaatgacatgaaggtgtcgctgggcaagtgccagctgaagagtctgggcttcgacaaggtcttcatgtacctgagtgacagccggtgctcgggcttcaatgacagagacaaccgggactgggtgtctgtagtgaccccagcccgggatggcccctgtgggacagtgttgacgaggaatgaaacccatgccacttacagcaacaccctctacctggcagatgagatcatcatccgtgacctcaacatcaaaatcaactttgcatgctcctaccccctggacatgaaagtcagcctgaagaccgccctacagccaatggtcagtgctctaaacatcagagtgggcgggaccggcatgttcaccgtgcggatggcgctcttccagaccccttcctacacgcagccctaccaaggctcctccgtgacactgtccactgaggcttttctctacgtgggcaccatgttggatgggggcgacctgtcccgatttgcactgctcatgaccaactgctatgccacacccagtagcaatgccacggaccccctgaagtacttcatcatccaggacagatgcccacacactagagactcaactatccaagtggtggagaatggggagtcctcccagggccgattttccgtccagatgttccggtttgctggaaactatgacctagtctacctgcactgtgaagtctatctctgtgacaccatgaatgaaaagtgcaagcctacctgctctgggaccagattccgaagtgggagtgtcatagatcaatcccgtgtcctgaacttgggtcccatcacacggaaaggtgtccaggccacagtctcaagggcttttagcagcttggggctcctgaaagtctggctgcctctgcttctctcggccaccttgaccctgacttttcagtgactgacagcggaaagccctgtgctccatggctgccatctcacctcctgctgggcagggggcatgatgcgggccagtgctccagccacagaaaagaaagttcatgctttgttcagcctgccttcttttctcccttttaatcctggctgtcgagaaacagcctgtgtctttaaatgctgctttttctcaaaatgggacttgtgacggtgtacctgaggcccccatctccttaaagagtgtggcaaaataatgatttttaaatctcaaaaaaaaataaattgacagcagagaggaacacacact

SEQ ID NO: 733042 - DNA, 988 bp, Homo sapiens
gacttggaggaagaagagtgctcattgcaagctgttggctggaacctcacctggcctagcagtgtcctggagcaatgtggccccgtcctcggcctgtgctctaaacatcagagtgggcgggaccggcatgttcaccgtgcggatggcgctcttccagaccccttcctacacgcagccctaccaaggctcctccgtgacactgtccactgaggcttttctctacgtgggcaccatgttggatgggggcgacctgtcccgatttgcactgctcatgaccaactgctatgccacacccagtagcaatgccacggaccccctgaagtacttcatcatccaggacagatgcccacacactagagactcaactatccaagtggtggagaatggggagtcctcccagggccgattttccgtccagatgttccggtttgctggaaactatgacctagtctacctgcactgtgaagtctatctctgtgacaccatgaatgaaaagtgcaagcctacctgctctgggaccagattccgaagtgggagtgtcatagatcaatcccgtgtcctgaacttgggtcccatcacacggaaaggtgtccaggccacagtctcaagggcttttagcagcttggggctcctgaaagtctggctgcctctgcttctctcggccaccttgaccctgacttttcagtgactgacagcggaaagccctgtgctccatggctgccatctcacctcctgctgggcagggggcatgatgcgggccagtgctccagccacagaaaagaaagttcatgctttgttcagcctgccttcttttctcccttttaatcctggctgtcgagaaacagcctgtgtctttaaatgctgctttttctcaaaatgggacttgtgacggtgtacctgaggcccccatctccttaaagagtgtggcaaaataatgatttttaaatctcaaaaaaaaataaattgacagcagagaggaacacacact

SEQ ID NO: 733043 - DNA, 701 bp, Homo sapiens
atctcagcgcaataatgaacacgcccggtcggacgaactgagctgattctagagatcgaggatagtgccaagatgggagatgtctcgtacggctacagttactggtatctcagtcacacagtgatgtccggagattcggagcggcgatatctggatctaagtctccgctccgatgtgaagtctatctctgtgacaccatgaatgaaaagtgcaagcctacctgctctgggaccagattccgaagtgggagtgtcatagatcaatcccgtgtcctgaacttgggtcccatcacacggaaaggtgtccaggccacagtctcaagggcttttagcagcttggggctcctgaaagtctggctgcctctgcttctctcggccaccttgaccctgacttttcagtgactgacagcggaaagccctgtgctccatggctgccatctcacctcctgctgggcagggggcatgatgcgggccagtgctccagccacagaaaagaaagttcatgctttgttcagcctgccttcttttctcccttttaatcctggctgtcgagaaacagcctgtgtctttaaatgctgctttttctcaaaatgggacttgtgacggtgtacctgaggcccccatctccttaaagagtgtggcaaaataatgatttttaaatctcaaaaaaaaataaattgacagcagagaggaacacacact

SEQ ID NO: 733044 - DNA, 454 bp, Homo sapiens
tctgattggtcagcctagacgaggcagcttatgttaatttgcacaaaagtacagcagtactagcagttgccctgtcactgttttcttttcagggctcctgaaagtctggctgcctctgcttctctcggccaccttgaccctgacttttcagtgactgacagcggaaagccctgtgctccatggctgccatctcacctcctgctgggcagggggcatgatgcgggccagtgctccagccacagaaaagaaagttcatgctttgttcagcctgccttcttttctcccttttaatcctggctgtcgagaaacagcctgtgtctttaaatgctgctttttctcaaaatgggacttgtgacggtgtacctgaggcccccatctccttaaagagtgtggcaaaataatgatttttaaatctcaaaaaaaaataaattgacagcagagaggaacacacact

SEQ ID NO: 733045 - DNA, 1919 bp, Homo sapiens
actaactctacctttctggcttcagggggaggagagttagatcatgcatttgtccgatccatctctgttcacaggacaccagacatcagagacagagagaaaaattcaaagggccaacccgtctttcctttgggcaggtgctatctagacctgaagtagcgggaagagcagaaaggatggggcagccatctctgacttggatgctgatggtggtggtggcctcttggttcatcacaactgcagccactgacacctcagaagcaagatggtgctctgaatgtcacagcaatgccacctgcacggaggatgaggccgttacgacgtgcacctgtcaggagggcttcaccggcgatggcctgacctgcgtggacctggatgagtgcgccattcctggagctcacaactgctccgccaacagcagctgcgtaaacacgccaggctccttctcctgcgtctgccccgaaggcttccgcctgtcgcccggtctcggctgcacagacgtggatgagtgcgctgagcctgggcttagccactgccacgccctggccacatgtgtcaatgtggtgggcagctacttgtgcgtatgccccgcgggctaccggggggatggatggcactgtgagtgctccccgggctcctgcgggccggggttggactgcgtgcccgagggcgacgcgctcgtgtgcgcggatccgtgtcaggcgcaccgcaccctggacgagtactggcgcagcaccgagtacggggagggctacgcctgcgacacggacctgcgcggctggtaccgcttcgtgggccagggcggtgcgcgcatggccgagacctgcgtgccagtcctgcgctgcaacacggccgcccccatgtggctcaatggcacgcatccgtccagcgacgagggcatcgtgagccgcaaggcctgcgcgcactggagcggccactgctgcctgtgggatgcgtccgtccaggtgaaggcctgtgccggcggctactacgtctacaacctgacagcgccccccgagtgtcacctggcgtactgcacagaccccagctccgtggaggggacgtgtgaggagtgcagtatagacgaggactgcaaatcgaataatggcagatggcactgccagtgcaaacaggacttcaacatcactgatatctccctcctggagcacaggctggaatgtggggccaatgacatgaaggtgtcgctgggcaagtgccagctgaagagtctgggcttcgacaaggtcttcatgtacctgagtgacagccggtgctcgggcttcaatgacagagacaaccgggactgggtgtctgtagtgaccccagcccgggatggcccctgtgggacagtgttgacggtacgtcctggccagtgggggacagaaccagagcactgcctggttcaagtttcagctctatcacttcctagttatagaagctttggggagttatttagcctggctgtgcctcagtttcatcaactgtaaagtggagaaataatagtacctactccacaggtgtattgagaggattgaatgagttaatgtgttgaagtgattaggacagtgactgcacacagtaagtgctcaataaacatcagcttcaaataaagaaagcaattcatggtgatagttctccattttacagatgggaaaagtagggccatagtagggattgtctcagccagtaggcatcagcattgggttcagaaactagtctatttgtctccagtggtcctggaaggcaaggtctgtatccttaatgtacagagaatcaggacctcacctacagaggcctcctcaaatgaaacccagaggtaaatgtttgtgtgagcagagcattatctcctgccacctccctcattaccagaggaagaaagaaagagaaagagaggaagaaagaaagagaaggaaggaaag

SEQ ID NO: 733046 - DNA, 2290 bp, Homo sapiens
gagactaactctacctttctggcttcaggtgctatctagacctgaagtagcgggaagagcagaaaggatggggcagccatctctgacttggatgctgatggtggtggtggcctcttggttcatcacaactgcagccactgacacctcagaagcaagatggtgctctgaatgtcacagcaatgccacctgcacggaggatgaggccgttacgacgtgcacctgtcaggagggcttcaccggcgatggcctgacctgcgtggacctggatgagtgcgccattcctggagctcacaactgctccgccaacagcagctgcgtaaacacgccaggctccttctcctgcgtctgccccgaaggcttccgcctgtcgcccggtctcggctgcacagacgtggatgagtgcgctgagcctgggcttagccactgccacgccctggccacatgtgtcaatgtggtgggcagctacttgtgcgtatgccccgcgggctaccggggggatggatggcactgtgagtgctccccgggctcctgcgggccggggttggactgcgtgcccgagggcgacgcgctcgtgtgcgcggatccgtgtcaggcgcaccgcaccctggacgagtactggcgcagcaccgagtacggggagggctacgcctgcgacacggacctgcgcggctggtaccgcttcgtgggccagggcggtgcgcgcatggccgagacctgcgtgccagtcctgcgctgcaacacggccgcccccatgtggctcaatggcacgcatccgtccagcgacgagggcatcgtgagccgcaaggcctgcgcgcactggagcggccactgctgcctgtgggatgcgtccgtccaggtgaaggcctgtgccggcggctactacgtctacaacctgacagcgccccccgagtgtcacctggcgtactgcacagaccccagctccgtggaggggacgtgtgaggagtgcagtatagacgaggactgcaaatcgaataatggcagatggcactgccagtgcaaacaggacttcaacatcactgatatctccctcctggagcacaggctggaatgtggggccaatgacatgaaggtgtcgctgggcaagtgccagctgaagagtctgggcttcgacaaggtcttcatgtacctgagtgacagccggtgctcgggcttcaatgacagagacaaccgggactgggtgtctgtagtgaccccagcccgggatggcccctgtgggacagtgttgacgaggaatgaaacccatgccacttacagcaacaccctctacctggcagatgagatcatcatccgtgacctcaacatcaaaatcaactttgcatgctcctaccccctggacatgaaagtcagcctgaagaccgccctacagccaatggtcagtgctctaaacatcagagtgggcgggaccggcatgttcaccgtgcggatggcgctcttccagaccccttcctacacgcagccctaccaaggctcctccgtgacactgtccactgaggcttttctctacgtgggcaccatgttggatgggggcgacctgtcccgatttgcactgctcatgaccaactgctatgccacacccagtagcaatgccacggaccccctgaagtacttcatcatccaggacagatgcccacacactagagactcaactatccaagtggtggagaatggggagtcctcccagggccgattttccgtccagatgttccggtttgctggaaactatgacctagtctacctgcactgtgaagtctatctctgtgacaccatgaatgaaaagtgcaagcctacctgctctgggaccagattccgaagtgggagtgtcatagatcaatcccgtgtcctgaacttgggtcccatcacacggaaaggtgtccaggccacagtctcaagggcttttagcagcttggggctcctgaaagtctggctgcctctgcttctctcggccaccttgaccctgacttttcagtgactgacagcggaaagccctgtgctccatggctgccatctcacctcctgctgggcagggggcatgatgcgggccagtgctccagccacagaaaagaaagttcatgctttgttcagcctgccttcttttctcccttttaatcctggctgtcgagaaacagcctgtgtctttaaatgctgctttttctcaaaatgggacttgtgacggtgtacctgaggcccccatctccttaaagagtgtggcaaaataatgatttttaaatctcaaaaaaaaataaattgacagcagagaggaacacacact

SEQ ID NO: 733047 - DNA, 1810 bp, Homo sapiens; identical to SEQ ID NO: 494324

SEQ ID NO: 733048 - DNA, 2154 bp, Homo sapiens
actaactctacctttctggcttcagggggaggagagttagatcatgcatttgtccgatccatctctgttcacaggacaccagacatcagagacagagagaaaaattcaaagggccaacccgtctttcctttgggcaggtgctatctagacctgaagtagcgggaagagcagaaaggatggggcagccatctctgacttggatgctgatggtggtggtggcctcttggttcatcacaactgcagccactgacacctcagaagcaagatggtgctctgaatgtcacagcaatgccacctgcacggaggatgaggccgttacgacgtgcacctgtcaggagggcttcaccggcgatggcctgacctgcgtggacctggatgagtgcgccattcctggagctcacaactgctccgccaacagcagctgcgtaaacacgccaggctccttctcctgcgtctgccccgaaggcttccgcctgtcgcccggtctcggctgcacagacgtggatgagtgcgctgagcctgggcttagccactgccacgccctggccacatgtgtcaatgtggtgggcagctacttgtgcgtatgccccgcgggctaccggggggatggatggcactgtgagtgctccccgggctcctgcgggccggggttggactgcgtgcccgagggcgacgcgctcgtgtgcgcggatccgtgtcaggcgcaccgcaccctggacgagtactggcgcagcaccgagtacggggagggctacgcctgcgacacggacctgcgcggctggtaccgcttcgtgggccagggcggtgcgcgcatggccgagacctgcgtgccagtcctgcgctgcaacacggccgcccccatgtggctcaatggcacgcatccgtccagcgacgagggcatcgtgagccgcaaggcctgcgcgcactggagcggccactgctgcctgtgggatgcgtccgtccaggtgaaggcctgtgccggcggctactacgtctacaacctgacagcgccccccgagtgtcacctggcgtactgcacagaccccagctccgtggaggggacgtgtgaggagtgcagtatagacgaggactgcaaatcgaataatggcagatggcactgccagtgcaaacaggacttcaacatcactgatatctccctcctggagcacaggctggaatgtggggccaatgacatgaaggtgtcgctgggcaagtgccagctgaagagtctgggcttcgacaaggtcttcatgtacctgagtgacagccggtgctcgggcttcaatgacagagacaaccgggactgggtgtctgtagtgaccccagcccgggatggcccctgtgggacagtgttgacgaggaatgaaacccatgccacttacagcaacaccctctacctggcagatgagatcatcatccgtgacctcaacatcaaaatcaactttgcatgctcctaccccctggacatgaaagtcagcctgaagaccgccctacagccaatggtcaagatgcccacacactagagactcaactatccaagtggtggagaatggggagtcctcccagggccgattttccgtccagatgttccggtttgctggaaactatgacctagtctacctgcactgtgaagtctatctctgtgacaccatgaatgaaaagtgcaagcctacctgctctgggaccagattccgaagtgggagtgtcatagatcaatcccgtgtcctgaacttgggtcccatcacacggaaaggtgtccaggccacagtctcaagggcttttagcagcttggggctcctgaaagtctggctgcctctgcttctctcggccaccttgaccctgacttttcagtgactgacagcggaaagccctgtgctccatggctgccatctcacctcctgctgggcagggggcatgatgcgggccagtgctccagccacagaaaagaaagttcatgctttgttcagcctgccttcttttctcccttttaatcctggctgtcgagaaacagcctgtgtctttaaatgctgctttttctcaaaatgggacttgtgacggtgtacctgaggcccccatctccttaaagagtgtggcaaaataatgatttttaaatctcaaaaaaaaataaattgacagcagagaggaacacacact

SEQ ID NO: 733049 - DNA, 2045 bp, Homo sapiens
gagactaactctacctttctggcttcaggtgctatctagacctgaagtagcgggaagagcagaaaggatggggcagccatctctgacttggatgctgatggtggtggtggcctcttggttcatcacaactgcagccactgacacctcagaagcaagatggtgctctgaatgtcacagcaatgccacctgcacggaggatgaggccgttacgacgtgcacctgtcaggagggcttcaccggcgatggcctgacctgcgtggacctggatgagtgcgccattcctggagctcacaactgctccgccaacagcagctgcgtaaacacgccaggctccttctcctgcgtctgccccgaaggcttccgcctgtcgcccggtctcggctgcacagacgtggatgagtgcgctgagcctgggcttagccactgccacgccctggccacatgtgtcaatgtggtgggcagctacttgtgcgtatgccccgcgggctaccggggggatggatggcactgtgagtgctccccgggctcctgcgggccggggttggactgcgtgcccgagggcgacgcgctcgtgtgcgcggatccgtgtcaggcgcaccgcaccctggacgagtactggcgcagcaccgagtacggggagggctacgcctgcgacacggacctgcgcggctggtaccgcttcgtgggccagggcggtgcgcgcatggccgagacctgcgtgccagtcctgcgctgcaacacggccgcccccatgtggctcaatggcacgcatccgtccagcgacgagggcatcgtgagccgcaaggcctgcgcgcactggagcggccactgctgcctgtgggatgcgtccgtccaggtgaaggcctgtgccggcggctactacgtctacaacctgacagcgccccccgagtgtcacctggcgtactgcacagaccccagctccgtggaggggacgtgtgaggagtgcagtatagacgaggactgcaaatcgaataatggcagatggcactgccagtgcaaacaggacttcaacatcactgatatctccctcctggagcacaggctggaatgtggggccaatgacatgaaggtgtcgctgggcaagtgccagctgaagagtctgggcttcgacaaggtcttcatgtacctgagtgacagccggtgctcgggcttcaatgacagagacaaccgggactgggtgtctgtagtgaccccagcccgggatggcccctgtgggacagtgttgacgaggaatgaaacccatgccacttacagcaacaccctctacctggcagatgagatcatcatccgtgacctcaacatcaaaatcaactttgcatgctcctaccccctggacatgaaagtcagcctgaagaccgccctacagccaatggtcaagatgcccacacactagagactcaactatccaagtggtggagaatggggagtcctcccagggccgattttccgtccagatgttccggtttgctggaaactatgacctagtctacctgcactgtgaagtctatctctgtgacaccatgaatgaaaagtgcaagcctacctgctctgggaccagattccgaagtgggagtgtcatagatcaatcccgtgtcctgaacttgggtcccatcacacggaaaggtgtccaggccacagtctcaagggcttttagcagcttggggctcctgaaagtctggctgcctctgcttctctcggccaccttgaccctgacttttcagtgactgacagcggaaagccctgtgctccatggctgccatctcacctcctgctgggcagggggcatgatgcgggccagtgctccagccacagaaaagaaagttcatgctttgttcagcctgccttcttttctcccttttaatcctggctgtcgagaaacagcctgtgtctttaaatgctgctttttctcaaaatgggacttgtgacggtgtacctgaggcccccatctccttaaagagtgtggcaaaataatgatttttaaatctcaaaaaaaaataaattgacagcagagaggaacacacact

SEQ ID NO: 733050 - DNA, 1284 bp, Homo sapiens
caggtgctatctagacctgaagtagcgggaagagcagaaaggatggggcagccatctctgacttggatgctgatggtggtggtggcctcttggttcatcacaactgcagccactgacacctcagaagcaagatggtgctctgaatgtcacagcaatgccacctgcacggaggatgaggccgttacgacgtgcacctgtcaggagggcttcaccggcgatggcccctgtgggacagtgttgacgaggaatgaaacccatgccacttacagcaacaccctctacctggcagatgagatcatcatccgtgacctcaacatcaaaatcaactttgcatgctcctaccccctggacatgaaagtcagcctgaagaccgccctacagccaatggtcagtgctctaaacatcagagtgggcgggaccggcatgttcaccgtgcggatggcgctcttccagaccccttcctacacgcagccctaccaaggctcctccgtgacactgtccactgaggcttttctctacgtgggcaccatgttggatgggggcgacctgtcccgatttgcactgctcatgaccaactgctatgccacacccagtagcaatgccacggaccccctgaagtacttcatcatccaggacagatgcccacacactagagactcaactatccaagtggtggagaatggggagtcctcccagggccgattttccgtccagatgttccggtttgctggaaactatgacctagtctacctgcactgtgaagtctatctctgtgacaccatgaatgaaaagtgcaagcctacctgctctgggaccagattccgaagtgggagtgtcatagatcaatcccgtgtcctgaacttgggtcccatcacacggaaaggtgtccaggccacagtctcaagggcttttagcagcttggggctcctgaaagtctggctgcctctgcttctctcggccaccttgaccctgacttttcagtgactgacagcggaaagccctgtgctccatggctgccatctcacctcctgctgggcagggggcatgatgcgggccagtgctccagccacagaaaagaaagttcatgctttgttcagcctgccttcttttctcccttttaatcctggctgtcgagaaacagcctgtgtctttaaatgctgctttttctcaaaatgggacttgtgacggtgtacctgaggcccccatctccttaaagagtgtggcaaaataatgatttttaaatctcaaaaaaaaataaattgacagcagagaggaacacacact

SEQ ID NO: 733051 - DNA, 155 bp, Homo sapiens; identical to SEQ ID NO: 319219

SEQ ID NO: 733052 - DNA, 672 bp, Homo sapiens
ggtttgtcttggtccattttatgctgctataacagaacaccacagactgagaaatttataaggaatagaagtttatttgcctcatgtttctggaggctgggaattccaagatcaaggggctgcatagattgaggtcctttttgctgactcataacgtggaaagagagtgcactgcatagaagaaaggaggccaaactcattcttttatcatgagcctactcctgaaataactcactctcaagataatggcattaatccattcatgaaggcagaatactcatgatgtaatcacctcttaaaaggtcctatttcctaacactgttgcattagggattaagctgtcaacacatgaatattgggggacacattcaaaccatagcaagagttctttgtctttgtgactcggtgtggttcagcaaattgcgattggtctgctatagcggactttcccctcacctcccaaatgtttattatgaaaaatttcattttaaagaaaggtggaaggaattgttgaaagaatatgtcatctagtttctactgttgttaacattgtgtcatatttgccttttcatccatccaaccacccatccatctagctaccttataattactattattacttattattactattatttttaaagacacctctattaaagcaaccatcttatt

SEQ ID NO: 733053 - DNA, 470 bp, Homo sapiens
gaggtaaaatttacatacagtgaaatccaaatcttaagtgtaccactagataaattttgataaatgcattatgcctggtcttcacacacccttttcaatatatagaaaatttccagataatttattttgttgtttttttcacacactaagttctagacttttccaggtccgagggaactattaggggggaaagtacttgttatagtaaaaaagattttaggtgtgtttgtttttaaggtgcagaaacacatcgcagattaaggtctgcatctctgctttttgttattgttccagtttgatctcagtgacattacaagcaagcagaaacactcagacatgaaatggccagtgcctgtgagttaagagcaggatctaggtctatttttttgatatgtatctcaactacctggaatactttatacttttggcactcaataaatatttgttgctgccagacgatctgccacaaa

SEQ ID NO: 733054 - DNA, 478 bp, Homo sapiens
ggtttgtcttggtccattttatgctgctataacagaacaccacagactgagaaatttataaggaatagaagtttatttgcctcatgtttctggaggctgggaattccaagatcaaggggctgcatagattgaggtcctttttgctgactcataacgtggaaagagagtgcactgcatagaagaaaggaggccaaactcattcttttatcatgagcctactcctgaaataactcactctcaagataatggcattaatccattcatgaaggcagaatactcatgatgtaatcacctcttaaaagtttgatctcagtgacattacaagcaagcagaaacactcagacatgaaatggccagtgcctgtgagttaagagcaggatctaggtctatttttttgatatgtatctcaactacctggaatactttatacttttggcactcaataaatatttgttgctgccagacgatctgccacaaa

SEQ ID NO: 733055 - DNA, 769 bp, Homo sapiens
  misc_feature (766)..(766): n is a, c, g, or t
tgggtttgggggtgaataggctgggaaatttctgagccttttttttttgtcacagtgccctcaagttgaagtgatgagctggatttctttcttgttccatactgggcggcatgctcctcccatctccaccccttggtttgggggcttccagctcattggcaaaatctctctagttgccttcctttcaagctggagcctgacttttccccaatgtacattttttttttctccacaaagagttccttctctaatgtccccatctggtattaagtgcactttaaagaaaggggcagggtggattttcaagaggtgggaagctctaaggcttgaccgtgaggggtcttctcccagccattctcagcccatatgcagcaccctccatactgaagaggactgttgttttagtttcagacggtcctttccttccacatggtgctaaggtggttttctaggtaactgcagggatggaggtcactagccattccaaaccaggagagaaagtctggtgtcctgatatccagtcttttctaggaggaagaccaagattctccagcggcagggcagcctatcacccaacttctaagtcaggaaaggaagctgagtgggaatgccagctggtaagcgcaggctgcactggccccttcctcagaacaatggttttcaaactactccacagaatcctcagggtctcttaggactgttcaagggctcatttgctgaggagcctttgaacagtcagtcctaagagacgctgagacttcttccncca

SEQ ID NO: 733056 - DNA, 1241 bp, Homo sapiens
  misc_feature (1238)..(1238): n is a, c, g, or t
ggctccgggacgagatcaacgagaagcagaagaccattgatgagctcaaagacctaaatcagaagctccagttagagctagagaagcttcaggctgactacgagaagctgaagagcgaagaacacgagaagagcaccaagctgcaggagctgacatttctgtacgagcgacatgagcagtccaagcaggacctcaagggtctggaggagacagttgcccgggaactccagaccctccacaaccttcgcaagctgttcgttcaagacgtcacgactcgagtcaagaaaagtgcagaaatggagcccgaagacagtggggggattcactcccaaaagcagaagatttcctttcttgagaacaacctggaacagcttacaaaggttcacaaacagctggtacgtgacaatgcagatctgcgttgtgagcttcctaaattggaaaaacgacttagggctacggctgagagagttaaggccctggagggtgcactgaaggaggccaaggagggcgccatgaaggacaagcgccggtaccagcacggaggtggaccgcatcaaggaggccgttcgctacaagagctcgggcaaacggggccattctgcccagattgccaaacccgtccggcctggccactacccagcatcctcacccaccaacccctatggcacccggagccctgagtgcatcagttacaccaacagcctcttccagaactaccagaatctctacctgcaggccacacccagctccacctcagatatgtactttgcaaactcctgtaccagcagtggagccacatcttctggcggccccttggcttcctaccagaaggccaacatggacaatggaaatgccacagatatcaatgacaataggagtgacctgccgtgtggctatgaggctgaggaccaggccaagcttttccctctccaccaagagacagcagccagctaatctcccacacccacggctgcatacctgcactttcagctgctgagctccttttagcagttagggagaactgcagggggaaaaataccagtggagtgtggaataaatccaaagcagtgatttttaaatgtttttcaaaaacaaatcttacatagaacccccttcctcagaacaatggttttcaaactactccacagaatcctcagggtctcttaggactgttcaagggctcatttgctgaggagcctttgaacagtcagtcctaagagacgctgagacttcttccncca

SEQ ID NO: 733057 - DNA, 2687 bp, Homo sapiens
ggctccgggacgagatcaacgagaagcagaagaccattgatgagctcaaagacctaaatcagaagctccagttagagctagagaagcttcaggctgactacgagaagctgaagagcgaagaacacgagaagagcaccaagctgcaggagctgacatttctgtacgagcgacatgagcagtccaagcaggacctcaagggtctggaggagacagttgcccgggaactccagaccctccacaaccttcgcaagctgttcgttcaagacgtcacgactcgagtcaagaaaagtgcagaaatggagcccgaagacagtggggggattcactcccaaaagcagaagatttcctttcttgagaacaacctggaacagcttacaaaggttcacaaacagctggtacgtgacaatgcagatctgcgttgtgagcttcctaaattggaaaaacgacttagggctacggctgagagagttaaggccctggagggtgcactgaaggaggccaaggagggcgccatgaaggacaagcgccggtaccagcacggaggtggaccgcatcaaggaggccgttcgctacaagagctcgggcaaacggggccattctgcccagattgccaaacccgtccggcctggccactacccagcatcctcacccaccaacccctatggcacccggagccctgagtgcatcagttacaccaacagcctcttccagaactaccagaatctctacctgcaggccacacccagctccacctcagatatgtactttgcaaactcctgtaccagcagtggagccacatcttctggcggccccttggcttcctaccagaaggccaacatggacaatggaaatgccacagatatcaatgacaataggagtgacctgccgtgtggctatgaggctgaggaccaggccaagcttttccctctccaccaagagacagcagccagctaatctcccacacccacggctgcatacctgcactttcagtttctaagagggactgaggcctcttctcagcatgctgcaaacctgtggtctctgatactaactccctccccaacccctgttgttggactgtactatgtttgatgtcttctcttacttactctgtatctctttgtactctgtatctatatatcaaaagctgctgctatgtctctcttctgtcttattctcaagtatctactgatgtatttagcaatttcaaagcatagtctaccttccttatttggggcaatagggaggagggtgaatgtttcttctttctcatctactcgtctcacactgagtggtgttagtcactgagtagaggtcacagagatgacaaaaggaaaaatgggagctagagggttgtgacccttcatacacacacgcacgcacgcacacaaacatgcacacacgcatgcacacacacaaagccttaagcagaagaatgtcttagcatcatgagacagagaaatagactcttcctccctcctctttcacatatagcacaggggaaggtaaaatggaagggctgctaattgagacatataattttcttcatacacccctcaccttaatcaaaggattcaggtgttacttctgccctacaaagtctgccttttgcctccctcttcctgttttcccctggactgagaaatgggttgctcaagggaccatttccctttttcttcaagctccttttgatattccctgccccagagctcatgaccagaacccagagctgatttaaaatattttgaaaaatggaggaggcagactgctcccagcagcctgtcaatggctgctcatctgtccatggagatggttacaggcaggtgtagtcaaaatgattgattccttgggtttgggggtgaataggctgggaaatttctgagccttttttttttgtcacagtgccctcaagttgaagtgatgagctggatttctttcttgttccatactgggcggcatgctcctcccatctccaccccttggtttgggggcttccagctcattggcaaaatctctctagttgccttcctttcaagctggagcctgacttttccccaatgtacattttttttttctccacaaagagttccttctctaatgtccccatctggtattaagtgcactttaaagaaaggggcagggtggattttcaagaggtgggaagctctaaggcttgaccgtgaggggtcttctcccagccattctcagcccatatgcagcaccctccatactgaagaggactgttgttttagtttcagacggtcctttccttccacatggtgctaaggtggttttctaggtaactgcagggatggaggtcactagccattccaaaccaggagagaaagtctggtgtcctgatatccagtcttttctaggaggaagaccaagattctccagcggcagggcagcctatcacccaacttctaagtcaggaaaggaagctgagtgggaatgccagctggtaagcgcaggctgcactggcccatgactccttcaaggaaaagaggccctgctccctttacctgctgagctccttttagcagttagggagaactgcagggggaaaaataccagtggagtgtggaataaatccaaagcagtgatttttaaatgtttttcaaaaacaaatcttacatagaaccccaatataaaaaataaagtaatgcagacctgggcagtttgca

SEQ ID NO: 733058 - DNA, 925 bp, Homo sapiens
tggatgtgtccagagaagatactgcccgtgcacgacggacacgaaccgggtgccatttgtcaagggttgtactgaacgctttgtgtccagcccggaggagattctggatgtgattgatgaagggaaatcaaatcgtcatgtggctgtcaccaacatgaatgaacacagctctcggagccacagcatcttcctcatcaacatcaagcaggagaacatggaaacggagcagaagctcagtgggaagctgtatctggtggacctggcagggagtgagaaggtcagcaagactggagcagagggagccgtgctggacgaggcaaagaatatcaacaagtcactgtcagctctgggcaatgtgatctccgcactggctgagggcactaaaagctatgttccatatcgtgacagcaaaatgacaaggattctccaggactctctcgggggaaactgccggacgactatgttcatctgttgctcaccatccagttataatgatgcagagaccaagtccaccctgatgtttgggcagcgggcaaagaccattaagaacactgcctcagtaaatttggagttgactgctgagcagtggaagaagaaatatgagaaggagaaggagaagacaaaggcccagaaggagacgattgcgaagctggaggctgagctgagccggtggcgcaatggagagaatgtgcctgagacagagcgcctggctggggaggaggcagccctgggagccgagctctgtgaggagacccctgtgaatgacaactcatccatcgtggtgcgcatcgcgcccgaggagcggcagaaatacgaggaggagatccgccgtctctataagcagcttgacgacaaggatgatgaaatcaaccaacaaagccaactcatagagaagctcaagcagcaaatgctggaccaggaagag

SEQ ID NO: 733059 - DNA, 3011 bp, Homo sapiens
ggcgagtgttcaggttctagagctatgcagctggagcactgcctttctccttctatcatgctctccaagaaatttctcaatgtgagcagcagctacccacattcaggcggatccgagcttgtcttgcacgatcatcccattatctcgaccactgacaacctggagagaagttcacctttgaaaaaaattaccagggggatgacgaatcagtcagatacagacaattttcctgactccaaggactcaccaggggacgtccagagaagtaaactctctcctgtcttggacggggtctctgagcttcgtcacagtttcgatggctctgctgcagatcgctacctcctctctcagtccagccagccacagtctgcggccactgctcccagtgccatgttcccgtaccccggccagcacggaccggcgcaccccgccttctccatcggcagccctagccgctacatggcccaccacccggtcatcaccaacggagcctacaacagcctcctgtccaactcctcgccgcagggataccccacggccggctacccctacccacagcagtacggccactcctaccaaggagctccgttctaccagttctcctccacccagccggggctggtgcccggcaaagcacaggtgtacctgtgcaacaggcccctttggctgaaatttcaccggcaccaaacggagatgatcatcaccaaacagggaaggcgcatgtttccttttttaagttttaacatttctggtctcgatcccacggctcattacaatatttttgtggatgtgattttggcggatcccaatcactggaggtttcaaggaggcaaatgggttccttgcggcaaagcggacaccaatgtgcaaggaaatcgggtctatatgcatccggattcccccaacactggggctcactggatgcgccaagaaatctcttttggaaaattaaaacttacgaacaacaaaggagcttcaaataacaatgggcagatggtggttttacagtccttgcacaagtaccagccccgcctgcatgtggtggaagtgaacgaggacggcacggaggacactagccagcccggccgcgtgcagacgttcactttccctgagactcagttcatcgccgtcaccgcctaccagaacacggatattacacaactgaaaatagatcacaacccttttgcaaaaggatttcgggataattatgacacgatctacaccggctgtgacatggaccgcctgaccccctcgcccaacgactcgccgcgctcgcagatcgtgcccggggcccgctacgccatggccggctctttcctgcaggaccagttcgtgagcaactacgccaaggcccgcttccacccgggcgcgggcgcgggccccgggccgggtacggaccgcagcgtgccgcacaccaacgggctgctgtcgccgcagcaggccgaggacccgggcgcgccctcgccgcaacgctggtttgtgacgccggccaacaaccggctggacttcgcggcctcggcctatgacacggccacggacttcgcgggcaacgcggccacgctgctctcttacgcggcggcgggcgtgaaggcgctgccgctgcaggctgcaggctgcactggccgcccgctcggctactacgccgacccgtcgggctggggcgcccgcagtcccccgcagtactgcggcaccaagtcgggctcggtgctgccctgctggcccaacagcgccgcggccgccgcgcgcatggccggcgccaatccctacctgggcgaggaggccgagggcctggccgccgagcgctcgccgctgccgcccggcgccgccgaggacgccaagcccaaggacctgtccgattccagctggatcgagacgccctcctcgatcaagtccatcgactccagcgactcggggatttacgagcaggccaagcggaggcggatctcgccggccgacacgcccgtgtccgagagttcgtccccgctcaagagcgaggtgctggcccagcgggactgcgagaagaactgcgccaaggacattagcggctactatggcttctactcgcacagctaggccgcccctacccgcccggccccgccgcggcccggacccccagccagcccctcacagctcttccccagctccgcctccccacactcctccttgcgcacccactcattttatttgaccctcgatggccgtctgcagcgaataagtgcaggtctccgagcgtgattttaaccttttttgcacagcagtctctgcaattagctcaccgaccttcaactttgctgtaaaccttttggttttcctacttactcttcttctgtggagttatcctcctacaattcccctccccctcgtctttctcttacctcctacttctctttcttgtaatgaaactcttcacctttaggagacctgggcagtcctgtcaggcagcagcgattccgacccgccaagtctcggcctccacattaaccataggatgttgactctagaacctggacccacccagcgcgtcctttcttatccccgagtggatggatggatggatggatggtagggatgttaataattttagtggaacaaagcctgtgaaatgattgtacatagtgttaatttattgtaacgaatggctagtttttattctcgtcaaggcacaaaaccagttcatgcttaacctttttttcctttcctttctttgcttttctttctctcctctcatactttctcttctctctcttttaattttcttgtgagataatattctaagaggctctagaaacatgaaatactcagtagtgatgggtttcccacttctcctcaatccgttgcatgaaataattactatgtgccctaatgcacacaaatagctaaggagaatccacccaaacacctttaaaggataggtgtctgttcataggcaagtcgattaagtggcatgatgcctgcaaagcaaagtcaactggagttgtatgttccccccaccttctaaatagaatagctcg

SEQ ID NO: 733060 - DNA, 1840 bp, Homo sapiens
attacacaactgaaaatagatcacaacccttttgcaaaaggatttcgggataattatgacacgatctacaccggctgtgacatggaccgcctgaccccctcgcccaacgactcgccgcgctcgcagatcgtgcccggggcccgctacgccatggccggctctttcctgcaggaccagttcgtgagcaactacgccaaggcccgcttccacccgggccgggtacggaccgcagcgtgccgcacaccaacgggctgctgtcgccgcagcaggccgaggacccgggcgcgccctcgccgcaacgctggtttgtgacgccggccaacaaccggctggacttcgcggcctcggcctatgacacggccacggacttcgcgggcaacgcggccacgctgctctcttacgcggcggcgggcgtgaaggcgctgccgctgcaggctgcaggctgcactggccgcccgctcggctactacgccgacccgtcgggctggggcgcccgcagtcccccgcagtactgcggcaccaagtcgggctcggtgctgccctgctggcccaacagcgccgcggccgccgcgcgcatggccggcgccaatccctacctgggcgaggaggccgagggcctggccgccgagcgctcgccgctgccgcccggcgccgccgaggacgccaagcccaaggacctgtccgattccagctggatcgagacgccctcctcgatcaagtccatcgactccagcgactcggggatttacgagcaggccaagcggaggcggatctcgccggccgacacgcccgtgtccgagagttcgtccccgctcaagagcgaggtgctggcccagcgggactgcgagaagaactgcgccaaggacattagcggctactatggcttctactcgcacagctaggccgcccctacccgcccggccccgccgcggcccggacccccagccagcccctcacagctcttccccagctccgcctccccacactcctccttgcgcacccactcattttatttgaccctcgatggccgtctgcagcgaataagtgcaggtctccgagcgtgattttaaccttttttgcacagcagtctctgcaattagctcaccgaccttcaactttgctgtaaaccttttggttttcctacttactcttcttctgtggagttatcctcctacaattcccctccccctcgtctttctcttacctcctacttctctttcttgtaatgaaactcttcacctttaggagacctgggcagtcctgtcaggcagcagcgattccgacccgccaagtctcggcctccacattaaccataggatgttgactctagaacctggacccacccagcgcgtcctttcttatccccgagtggatggatggatggatggatggtagggatgttaataattttagtggaacaaagcctgtgaaatgattgtacatagtgttaatttattgtaacgaatggctagtttttattctcgtcaaggcacaaaaccagttcatgcttaacctttttttcctttcctttctttgcttttctttctctcctctcatactttctcttctctctcttttaattttcttgtgagataatattctaagaggctctagaaacatgaaatactcagtagtgatgggtttcccacttctcctcaatccgttgcatgaaataattactatgtgccctaatgcacacaaatagctaaggagaatccacccaaacacctttaaaggataggtgtctgttcataggcaagtcgattaagtggcatgatgcctgcaaagcaaagtcaactggagttgtatgttccccccaccttctaaatagaatagctcg

SEQ ID NO: 733061 - DNA, 4518 bp, Homo sapiens
aggccgccagggcccaaaggacagcggcccagacaggggctggcggcccggccggccccggctcaccgactcgggcagcatccacctgccccagccaacacccttctctcgccccaggtcctttctcagcctccagctgggctgtccccaagctgagctgaggctcttctcctccgatccccacctctgcccggacatccaccatggggacagccaccaggaggaagccacacctgctgctggtagctgctgtggcccttgtctcctcttcagcttggagttcagccctgggatcccaaaccaccttcgggcctgtctttgaagaccagcccctcagtgtgctattcccagaggagtccacggaggagcaggtgttgctggcatgccgcgcccgggccagccctccagccacctatcggtggaagatgaatggtaccgagatgaagctggagccaggttcccgtcaccagctggtggggggcaacctggtcatcatgaaccccaccaaggcacaggatgccggggtctaccagtgcctggcctccaacccagtgggcaccgttgtcagcagggaggccatcctccgcttcggctttctgcaggaattctccaaggaggagcgagacccagtgaaagctcatgaaggctggggggtgatgttgccctgtaacccacctgcccactacccaggcttgtcctaccgctggctcctcaacgagttccccaacttcatcccgacggacgggcgtcacttcgtgtcccagaccacagggaacctgtacattgcccgaaccaatgcctcagacctgggcaactactcctgtttggccaccagccacatggacttctccaccaagagcgtcttcagcaagtttgctcagctcaacctggctgctgaagatacccggctctttgcacccagcatcaaggcccggttcccagcagagacctatgcactggtggggcagcaggtcaccctggagtgcttcgcctttgggaaccctgtcccccggatcaagtggcgcaaagtggacggctccctgtccccgcagtggaccacagctgagcccaccctgcagatccccagcgtcagctttgaggatgagggcacctacgagtgtgaggcggagaactccaagggccgagacaccgtgcagggccgcatcatcgtgcaggctcagcctgagtggctaaaagtgatctcggacacagaggctgacattggctccaacctgcgttggggctgtgcagccgccggcaagccccggcctacagtgcgctggctgcggaacggggagcctctggcctcccagaaccgggtggaggtgttggctggggacctgcggttctccaagctgagcctggaagactcgggcatgtaccagtgtgtggcagagaataagcacggtaccatctacgccagcgccgagctagccgtgcaagcactcgcccctgacttcaggctgaatcccgtgaggcgtctgatccccgcggcccgcgggggagagatccttatcccctgccagccccgggcagctccaaaggccgtggtgctctggagcaaaggcacggagattttggtcaacagcagcagagtgactgtaactccagatggcaccttgatcataagaaacatcagccggtcagatgaaggcaaatacacctgctttgctgagaacttcatgggcaaagccaacagcactggaatcctatctgtgcgagatgcaaccaaaatcactctagccccctcaagtgccgacatcaacttgggtgacaacctgaccctacagtgccatgcctcccacgaccccaccatggacctcaccttcacctggaccctggacgacttccccatcgactttgataagcctggagggcactaccggagaactaatgtgaaggagaccattggggatctgaccatcctgaacgcccagctgcgccatggggggaagtacacgtgcatggcccagacggtggtggacagcgcgtccaaggaggccacagtcctggtccgaggtccgccaggtcccccaggaggtgtggtggtgagggacattggcgacaccaccatccagctcagctggagccgtggcttcgacaaccacagccccatcgctaagtacaccctgcaagctcgcactccacctgcagggaagtggaagcaggttcggaccaatcctgcaaacatcgagggcaatgccgagactgcacaggtgctgggcctcaccccctggatggactatgagttccgggtcatagccagcaacattctgggcactggggagcctagtgggccctccagcaaaatccggaccagggaagcagccccctcggtggcaccctcaggactcagcggaggaggtggagcccccggagagctcatcgtcaactggacgcccatgtcacgggagtaccagaacggagacggcttcggctacctgctgtccttccgcaggcagggcagcactcactggcagaccgcccgggtgcctggcgccgatgcccagtactttgtctacagcaacgagagcgtccggccctacacgccctttgaggtcaagatccgcagctacaaccgccgcggggatgggcccgagagcctcactgcactcgtgtactcagctgaggaagagcccagggtggcccctaccaaggtgtgggccaaaggggtctcatcctcagagatgaacgtgacctgggaacccgtgcagcaggacatgaatggtatcctcctggggtatgagatccgctactggaaagctggggacaaagaagcagctgcggaccgagtgaggacagcagggctggacaccagtgcccgagtcagtggcctgcatcccaacaccaagtaccatgtgaccgtgagggcctacaaccgggctggcactgggcctgccagcccttctgccaacgccacgaccatgaagccccctccgcggcgacctcctggcaacatctcctggactttctcaagctctagtcttagcattaagtgggaccctgtggtccctttccgaaatgagtctgcagtcaccggctataagatgctgtaccagaatgacttacacctgactcccacgctccacctcaccggcaagaactggatagaaatcccagtgcctgaagacattggccatgccctggtacaaattcggaccacagggcccggaggggatgggatccctgcagaagtccacatcgtgaggaatggaggcacaagcatgatggtggagaacatggcagtccgcccagcaccacaccctggcaccgtcatttcccactccgtggcgatgctgatcctcataggctccctggagctctgatcctggaacccctccctctgcgccgcagctggacgccacctccgacggacacagccagccccttcctgctgccaaggtggcctgacactgtgccagagagtggctggttttaaatacctactttaaacagtgccctttttgtaggaggtaggatattttatattctgccgcaggatagaacccacgcaaggattttctttaaattgagaggcaccaggcagtaacttccatgatgacactgacgcctatacctgagctctaggctgcctggagggaaggaacaggcccatgggaagaagggggttttaaaaacatgtcttcaactcagcagagatggccctctgggaccctatacggactccgccacttgagagcagtcctaggcccggcaggaacaccagacatgaacaggttgaagaactggagcgaagtgcacacctcaccatccttcagtctaaggaagaagggcaagccctgggaccaagagctctcccgccttctccctcgagcagcagcaaggaccctgacgctgtccccgataactccctaggggctcctgcctgcccaagcggctgagaaccagcgccccgatgcctgaggctgggagcctgagccccttcagctttgaggggggtgatactccaggctgtttggggtgggagccaaaaagagttgagaggccagggcccttggtggaaaggggcaccagccttggtctgagatagtcacaacccaggtgacgatgccctctcagccaacactgccaacctgaccctgtcatcccgattgacagcgccacttcaggtggctgggtgactaaagggcttgtcttggtggggtctcccacccctccaagacccattctgcacagtccctccagggtttgggcaggagatggccaatcatgcgcccacctctccagtgctgcctgcagtcagctcggcctccccgacctgcagccccagactctgctctcccagcactgactcactcctgcctgggaggggaatgcagcattcatgctgtgtgtcctggtattgggaggtttctgggaagggcagaggataaatgtggccctgcctgctcccaggtatacctaggaccacctggccagatccgctcccagacggccttggactgcttgcatttccccggagaaaaaggggttaataaatgggccatcctttcctga

SEQ ID NO: 733062 - DNA, 4539 bp, Homo sapiens
aggccgccagggcccaaaggacagcggcccagacaggggctggcggcccggccggccccggctcaccgactcgggcagcatccacctgccccagccaacacccttctctcgccccaggtcctttctcagcctccagctgggctgtccccaagctgagctgaggctcttctcctccgatccccacctctgcccggacatccaccatggggacagccaccaggaggaagccacacctgctgctggtagctgctgtggcccttgtctcctcttcagcttggagttcagccctgggatcccaaaccaccttcgggcctgtctttgaagaccagcccctcagtgtgctattcccagaggagtccacggaggagcaggtgttgctggcatgccgcgcccgggccagccctccagccacctatcggtggaagatgaatggtaccgagatgaagctggagccaggttcccgtcaccagctggtggggggcaacctggtcatcatgaaccccaccaaggcacaggatgccggggtctaccagtgcctggcctccaacccagtgggcaccgttgtcagcagggaggccatcctccgcttcggctttctgcaggaattctccaaggaggagcgagacccagtgaaagctcatgaaggctggggggtgatgttgccctgtaacccacctgcccactacccaggcttgtcctaccgctggctcctcaacgagttccccaacttcatcccgacggacgggcgtcacttcgtgtcccagaccacagggaacctgtacattgcccgaaccaatgcctcagacctgggcaactactcctgtttggccaccagccacatggacttctccaccaagagcgtcttcagcaagtttgctcagctcaacctggctgctgaagatacccggctctttgcacccagcatcaaggcccggttcccagcagagacctatgcactggtggggcagcaggtcaccctggagtgcttcgcctttgggaaccctgtcccccggatcaagtggcgcaaagtggacggctccctgtccccgcagtggaccacagctgagcccaccctgcagatccccagcgtcagctttgaggatgagggcacctacgagtgtgaggcggagaactccaagggccgagacaccgtgcagggccgcatcatcgtgcaggctcagcctgagtggctaaaagtgatctcggacacagaggctgacattggctccaacctgcgttggggctgtgcagccgccggcaagccccggcctacagtgcgctggctgcggaacggggagcctctggcctcccagaaccgggtggaggtgttggctggggacctgcggttctccaagctgagcctggaagactcgggcatgtaccagtgtgtggcagagaataagcacggtaccatctacgccagcgccgagctagccgtgcaagcactcgcccctgacttcaggctgaatcccgtgaggcgtctgatccccgcggcccgcgggggagagatccttatcccctgccagccccgggcagctccaaaggccgtggtgctctggagcaaaggcacggagattttggtcaacagcagcagagtgactgtaactccagatggcaccttgatcataagaaacatcagccggtcagatgaaggcaaatacacctgctttgctgagaacttcatgggcaaagccaacagcactggaatcctatctgtgcgagatgcaaccaaaatcactctagccccctcaagtgccgacatcaacttgggtgacaacctgaccctacagtgccatgcctcccacgaccccaccatggacctcaccttcacctggaccctggacgacttccccatcgactttgataagcctggagggcactaccggagaactaatgtgaaggagaccattggggatctgaccatcctgaacgcccagctgcgccatggggggaagtacacgtgcatggcccagacggtggtggacagcgcgtccaaggaggccacagtcctggtccgaggtccgccaggtcccccaggaggtgtggtggtgagggacattggcgacaccaccatccagctcagctggagccgtggcttcgacaaccacagccccatcgctaagtacaccctgcaagctcgcactccacctgcagggaagtggaagcaggttcggaccaatcctgcaaacatcgagggcaatgccgagactgcacaggtgctgggcctcaccccctggatggactatgagttccgggtcatagccagcaacattctgggcactggggagcctagtgggccctccagcaaaatccggaccagggaagcagccccctcggtggcaccctcaggactcagcggaggaggtggagcccccggagagctcatcgtcaactggacgcccatgtcacgggagtaccagaacggagacggcttcggctacctgctgtccttccgcaggcagggcagcactcactggcagaccgcccgggtgcctggcgccgatgcccagtactttgtctacagcaacgagagcgtccggccctacacgccctttgaggtcaagatccgcagctacaaccgccgcggggatgggcccgagagcctcactgcactcgtgtactcagctgaggaagagcccagggtggcccctaccaaggtgtgggccaaaggggtctcatcctcagagatgaacgtgacctgggaacccgtgcagcaggacatgaatggtatcctcctggggtatgagatccgctactggaaagctggggacaaagaagcagctgcggaccgagtgaggacagcagggctggacaccagtgcccgagtcagtggcctgcatcccaacaccaagtaccatgtgaccgtgagggcctacaaccgggctggcactgggcctgccagcccttctgccaacgccacgaccatgaagccccctccgcggcgacctcctggcaacatctcctggactttctcaagctctagtcttagcattaagtgggaccctgtggtccctttccgaaatgagtctgcagtcaccggctataagatgctgtaccagaatgacttacacctgactcccacgctccacctcaccggcaagaactggatagaaatcccagtgcctgaagacattggccatgccctggtacaaattcggaccacagggcccggaggggatgggatccctgcagaagtccacatcgtgaggaatggaggcacaagcatgatggtggagaacatggcagtccgcccagcaccacaccctggcaccgtcatttcccactccgtggcgatgctgatcctcataggctccctggagctctgatcctggaacccctccctctgcgccgcagctggacgccacctccgacggacacagccagccccttcctgctgccaaggtggcctgacactgtgccagagagtggctggttttaaatacctactttaaacagtgccctttttgtaggaggtaggatattttatattctgccgcaggatagaacccacgcaaggattttctttaaattgagaggcaccaggcagtaacttccatgatgacactgacgcctatacctgagctctaggctgcctggagggaaggaacaggcccatgggaagaagggggttttaaaaacatgtcttcaactcagcagagatggccctctgggaccctatacggactccgccacttgagagcagtcctaggcccggcaggaacaccagacatgaacaggttgaagaactggagcgaagtgcacacctcaccatccttcagtctaaggaagaagggcaagccctgggaccaagagctctcccgccttctccctcgagcagcagcaaggaccctgacgctgtccccgataactccctaggggctcctgcctgcccaagcggctgagaaccagcgccccgatgcctgaggctgggagcctgagccccttcagctttgaggggggtgatactccaggctgtttggggtgggagccaaaaagagttgagaggccagggcccttggtggaaaggggcaccagccttggtctgagatagtcacaacccaggtgacgatgccctctcagccaacactgccaacctgaccctgtcatcccgattgacagcgccacttcaggtggctgggtgactaaagggcttgtcttggtggggtctcccacccctccaagacccattctgcacagtccctccagggtttgggcaggagatggccaatcatgcgcccacctctccagtgctgcctgcagtcagctcggcctccccgacctgcagccccagactctgctctcccagcactgactcactcctgcctgggaggggaatgcagcattcatgctgtgtgtcctggtattgggaggtttctgggaagggcagaggataaatgtggccctgcctgctcccaggtatacctaggaccacctggccagatccgctcccagacggccttggactgcttgcatttccccggagaaaaaggggttaataaatgggccatcctttcctgaaaaaaaaaacccccccccccc

SEQ ID NO: 733063 - DNA, 1047 bp, Homo sapiens
gcacaagcatgatggtggagaacatggcagtccgcccagcaccacaccctggcaccgtcatttcccactccgtggcgatgctgatcctcataggctccctggagctctgatcctggaacccctccctctgcgccgcagctggacgccacctccgacggacacagccagccccttcctgctgccaagagatggccctctgggaccctatacggactccgccacttgagagcagtcctaggcccggcaggaacaccagacatgaacaggttgaagaactggagcgaagtgcacacctcaccatccttcagtctaaggaagaagggcaagccctgggaccaagagctctcccgccttctccctcgagcagcagcaaggaccctgacgctgtccccgataactccctaggggctcctgcctgcccaagcggctgagaaccagcgccccgatgcctgaggctgggagcctgagccccttcagctttgaggggggtgatactccaggctgtttggggtgggagccaaaaagagttgagaggccagggcccttggtggaaaggggcaccagccttggtctgagatagtcacaacccaggtgacgatgccctctcagccaacactgccaacctgaccctgtcatcccgattgacagcgccacttcaggtggctgggtgactaaagggcttgtcttggtggggtctcccacccctccaagacccattctgcacagtccctccagggtttgggcaggagatggccaatcatgcgcccacctctccagtgctgcctgcagtcagctcggcctccccgacctgcagccccagactctgctctcccagcactgactcactcctgcctgggaggggaatgcagcattcatgctgtgtgtcctggtattgggaggtttctgggaagggcagaggataaatgtggccctgcctgctcccaggtatacctaggaccacctggccagatccgctcccagacggccttggactgcttgcatttccccggagaaaaaggggttaataaatgggccatcctttcctga

SEQ ID NO: 733064 - DNA, 322 bp, Homo sapiens
tgcaaacatcgagggcaatgccgagactgcacaggtgctgggcctcaccccctggatggactatgagttccgggtcatagccagcaacattctgggcactggggagcctagtgggccctccagcaaaatccggaccagggaagcaggtgagagtcctgtgtgtcccaaaaagctatcatcagggcagagaccctggcaccacttatagggaatgccaagccagccgcaattatgctgagttccaaccctgctcacagggttcagactctcacaaaacagaggaggacagaacaccaagttgggaccagggccactgcatgga

SEQ ID NO: 733065 - DNA, 1353 bp, Homo sapiens
aatgtgactttttagagatcaatgagatagtgcagatatacacagatctagagactccaggagacgatgcgacactcagcctgaaaagatttggaagacccaaaatgaaaactgattattgaatgaaattaaaacctaaggtaatttaagattagagaaccatgttaacactaccgtttgatgagtctgttgtaatgccagaatcccagatgtgcagaaagttttctagagaatgcgaggaccagaagcaaattaagaagccagaaagcttttccaaacagattgtccttcgaggaaagagcatcaaaagggcccctggagaagaaaccgagaaagaagaagaggaggaagacagggaagaggaagatgaaaatgggttgcctagaaggaggggtcttaggaaaaaaaagacaacaaagctgcgattggaaagggtcaagttcaggagacaggaagcgaacgcgcgcgagaggaacaggatgcacggcctcaacgacgctctggacaacttaagaaaagtggtcccctgttattctaaaacccagaaactgtccaaaatagagactttacgactggccaaaaactacatctgggcactttctgaaattctgagaatcggcaagagaccagatctgctcacattcgtccaaaacttatgcaaaggtctttcccagccaactacaaacttggtggcaggctgcttgcagctcaacgccagggagtttcctgatgggtcagggtggggaggctgcacaccacacaaggtcaccctactctaccttctacccaccctaccacagccctgagcttcaccactcccccagggcatgggactcttgataatttccaagtccatgaaaccctacaattatttgcagtgcgtatgaatccttctatgaaagtacttcccctgagtgtgccagccctcagtttgaaggtcccttaagtcctcccccaattaactataatgggatattttccctgaagcaagaagaaaccttggactatggtaaaaattacaattacggcatgcattactgtgcagtgccacccaggggtccccttgggcagggtgccatgttcaggttgcccaccgacagccacttcccttacgacttacatctgcgcagccaatctctcacaatgcaagatgaattaaatgcagtttttcataattaatgaggaaaatgaaaataaacagtggtcattcacctcccctgtctaattaagacaaagcagatgcttgtgggctgagtaattggcacaactctatctaaggtgtttactagtttctgaagtgtgtttcaactattgtgagaattttctatgtaataataaatctcttttcgtatg

SEQ ID NO: 733066 - DNA, 1975 bp, Homo sapiens
aatgtgactttttagagatcaatgagatagtgcagatatacacagatctagagactccaggagacgatgcgacactcagcctgaaaagatttggaagacccaaaatgaaaactgattattgaatgaaattaaaacctaaggtaatttaagattagagaaccatgttaacactaccgtttgatgagtctgttgtaatgccagaatcccagatgtgcagaaagttttctagagaatgcgaggaccagaagcaaattaagaagccagaaagcttttccaaacagattgtccttcgaggaaagagcatcaaaagggcccctggagaagaaaccgagaaagaagaagaggaggaagacagggaagaggaagatgaaaatgggttgcctagaaggaggggtcttaggaaaaaaaagacaacaaagctgcgattggaaagggtcaagttcaggagacaggaagcgaacgcgcgcgagaggaacaggatgcacggcctcaacgacgctctggacaacttaagaaaagtggtcccctgttattctaaaacccagaaactgtccaaaatagagactttacgactggccaaaaactacatctgggcactttctgaaattctgagaatcggcaagagaccagatctgctcacattcgtccaaaacttatgcaaaggtctttcccagccaactacaaacttggtggcaggctgcttgcagctcaacgccagggagtttcctgatgggtcagggtggggaggctgcacaccacacaaggtcaccctactctaccttctacccaccctaccacagccctgagcttcaccactcccccagggcatgggactcttgataatttccaagtccatgaaaccctacaattatttgcagtgcgtatgaatccttctatgaaagtacttcccctgagtgtgccagccctcagtttgaaggtcccttaagtcctcccccaattaactataatgggatattttccctgaagcaagaagaaaccttggactatggtaaaaattacaattacggcatgcattactgtgcagtgccacccaggggtccccttgggcagggtgccatgttcaggttgcccaccgacagccacttcccttacgacttacatctgcgcagccaatctctcacaatgcaagatgaattaaatgcagtttttcataattaatgaggaaaatgaaaataaacagtggtcattcacctcccctgtctaattaagacaaagcagatgcttgtgggctgagtaattggcacaactctatctaaggtgtttactagtttctgaagtgtgtttcaactattgtgagaattttctatgtaataataaatctcttttcgtatgagaacttcttttcctttccttttgtctgtgaagcactgtgattctgtttctactggaaagatttttttctttttaattttcttttaaacttatttaatttgtttgaacaaggtgtctaagaatatactgttgaataaagacatgcacacagcataattcaatgtctattttggttgtacagtaattataaaatgcatgttattaaaaccagatgagtaaaatgatgtgtttataattattaggaattatatattatgtatcttttaaaaattgaaattttaaaatatggagaatatcactaagctgacaatgatattgggagatgaatttgcaacaatataaaaagctatgcaattttctttttattaaggatgaatctaaatgcattcaattggtaactattcctcttcaagtatttgcagatggggcaacatgatatttgggtagctgatgtcataattcggggacaattatctcaatcatcaagaaaaaaatttcagcacttgttttgtattattcagaaattaactgtacaggtttgttatcacaatgtataattgtgtttttccaccccacatttttaaggcaattaaatatagatatttccactcgtaaaggacat

SEQ ID NO: 733067 - DNA, 2080 bp, Homo sapiens
agcggggccatctttgatgagggcagagctcacgttgcattgaagacgaaacctcggggaggtcaggcgctgtctttccttccctccctgctcggcggctccaccacagttgcaacctgcagaggcccggagaacacaaccctcccgagaagcccaggtccagagccaaacccgtcactgaccccccagcccaggcgcccagccactccccaccgctaccatggccgaagacgcagacatgcgcaatgagctggaggagatgcagcgaagggctgaccagttggctgatgagtcgctggaaagcacccgtcgtatgctgcaactggttgaagagagtaaagatgctggtatcaggactttggttatgttggatgaacaaggagaacaactcgatcgtgtcgaagaaggcatgaaccatatcaaccaagacatgaaggaggctgagaaaaatttaaaagatttagggaaatgctgtggccttttcatatgtccttgtaacaagcttaaatcaagtgatgcttacaaaaaagcctggggcaataatcaggacggagtggtggccagccagcctgctcgtgtagtggacgaacgggagcagatggccatcagtggcggcttcatccgcagggtaacaaatgatgcccgagaaaatgaaatggatgaaaacctagagcaggtgagcggcatcatcgggaacctccgtcacatggccctggatatgggcaatgagatcgatacacagaatcgccagatcgacaggatcatggagaaggctgattccaacaaaaccagaattgatgaggccaaccaacgtgcaacaaagatgctgggaagtggttaagtgtgcccacccgtgttctcctccaaatgctgtcgggcaagatagctccttcatgcttttctcatggtattatctagtaggtctgcacacataacacacatcagtccacccccattgtgaatgttgtcctgtgtcatctgtcagcttcccaacaatactttgtgtcttttgttctctcttggtctctttctttccaaaggttgtacatagtggtcatttggtggctctaactccttgatgtcttgagtttcatttttcattttctctcctcggtggcatttgctgaataacaacaatttaggaatgctcaatgtgctgttgattctttcaatccacagtattgttcttgtaaaactgtgacattccacagagttactgccacggtcctttgagtgtcaggctctgaatctctcaaaatgtgccgtctttggttcctcatggctgttatctgtctttatgatttcatgattagacaatgtggaattacataacaggcattgcactaaaagtgatgtgatttatgcatttatgcatgagaactaaatagatttttagattcctacttaaacaaaaactttccatgacagtagcatactgatgagacaacacacacacacacaaaacaacagcaacaacaacagaacaacaacaaagcatgctcagtattgagacactgtcaagattaagttataccagcaaaagtgcagtagtgtcacttttttcctgtcaatatatagagacttctaaatcataatcatccttttttaaaaaaaagaattttaaaaaagatggatttgacacactcaccatttaatcatttccagcaaaatatatgtttggctgaaattatgtcaaatggatgtaatatagggtttgtttgctgcttttgatggctacgttttggagagagcaatcttgctgtgaaacagtgtggatgtaaattttataaggctgactcttactaaccaccatttcccctgtggtttgttatcagtacaattctttgttgcttaatctagagctatgcacaccaaattgctgagatgtttagtagctgataaagaaaccttttaaaaaaataatataaatgaatgaaatataaactgtgagataaatatcattatagcatgtaatattaaattcctcctgtctcctctgtcagtttgtgaagtgattgacattttgtagctagtttaaaattattaaaaattatagactccagatgatctgctttaattt

SEQ ID NO: 733068 - DNA, 426 bp, Homo sapiens
taatgtcaaagtgaatgtctgaagttttgtctttttttctttgtccttttccatctgcttcattctgtggggataaaatacttgtgtttaatcagaacaacaactggaacgcattgaggaagggatggaccaaatcaataaggacatgaaagaagcagaaaagaatttgacggacctaggaaaattctgcgggctttgtgtgtgtccctgtaacaagtaggtgctgcctgcctgcctgaagctttgatttcccaaggcccatctccaagccttgacaagctcattcctgccaagctcataggcaggatgagcatgtggcatgcagaacagatcaataccgtctccaatgcattcatctcatagcatagatgatattagcaggagttactgttgatgcattaaaaatcaggcatactacagtgaaag

SEQ ID NO: 733069 - DNA, 2435 bp, Homo sapiens
gagaatggtcaacttctggagtagtttggcttaaatgagaatgcttcactttctactcatgcctgtagctggtgcatgaagaagacgtagaggggtttccctttttggtgctagatggcttgttctctcttctcttttcctgcattcatttcactatgcttcttttactttttgtctctgtggacaaaggtttgtacatcaactctggatgtatggtgactgtttggaagtaccgatatattatctaattcaaatcactctagaggcaatgcaaagaccatcactcttggccaaccaccaatcctttatgtccttcatggagctttggaaatgttagttccacacgtgttgggaaaaaaaaatattccacagggatctttgcatgatggtgtgtaaaaacttggttgaggatgttttcttgatgacagtgtgttgctgtggtgtgatgtgcacactctacttggcagtcttgttttgtgtctgtctgccagtatgtttttctctgttttatgtctccaaatataatcacatcactaaaatagaattaaatgtcctccagctaccttaatccttgtccaaaatccaaactaaaccacaaaacaaaccaaaacaagaacaaccttgtgggcaaagattgcagtccattgcaatggattcgattggaagtgaaatgttgagtagctgaggcatggtggtggccaactgtttgggtctggattatgatatatcggtattatctaatgcctcgacttaaaactcattcgcttggttcgattcttcgcttgaagaagtgacaattgttgagagcttgctcctccacccctgtgccttgtcactcaccctctcttttgcataggcttaaatcaagtgatgcttacaaaaaagcctggggcaataatcaggacggagtggtggccagccagcctgctcgtgtagtggacgaacgggagcagatggccatcagtggcggcttcatccgcagggtaacaaatgatgcccgagaaaatgaaatggatgaaaacctagagcaggtgagcggcatcatcgggaacctccgtcacatggccctggatatgggcaatgagatcgatacacagaatcgccagatcgacaggatcatggagaaggctgattccaacaaaaccagaattgatgaggccaaccaacgtgcaacaaagatgctgggaagtggttaagtgtgcccacccgtgttctcctccaaatgctgtcgggcaagatagctccttcatgcttttctcatggtattatctagtaggtctgcacacataacacacatcagtccacccccattgtgaatgttgtcctgtgtcatctgtcagcttcccaacaatactttgtgtcttttgttctctcttggtctctttctttccaaaggttgtacatagtggtcatttggtggctctaactccttgatgtcttgagtttcatttttcattttctctcctcggtggcatttgctgaataacaacaatttaggaatgctcaatgtgctgttgattctttcaatccacagtattgttcttgtaaaactgtgacattccacagagttactgccacggtcctttgagtgtcaggctctgaatctctcaaaatgtgccgtctttggttcctcatggctgttatctgtctttatgatttcatgattagacaatgtggaattacataacaggcattgcactaaaagtgatgtgatttatgcatttatgcatgagaactaaatagatttttagattcctacttaaacaaaaactttccatgacagtagcatactgatgagacaacacacacacacacaaaacaacagcaacaacaacagaacaacaacaaagcatgctcagtattgagacactgtcaagattaagttataccagcaaaagtgcagtagtgtcacttttttcctgtcaatatatagagacttctaaatcataatcatccttttttaaaaaaaagaattttaaaaaagatggatttgacacactcaccatttaatcatttccagcaaaatatatgtttggctgaaattatgtcaaatggatgtaatatagggtttgtttgctgcttttgatggctacgttttggagagagcaatcttgctgtgaaacagtgtggatgtaaattttataaggctgactcttactaaccaccatttcccctgtggtttgttatcagtacaattctttgttgcttaatctagagctatgcacaccaaattgctgagatgtttagtagctgataaagaaaccttttaaaaaaataatataaatgaatgaaatataaactgtgagataaatatcattatagcatgtaatattaaattcctcctgtctcctctgtcagtttgtgaagtgattgacattttgtagctagtttaaaattattaaaaattatagactccagatgatctgctttaattt

SEQ ID NO: 733070 - DNA, 549 bp, Homo sapiens
agcggggccatctttgatgagggcagagctcacgttgcattgaagacgaaacctcggggaggtcaggcgctgtctttccttccctccctgctcggcggctccaccacagttgcaacctgcagaggcccggagaacacaaccctcccgagaagcccaggtccagagccaaacccgtcactgaccccccagcccaggcgcccagccactccccaccgctaccatggccgaagacgcagacatgcgcaatgagctggaggagatgcagcgaagggctgaccagttggctgatgagtcgctggaaagcacccgtcgtatgctgcaactggttgaagagagtaaagatgctggtatcaggactttggttatgttggatgaacaaggagaacaactcgatcgtgtcgaagaaggcatgaaccatatcaaccaagacatgaaggaggctgagaaaaatttaaaagatttagggaaatgctgtggccttttcatatgtccttgtaacaagtaggtactgggtaccagctctaatctgtggcgtccagttttctttct

SEQ ID NO: 733071 - DNA, 480 bp, Homo sapiens
agcggggccatctttgatgagggcagagctcacgttgcattgaagacgaaacctcggggaggtcaggcgctgtctttccttccctccctgctcggcggctccaccacagttgcaacctgcagaggcccggagaacacaaccctcccgagaagcccagttctggaaaggaagatgatacagaaaccacagccattttgcagatatgaaaactgggacatagaaatttgactgccctggaaaagatcacctacttatttgatgacagagccagttcagggatgaagatggagtcttgctctgtcacccaggctggagtacaatggcatggtcttggttccctgcaacctccacctcccaggttcaagcgattctcctgcctcagcctcatgagtagctgggattacaggcacgcgccaccaagcccaggtcactccagcagcacatgccaaaccaggatgagcaaagttcataagcttgctt

SEQ ID NO: 733072 - DNA, 2080 bp, Homo sapiens
agcggggccatctttgatgagggcagagctcacgttgcattgaagacgaaacctcggggaggtcaggcgctgtctttccttccctccctgctcggcggctccaccacagttgcaacctgcagaggcccggagaacacaaccctcccgagaagcccaggtccagagccaaacccgtcactgaccccccagcccaggcgcccagccactccccaccgctaccatggccgaagacgcagacatgcgcaatgagctggaggagatgcagcgaagggctgaccagttggctgatgagtcgctggaaagcacccgtcgtatgctgcaactggttgaagagagtaaagatgctggtatcaggactttggttatgttggatgaacaaggagaacaactggaacgcattgaggaagggatggaccaaatcaataaggacatgaaagaagcagaaaagaatttgacggacctaggaaaattctgcgggctttgtgtgtgtccctgtaacaagcttaaatcaagtgatgcttacaaaaaagcctggggcaataatcaggacggagtggtggccagccagcctgctcgtgtagtggacgaacgggagcagatggccatcagtggcggcttcatccgcagggtaacaaatgatgcccgagaaaatgaaatggatgaaaacctagagcaggtgagcggcatcatcgggaacctccgtcacatggccctggatatgggcaatgagatcgatacacagaatcgccagatcgacaggatcatggagaaggctgattccaacaaaaccagaattgatgaggccaaccaacgtgcaacaaagatgctgggaagtggttaagtgtgcccacccgtgttctcctccaaatgctgtcgggcaagatagctccttcatgcttttctcatggtattatctagtaggtctgcacacataacacacatcagtccacccccattgtgaatgttgtcctgtgtcatctgtcagcttcccaacaatactttgtgtcttttgttctctcttggtctctttctttccaaaggttgtacatagtggtcatttggtggctctaactccttgatgtcttgagtttcatttttcattttctctcctcggtggcatttgctgaataacaacaatttaggaatgctcaatgtgctgttgattctttcaatccacagtattgttcttgtaaaactgtgacattccacagagttactgccacggtcctttgagtgtcaggctctgaatctctcaaaatgtgccgtctttggttcctcatggctgttatctgtctttatgatttcatgattagacaatgtggaattacataacaggcattgcactaaaagtgatgtgatttatgcatttatgcatgagaactaaatagatttttagattcctacttaaacaaaaactttccatgacagtagcatactgatgagacaacacacacacacacaaaacaacagcaacaacaacagaacaacaacaaagcatgctcagtattgagacactgtcaagattaagttataccagcaaaagtgcagtagtgtcacttttttcctgtcaatatatagagacttctaaatcataatcatccttttttaaaaaaaagaattttaaaaaagatggatttgacacactcaccatttaatcatttccagcaaaatatatgtttggctgaaattatgtcaaatggatgtaatatagggtttgtttgctgcttttgatggctacgttttggagagagcaatcttgctgtgaaacagtgtggatgtaaattttataaggctgactcttactaaccaccatttcccctgtggtttgttatcagtacaattctttgttgcttaatctagagctatgcacaccaaattgctgagatgtttagtagctgataaagaaaccttttaaaaaaataatataaatgaatgaaatataaactgtgagataaatatcattatagcatgtaatattaaattcctcctgtctcctctgtcagtttgtgaagtgattgacattttgtagctagtttaaaattattaaaaattatagactccagatgatctgctttaattt

SEQ ID NO: 733073 - DNA, 1889 bp, Homo sapiens
agcggggccatctttgatgagggcagagctcacgttgcattgaagacgaaacctcggggaggtcaggcgctgtctttccttccctccctgctcggcggctccaccacagttgcaacctgcagaggcccggagaacacaaccctcccgagaagcccaggtccagagccaaacccgtcactgaccccccagcccaggcgcccagccactccccaccgctaccatggccgaagacgcagacatgcgcaatgagctggaggagatgcagcgaagggctgaccagttggctgatgagtcgctggaaagcacccgtcgtatgctgcaactggttgaagagagtaaagatgctggtatcaggactttggttatgttggatgaacaaggagaacaactggaacgcattgaggaagggatggaccaaatcaataaggacatgaaagaagcagaaaagaatttgacggacctaggaaaattctgcgggctttgtgtgtgtccctgtaacaagcttaaatcaagtgatgcttacaaaaaagcctggggcaataatcaggacggagtggtggccagccagcctgctcgtgtagtggacgaacgggagcagatggccatcagtggcggcttcatccgcagggtaacaaatgatgcccgagaaaatgaaatggatgaaaacctagagcaggtgagcggcatcatcgggaacctccgtcacatggccctggatatgggcaatgagatcgatacacagaatcgccagatcgacaggatcatggagaaggctgattccaacaaaaccagaattgatgaggccaaccaacgtgcaacaaagatgctgggaagtggttaagtgtgcccacccgtgttctcctccaaatgctgtcgggcaagatagctccttcatgcttttctcatggtattatctagtaggtctgcacacataacacacatcagtccacccccattgtgaatgttgtcctgtgtcatctgtcagcttcccaacaatactttgtgtcttttgttctctcttggtctctttctttccaaaggttgtacatagtggtcatttggtggctctaactccttgatgtcttgagtttcatttttcattttctctcctcggtggcatttgctgaataacaacaatttaggaatgctcaatgtgctgttgattctttcaatccacagtattgttcttgtaaaactgtgacattccacagagttactgccacggtcctttgagtgtcaggctctgaatctctcaaaatgtgccgtctttggttcctcatggctgttatctgtctttatgatttcatgattagacaatgtggaattacataacaggcattgcactaaaagtgatgtgatttatgcatttatgcatgagaactaaatagatttttagattcctacttaaacaaaaactttccatgacagtagcatactgatgagacaacacacacacacacaaaacaacagcaacaacaacagaacaacaacaaagcatgctcagtattgagacactgtcaagattaagttataccagcaaaagtgcagtagtgtcacttttttcctgtcaatatatagagacttctaaatcataatcatccttttttaaaaaaaagaattttaaaaaagatggatttgacacactcaccatttaatcatttccagcaaaatatatgtttggctgaaattatgtcaaatggatgtaatatagggtttgtttgctgcttttgatggctacgttttggagagagcaatcttgctgtgaaacagtgtggatgtaaattttataaggctgactcttactaaccaccatttcccctgtggtttgttatcagtacaattctttgttgacccacaggtaccgaactcgagtcgtatcatgtcaactt

SEQ ID NO: 733074 - DNA, 1889 bp, Homo sapiens
agcggggccatctttgatgagggcagagctcacgttgcattgaagacgaaacctcggggaggtcaggcgctgtctttccttccctccctgctcggcggctccaccacagttgcaacctgcagaggcccggagaacacaaccctcccgagaagcccaggtccagagccaaacccgtcactgaccccccagcccaggcgcccagccactccccaccgctaccatggccgaagacgcagacatgcgcaatgagctggaggagatgcagcgaagggctgaccagttggctgatgagtcgctggaaagcacccgtcgtatgctgcaactggttgaagagagtaaagatgctggtatcaggactttggttatgttggatgaacaaggagaacaactcgatcgtgtcgaagaaggcatgaaccatatcaaccaagacatgaaggaggctgagaaaaatttaaaagatttagggaaatgctgtggccttttcatatgtccttgtaacaagcttaaatcaagtgatgcttacaaaaaagcctggggcaataatcaggacggagtggtggccagccagcctgctcgtgtagtggacgaacgggagcagatggccatcagtggcggcttcatccgcagggtaacaaatgatgcccgagaaaatgaaatggatgaaaacctagagcaggtgagcggcatcatcgggaacctccgtcacatggccctggatatgggcaatgagatcgatacacagaatcgccagatcgacaggatcatggagaaggctgattccaacaaaaccagaattgatgaggccaaccaacgtgcaacaaagatgctgggaagtggttaagtgtgcccacccgtgttctcctccaaatgctgtcgggcaagatagctccttcatgcttttctcatggtattatctagtaggtctgcacacataacacacatcagtccacccccattgtgaatgttgtcctgtgtcatctgtcagcttcccaacaatactttgtgtcttttgttctctcttggtctctttctttccaaaggttgtacatagtggtcatttggtggctctaactccttgatgtcttgagtttcatttttcattttctctcctcggtggcatttgctgaataacaacaatttaggaatgctcaatgtgctgttgattctttcaatccacagtattgttcttgtaaaactgtgacattccacagagttactgccacggtcctttgagtgtcaggctctgaatctctcaaaatgtgccgtctttggttcctcatggctgttatctgtctttatgatttcatgattagacaatgtggaattacataacaggcattgcactaaaagtgatgtgatttatgcatttatgcatgagaactaaatagatttttagattcctacttaaacaaaaactttccatgacagtagcatactgatgagacaacacacacacacacaaaacaacagcaacaacaacagaacaacaacaaagcatgctcagtattgagacactgtcaagattaagttataccagcaaaagtgcagtagtgtcacttttttcctgtcaatatatagagacttctaaatcataatcatccttttttaaaaaaaagaattttaaaaaagatggatttgacacactcaccatttaatcatttccagcaaaatatatgtttggctgaaattatgtcaaatggatgtaatatagggtttgtttgctgcttttgatggctacgttttggagagagcaatcttgctgtgaaacagtgtggatgtaaattttataaggctgactcttactaaccaccatttcccctgtggtttgttatcagtacaattctttgttgacccacaggtaccgaactcgagtcgtatcatgtcaactt

SEQ ID NO: 733075 - DNA, 1687 bp, Homo sapiens
  misc_feature (11)..(11): n is a, c, g, or t
atcagctcggnccaagttagtgggacgcaataaggacatgaaagaagcagaaaagaatttgacggacctaggaaaattctgcgggctttgtgtgtgtccctgtaacaagcttaaatcaagtgatgcttacaaaaaagcctggggcaataatcaggacggagtggtggccagccagcctgctcgtgtagtggacgaacgggagcagatggccatcagtggcggcttcatccgcagggtaacaaatgatgcccgagaaaatgaaatggatgaaaacctagagcaggtgagcggcatcatcgggaacctccgtcacatggccctggatatgggcaatgagatcgatacacagaatcgccagatcgacaggatcatggagaaggctgattccaacaaaaccagaattgatgaggccaaccaacgtgcaacaaagatgctgggaagtggttaagtgtgcccacccgtgttctcctccaaatgctgtcgggcaagatagctccttcatgcttttctcatggtattatctagtaggtctgcacacataacacacatcagtccacccccattgtgaatgttgtcctgtgtcatctgtcagcttcccaacaatactttgtgtcttttgttctctcttggtctctttctttccaaaggttgtacatagtggtcatttggtggctctaactccttgatgtcttgagtttcatttttcattttctctcctcggtggcatttgctgaataacaacaatttaggaatgctcaatgtgctgttgattctttcaatccacagtattgttcttgtaaaactgtgacattccacagagttactgccacggtcctttgagtgtcaggctctgaatctctcaaaatgtgccgtctttggttcctcatggctgttatctgtctttatgatttcatgattagacaatgtggaattacataacaggcattgcactaaaagtgatgtgatttatgcatttatgcatgagaactaaatagatttttagattcctacttaaacaaaaactttccatgacagtagcatactgatgagacaacacacacacacacaaaacaacagcaacaacaacagaacaacaacaaagcatgctcagtattgagacactgtcaagattaagttataccagcaaaagtgcagtagtgtcacttttttcctgtcaatatatagagacttctaaatcataatcatccttttttaaaaaaaagaattttaaaaaagatggatttgacacactcaccatttaatcatttccagcaaaatatatgtttggctgaaattatgtcaaatggatgtaatatagggtttgtttgctgcttttgatggctacgttttggagagagcaatcttgctgtgaaacagtgtggatgtaaattttataaggctgactcttactaaccaccatttcccctgtggtttgttatcagtacaattctttgttgcttaatctagagctatgcacaccaaattgctgagatgtttagtagctgataaagaaaccttttaaaaaaataatataaatgaatgaaatataaactgtgagataaatatcattatagcatgtaatattaaattcctcctgtctcctctgtcagtttgtgaagtgattgacattttgtagctagtttaaaattattaaaaattatagactccagatgatctgctttaattt

SEQ ID NO: 733076 - DNA, 1496 bp, Homo sapiens
  misc_feature (11)..(11): n is a, c, g, or t
atcagctcggnccaagttagtgggacgcaataaggacatgaaagaagcagaaaagaatttgacggacctaggaaaattctgcgggctttgtgtgtgtccctgtaacaagcttaaatcaagtgatgcttacaaaaaagcctggggcaataatcaggacggagtggtggccagccagcctgctcgtgtagtggacgaacgggagcagatggccatcagtggcggcttcatccgcagggtaacaaatgatgcccgagaaaatgaaatggatgaaaacctagagcaggtgagcggcatcatcgggaacctccgtcacatggccctggatatgggcaatgagatcgatacacagaatcgccagatcgacaggatcatggagaaggctgattccaacaaaaccagaattgatgaggccaaccaacgtgcaacaaagatgctgggaagtggttaagtgtgcccacccgtgttctcctccaaatgctgtcgggcaagatagctccttcatgcttttctcatggtattatctagtaggtctgcacacataacacacatcagtccacccccattgtgaatgttgtcctgtgtcatctgtcagcttcccaacaatactttgtgtcttttgttctctcttggtctctttctttccaaaggttgtacatagtggtcatttggtggctctaactccttgatgtcttgagtttcatttttcattttctctcctcggtggcatttgctgaataacaacaatttaggaatgctcaatgtgctgttgattctttcaatccacagtattgttcttgtaaaactgtgacattccacagagttactgccacggtcctttgagtgtcaggctctgaatctctcaaaatgtgccgtctttggttcctcatggctgttatctgtctttatgatttcatgattagacaatgtggaattacataacaggcattgcactaaaagtgatgtgatttatgcatttatgcatgagaactaaatagatttttagattcctacttaaacaaaaactttccatgacagtagcatactgatgagacaacacacacacacacaaaacaacagcaacaacaacagaacaacaacaaagcatgctcagtattgagacactgtcaagattaagttataccagcaaaagtgcagtagtgtcacttttttcctgtcaatatatagagacttctaaatcataatcatccttttttaaaaaaaagaattttaaaaaagatggatttgacacactcaccatttaatcatttccagcaaaatatatgtttggctgaaattatgtcaaatggatgtaatatagggtttgtttgctgcttttgatggctacgttttggagagagcaatcttgctgtgaaacagtgtggatgtaaattttataaggctgactcttactaaccaccatttcccctgtggtttgttatcagtacaattctttgttgacccacaggtaccgaactcgagtcgtatcatgtcaactt

SEQ ID NO: 733077 - DNA, 2039 bp, Homo sapiens
cggtattccgtgtgtgcacgtctggtgggggctttataaagtgttttcgaggtgagctgctggggaaaagggaaacgggagccctgcaaatggagcgacggggaggaagagcgagggtccagagccaaacccgtcactgaccccccagcccaggcgcccagccactccccaccgctaccatggccgaagacgcagacatgcgcaatgagctggaggagatgcagcgaagggctgaccagttggctgatgagtcgctggaaagcacccgtcgtatgctgcaactggttgaagagagtaaagatgctggtatcaggactttggttatgttggatgaacaaggagaacaactggaacgcattgaggaagggatggaccaaatcaataaggacatgaaagaagcagaaaagaatttgacggacctaggaaaattctgcgggctttgtgtgtgtccctgtaacaagcttaaatcaagtgatgcttacaaaaaagcctggggcaataatcaggacggagtggtggccagccagcctgctcgtgtagtggacgaacgggagcagatggccatcagtggcggcttcatccgcagggtaacaaatgatgcccgagaaaatgaaatggatgaaaacctagagcaggtgagcggcatcatcgggaacctccgtcacatggccctggatatgggcaatgagatcgatacacagaatcgccagatcgacaggatcatggagaaggctgattccaacaaaaccagaattgatgaggccaaccaacgtgcaacaaagatgctgggaagtggttaagtgtgcccacccgtgttctcctccaaatgctgtcgggcaagatagctccttcatgcttttctcatggtattatctagtaggtctgcacacataacacacatcagtccacccccattgtgaatgttgtcctgtgtcatctgtcagcttcccaacaatactttgtgtcttttgttctctcttggtctctttctttccaaaggttgtacatagtggtcatttggtggctctaactccttgatgtcttgagtttcatttttcattttctctcctcggtggcatttgctgaataacaacaatttaggaatgctcaatgtgctgttgattctttcaatccacagtattgttcttgtaaaactgtgacattccacagagttactgccacggtcctttgagtgtcaggctctgaatctctcaaaatgtgccgtctttggttcctcatggctgttatctgtctttatgatttcatgattagacaatgtggaattacataacaggcattgcactaaaagtgatgtgatttatgcatttatgcatgagaactaaatagatttttagattcctacttaaacaaaaactttccatgacagtagcatactgatgagacaacacacacacacacaaaacaacagcaacaacaacagaacaacaacaaagcatgctcagtattgagacactgtcaagattaagttataccagcaaaagtgcagtagtgtcacttttttcctgtcaatatatagagacttctaaatcataatcatccttttttaaaaaaaagaattttaaaaaagatggatttgacacactcaccatttaatcatttccagcaaaatatatgtttggctgaaattatgtcaaatggatgtaatatagggtttgtttgctgcttttgatggctacgttttggagagagcaatcttgctgtgaaacagtgtggatgtaaattttataaggctgactcttactaaccaccatttcccctgtggtttgttatcagtacaattctttgttgcttaatctagagctatgcacaccaaattgctgagatgtttagtagctgataaagaaaccttttaaaaaaataatataaatgaatgaaatataaactgtgagataaatatcattatagcatgtaatattaaattcctcctgtctcctctgtcagtttgtgaagtgattgacattttgtagctagtttaaaattattaaaaattatagactccagatgatctgctttaattt

SEQ ID NO: 733078 - DNA, 1848 bp, Homo sapiens
cggtattccgtgtgtgcacgtctggtgggggctttataaagtgttttcgaggtgagctgctggggaaaagggaaacgggagccctgcaaatggagcgacggggaggaagagcgagggtccagagccaaacccgtcactgaccccccagcccaggcgcccagccactccccaccgctaccatggccgaagacgcagacatgcgcaatgagctggaggagatgcagcgaagggctgaccagttggctgatgagtcgctggaaagcacccgtcgtatgctgcaactggttgaagagagtaaagatgctggtatcaggactttggttatgttggatgaacaaggagaacaactggaacgcattgaggaagggatggaccaaatcaataaggacatgaaagaagcagaaaagaatttgacggacctaggaaaattctgcgggctttgtgtgtgtccctgtaacaagcttaaatcaagtgatgcttacaaaaaagcctggggcaataatcaggacggagtggtggccagccagcctgctcgtgtagtggacgaacgggagcagatggccatcagtggcggcttcatccgcagggtaacaaatgatgcccgagaaaatgaaatggatgaaaacctagagcaggtgagcggcatcatcgggaacctccgtcacatggccctggatatgggcaatgagatcgatacacagaatcgccagatcgacaggatcatggagaaggctgattccaacaaaaccagaattgatgaggccaaccaacgtgcaacaaagatgctgggaagtggttaagtgtgcccacccgtgttctcctccaaatgctgtcgggcaagatagctccttcatgcttttctcatggtattatctagtaggtctgcacacataacacacatcagtccacccccattgtgaatgttgtcctgtgtcatctgtcagcttcccaacaatactttgtgtcttttgttctctcttggtctctttctttccaaaggttgtacatagtggtcatttggtggctctaactccttgatgtcttgagtttcatttttcattttctctcctcggtggcatttgctgaataacaacaatttaggaatgctcaatgtgctgttgattctttcaatccacagtattgttcttgtaaaactgtgacattccacagagttactgccacggtcctttgagtgtcaggctctgaatctctcaaaatgtgccgtctttggttcctcatggctgttatctgtctttatgatttcatgattagacaatgtggaattacataacaggcattgcactaaaagtgatgtgatttatgcatttatgcatgagaactaaatagatttttagattcctacttaaacaaaaactttccatgacagtagcatactgatgagacaacacacacacacacaaaacaacagcaacaacaacagaacaacaacaaagcatgctcagtattgagacactgtcaagattaagttataccagcaaaagtgcagtagtgtcacttttttcctgtcaatatatagagacttctaaatcataatcatccttttttaaaaaaaagaattttaaaaaagatggatttgacacactcaccatttaatcatttccagcaaaatatatgtttggctgaaattatgtcaaatggatgtaatatagggtttgtttgctgcttttgatggctacgttttggagagagcaatcttgctgtgaaacagtgtggatgtaaattttataaggctgactcttactaaccaccatttcccctgtggtttgttatcagtacaattctttgttgacccacaggtaccgaactcgagtcgtatcatgtcaactt

SEQ ID NO: 733079 - DNA, 1981 bp, Homo sapiens
cggtattccgtgtgtgcacgtctggtgggggctttataaagtgttttcgaggtgagctgctggggaaaagggaaacgggagccctgcaaatggagcgacggggaggaagagcgagggtccagagccaaacccgtcactgaccccccagcccaggcgcccagccactccccaccgctaccatggccgaagacgcagacatgcgcaatgagctggaggagatgcagcgaagggctgaccagttggctgatgagtcgctggaaagcacccgtcgtatgctgcaactggttgaagagagtaaagatgctggtatcaggactttggttatgttggatgaacaaggagaacaactggaacgcattgaggaagggatggaccaaatcaataaggacatgaaagaagcagaaaagaatttgacggacctaggaaaattctgcgggctttgtgtgtgtccctgtaacaagcttaaatcaagtgatgcttacaaaaaagcctggggcaataatcaggacggagtggtggccagccagcctgctcgtgtagtggacgaacgggagcagatggccatcagtggcggcttcatccgcagggtaacaaatgatgcccgagaaaatgaaatggatgaaaacctagagcaggtgagcggcatcatcgggaacctccgtcacatggccctggatatgggcaatgagatcgatacacagaatcgccagatcgacaggatcatggagaaggctgattccaacaaaaccagaattgatgaggccaaccaacgtgcaacaaagatgctgggaagtggttaagtgtgcccacccgtgttctcctccaaatgctgtcgggcaagatagctccttcatgcttttctcatggtattatctagtaggtctgcacacataacacacatcagtccacccccattgtgaatgttgtcctgtgtcatctgtcagcttcccaacaatactttgtgtcttttgttctctcttggtctctttctttccaaaggttgtacatagtggtcatttggtggctctaactccttgatgtcttgagtttcatttttcattttctctcctcggtggcatttgctgaataacaacaatttaggaatgctcaatgtgctgttgattctttcaatccacagtattgttcttgtaaaactgtgacattccacagagttactgccacggtcctttgagtgtcaggctctgaatctctcaaaatgtgccgtctttggttcctcatggctgttatctgtctttatgatttcatgattagacaatgtggaattacataacaggcattgcactaaaagtgatgtgatttatgcatttatgcatgagaactaaatagatttttagattcctacttaaacaaaaactttccatgacagtagcatactgatgagacaacacacacacacacaaaacaacagcaacaacaacagaacaacaacaaagcatgctcagtattgagacactgtcaagattaagttataccagcaaaagtgcagtagtgtcacttttttcctgtcaatatatagagacttctaaatcataatcatccttttttcaaaatatatgtttggctgaaattatgtcaaatggatgtaatatagggtttgtttgctgcttttgatggctacgttttggagagagcaatcttgctgtgaaacagtgtggatgtaaattttataaggctgactcttactaaccaccatttcccctgtggtttgttatcagtacaattctttgttgcttaatctagagctatgcacaccaaattgctgagatgtttagtagctgataaagaaaccttttaaaaaaataatataaatgaatgaaatataaactgtgagataaatatcattatagcatgtaatattaaattcctcctgtctcctctgtcagtttgtgaagtgattgacattttgtagctagtttaaaattattaaaaattatagactccagatgatctgctttaattt

SEQ ID NO: 733080 - DNA, 1885 bp, Homo sapiens
cggtattccgtgtgtgcacgtctggtgggggctttataaagtgttttcgaggtgagctgctggggaaaagggaaacgggagccctgcaaatggagcgacggggaggaagagcgagggtccagagccaaacccgtcactgaccccccagcccaggcgcccagccactccccaccgctaccatggccgaagacgcagacatgcgcaatgagctggaggagatgcagcgaagggctgaccagttggctgatgagtcgctggaaagcacccgtcgtatgctgcaactggttgaagagagtaaagatgctggtatcaggactttggttatgttggatgaacaaggagaacaactggaacgcattgaggaagggatggaccaaatcaataaggacatgaaagaagcagaaaagaatttgacggacctaggaaaattctgcgggctttgtgtgtgtccctgtaacaagcttaaatcaagtgatgcttacaaaaaagcctggggcaataatcaggacggagtggtggccagccagcctgctcgtgtagtggacgaacgggagcagatggccatcagtggcggcttcatccgcagggtaacaaatgatgcccgagaaaatgaaatggatgaaaacctagagcaggtgagcggcatcatcgggaacctccgtcacatggccctggatatgggcaatgagatcgatacacagaatcgccagatcgacaggatcatggagaaggctgattccaacaaaaccagaattgatgaggccaaccaacgtgcaacaaagatgctgggaagtggttaagtgtgcccacccgtgttctcctccaaatgctgtcgggcaagatagctccttcatgcttttctcatggtattatctagtaggtctgcacacataacacacatcagtccacccccattgtgaatgttgtcctgtgtcatctgtcagcttcccaacaatactttgtgtcttttgttctctcttggtctctttctttccaaaggttgtacatagtggtcatttggtggctctaactccttgattgtcaggctctgaatctctcaaaatgtgccgtctttggttcctcatggctgttatctgtctttatgatttcatgattagacaatgtggaattacataacaggcattgcactaaaagtgatgtgatttatgcatttatgcatgagaactaaatagatttttagattcctacttaaacaaaaactttccatgacagtagcatactgatgagacaacacacacacacacaaaacaacagcaacaacaacagaacaacaacaaagcatgctcagtattgagacactgtcaagattaagttataccagcaaaagtgcagtagtgtcacttttttcctgtcaatatatagagacttctaaatcataatcatccttttttaaaaaaaagaattttaaaaaagatggatttgacacactcaccatttaatcatttccagcaaaatatatgtttggctgaaattatgtcaaatggatgtaatatagggtttgtttgctgcttttgatggctacgttttggagagagcaatcttgctgtgaaacagtgtggatgtaaattttataaggctgactcttactaaccaccatttcccctgtggtttgttatcagtacaattctttgttgcttaatctagagctatgcacaccaaattgctgagatgtttagtagctgataaagaaaccttttaaaaaaataatataaatgaatgaaatataaactgtgagataaatatcattatagcatgtaatattaaattcctcctgtctcctctgtcagtttgtgaagtgattgacattttgtagctagtttaaaattattaaaaattatagactccagatgatctgctttaattt

SEQ ID NO: 733081 - DNA, 1694 bp, Homo sapiens
cggtattccgtgtgtgcacgtctggtgggggctttataaagtgttttcgaggtgagctgctggggaaaagggaaacgggagccctgcaaatggagcgacggggaggaagagcgagggtccagagccaaacccgtcactgaccccccagcccaggcgcccagccactccccaccgctaccatggccgaagacgcagacatgcgcaatgagctggaggagatgcagcgaagggctgaccagttggctgatgagtcgctggaaagcacccgtcgtatgctgcaactggttgaagagagtaaagatgctggtatcaggactttggttatgttggatgaacaaggagaacaactggaacgcattgaggaagggatggaccaaatcaataaggacatgaaagaagcagaaaagaatttgacggacctaggaaaattctgcgggctttgtgtgtgtccctgtaacaagcttaaatcaagtgatgcttacaaaaaagcctggggcaataatcaggacggagtggtggccagccagcctgctcgtgtagtggacgaacgggagcagatggccatcagtggcggcttcatccgcagggtaacaaatgatgcccgagaaaatgaaatggatgaaaacctagagcaggtgagcggcatcatcgggaacctccgtcacatggccctggatatgggcaatgagatcgatacacagaatcgccagatcgacaggatcatggagaaggctgattccaacaaaaccagaattgatgaggccaaccaacgtgcaacaaagatgctgggaagtggttaagtgtgcccacccgtgttctcctccaaatgctgtcgggcaagatagctccttcatgcttttctcatggtattatctagtaggtctgcacacataacacacatcagtccacccccattgtgaatgttgtcctgtgtcatctgtcagcttcccaacaatactttgtgtcttttgttctctcttggtctctttctttccaaaggttgtacatagtggtcatttggtggctctaactccttgattgtcaggctctgaatctctcaaaatgtgccgtctttggttcctcatggctgttatctgtctttatgatttcatgattagacaatgtggaattacataacaggcattgcactaaaagtgatgtgatttatgcatttatgcatgagaactaaatagatttttagattcctacttaaacaaaaactttccatgacagtagcatactgatgagacaacacacacacacacaaaacaacagcaacaacaacagaacaacaacaaagcatgctcagtattgagacactgtcaagattaagttataccagcaaaagtgcagtagtgtcacttttttcctgtcaatatatagagacttctaaatcataatcatccttttttaaaaaaaagaattttaaaaaagatggatttgacacactcaccatttaatcatttccagcaaaatatatgtttggctgaaattatgtcaaatggatgtaatatagggtttgtttgctgcttttgatggctacgttttggagagagcaatcttgctgtgaaacagtgtggatgtaaattttataaggctgactcttactaaccaccatttcccctgtggtttgttatcagtacaattctttgttgacccacaggtaccgaactcgagtcgtatcatgtcaactt

SEQ ID NO: 733082 - DNA, 1827 bp, Homo sapiens
cggtattccgtgtgtgcacgtctggtgggggctttataaagtgttttcgaggtgagctgctggggaaaagggaaacgggagccctgcaaatggagcgacggggaggaagagcgagggtccagagccaaacccgtcactgaccccccagcccaggcgcccagccactccccaccgctaccatggccgaagacgcagacatgcgcaatgagctggaggagatgcagcgaagggctgaccagttggctgatgagtcgctggaaagcacccgtcgtatgctgcaactggttgaagagagtaaagatgctggtatcaggactttggttatgttggatgaacaaggagaacaactggaacgcattgaggaagggatggaccaaatcaataaggacatgaaagaagcagaaaagaatttgacggacctaggaaaattctgcgggctttgtgtgtgtccctgtaacaagcttaaatcaagtgatgcttacaaaaaagcctggggcaataatcaggacggagtggtggccagccagcctgctcgtgtagtggacgaacgggagcagatggccatcagtggcggcttcatccgcagggtaacaaatgatgcccgagaaaatgaaatggatgaaaacctagagcaggtgagcggcatcatcgggaacctccgtcacatggccctggatatgggcaatgagatcgatacacagaatcgccagatcgacaggatcatggagaaggctgattccaacaaaaccagaattgatgaggccaaccaacgtgcaacaaagatgctgggaagtggttaagtgtgcccacccgtgttctcctccaaatgctgtcgggcaagatagctccttcatgcttttctcatggtattatctagtaggtctgcacacataacacacatcagtccacccccattgtgaatgttgtcctgtgtcatctgtcagcttcccaacaatactttgtgtcttttgttctctcttggtctctttctttccaaaggttgtacatagtggtcatttggtggctctaactccttgattgtcaggctctgaatctctcaaaatgtgccgtctttggttcctcatggctgttatctgtctttatgatttcatgattagacaatgtggaattacataacaggcattgcactaaaagtgatgtgatttatgcatttatgcatgagaactaaatagatttttagattcctacttaaacaaaaactttccatgacagtagcatactgatgagacaacacacacacacacaaaacaacagcaacaacaacagaacaacaacaaagcatgctcagtattgagacactgtcaagattaagttataccagcaaaagtgcagtagtgtcacttttttcctgtcaatatatagagacttctaaatcataatcatccttttttcaaaatatatgtttggctgaaattatgtcaaatggatgtaatatagggtttgtttgctgcttttgatggctacgttttggagagagcaatcttgctgtgaaacagtgtggatgtaaattttataaggctgactcttactaaccaccatttcccctgtggtttgttatcagtacaattctttgttgcttaatctagagctatgcacaccaaattgctgagatgtttagtagctgataaagaaaccttttaaaaaaataatataaatgaatgaaatataaactgtgagataaatatcattatagcatgtaatattaaattcctcctgtctcctctgtcagtttgtgaagtgattgacattttgtagctagtttaaaattattaaaaattatagactccagatgatctgctttaattt

SEQ ID NO: 733083 - DNA, 2022 bp, Homo sapiens
agcggggccatctttgatgagggcagagctcacgttgcattgaagacgaaacctcggggaggtcaggcgctgtctttccttccctccctgctcggcggctccaccacagttgcaacctgcagaggcccggagaacacaaccctcccgagaagcccaggtccagagccaaacccgtcactgaccccccagcccaggcgcccagccactccccaccgctaccatggccgaagacgcagacatgcgcaatgagctggaggagatgcagcgaagggctgaccagttggctgatgagtcgctggaaagcacccgtcgtatgctgcaactggttgaagagagtaaagatgctggtatcaggactttggttatgttggatgaacaaggagaacaactggaacgcattgaggaagggatggaccaaatcaataaggacatgaaagaagcagaaaagaatttgacggacctaggaaaattctgcgggctttgtgtgtgtccctgtaacaagcttaaatcaagtgatgcttacaaaaaagcctggggcaataatcaggacggagtggtggccagccagcctgctcgtgtagtggacgaacgggagcagatggccatcagtggcggcttcatccgcagggtaacaaatgatgcccgagaaaatgaaatggatgaaaacctagagcaggtgagcggcatcatcgggaacctccgtcacatggccctggatatgggcaatgagatcgatacacagaatcgccagatcgacaggatcatggagaaggctgattccaacaaaaccagaattgatgaggccaaccaacgtgcaacaaagatgctgggaagtggttaagtgtgcccacccgtgttctcctccaaatgctgtcgggcaagatagctccttcatgcttttctcatggtattatctagtaggtctgcacacataacacacatcagtccacccccattgtgaatgttgtcctgtgtcatctgtcagcttcccaacaatactttgtgtcttttgttctctcttggtctctttctttccaaaggttgtacatagtggtcatttggtggctctaactccttgatgtcttgagtttcatttttcattttctctcctcggtggcatttgctgaataacaacaatttaggaatgctcaatgtgctgttgattctttcaatccacagtattgttcttgtaaaactgtgacattccacagagttactgccacggtcctttgagtgtcaggctctgaatctctcaaaatgtgccgtctttggttcctcatggctgttatctgtctttatgatttcatgattagacaatgtggaattacataacaggcattgcactaaaagtgatgtgatttatgcatttatgcatgagaactaaatagatttttagattcctacttaaacaaaaactttccatgacagtagcatactgatgagacaacacacacacacacaaaacaacagcaacaacaacagaacaacaacaaagcatgctcagtattgagacactgtcaagattaagttataccagcaaaagtgcagtagtgtcacttttttcctgtcaatatatagagacttctaaatcataatcatccttttttcaaaatatatgtttggctgaaattatgtcaaatggatgtaatatagggtttgtttgctgcttttgatggctacgttttggagagagcaatcttgctgtgaaacagtgtggatgtaaattttataaggctgactcttactaaccaccatttcccctgtggtttgttatcagtacaattctttgttgcttaatctagagctatgcacaccaaattgctgagatgtttagtagctgataaagaaaccttttaaaaaaataatataaatgaatgaaatataaactgtgagataaatatcattatagcatgtaatattaaattcctcctgtctcctctgtcagtttgtgaagtgattgacattttgtagctagtttaaaattattaaaaattatagactccagatgatctgctttaattt

SEQ ID NO: 733084 - DNA, 1926 bp, Homo sapiens
agcggggccatctttgatgagggcagagctcacgttgcattgaagacgaaacctcggggaggtcaggcgctgtctttccttccctccctgctcggcggctccaccacagttgcaacctgcagaggcccggagaacacaaccctcccgagaagcccaggtccagagccaaacccgtcactgaccccccagcccaggcgcccagccactccccaccgctaccatggccgaagacgcagacatgcgcaatgagctggaggagatgcagcgaagggctgaccagttggctgatgagtcgctggaaagcacccgtcgtatgctgcaactggttgaagagagtaaagatgctggtatcaggactttggttatgttggatgaacaaggagaacaactggaacgcattgaggaagggatggaccaaatcaataaggacatgaaagaagcagaaaagaatttgacggacctaggaaaattctgcgggctttgtgtgtgtccctgtaacaagcttaaatcaagtgatgcttacaaaaaagcctggggcaataatcaggacggagtggtggccagccagcctgctcgtgtagtggacgaacgggagcagatggccatcagtggcggcttcatccgcagggtaacaaatgatgcccgagaaaatgaaatggatgaaaacctagagcaggtgagcggcatcatcgggaacctccgtcacatggccctggatatgggcaatgagatcgatacacagaatcgccagatcgacaggatcatggagaaggctgattccaacaaaaccagaattgatgaggccaaccaacgtgcaacaaagatgctgggaagtggttaagtgtgcccacccgtgttctcctccaaatgctgtcgggcaagatagctccttcatgcttttctcatggtattatctagtaggtctgcacacataacacacatcagtccacccccattgtgaatgttgtcctgtgtcatctgtcagcttcccaacaatactttgtgtcttttgttctctcttggtctctttctttccaaaggttgtacatagtggtcatttggtggctctaactccttgattgtcaggctctgaatctctcaaaatgtgccgtctttggttcctcatggctgttatctgtctttatgatttcatgattagacaatgtggaattacataacaggcattgcactaaaagtgatgtgatttatgcatttatgcatgagaactaaatagatttttagattcctacttaaacaaaaactttccatgacagtagcatactgatgagacaacacacacacacacaaaacaacagcaacaacaacagaacaacaacaaagcatgctcagtattgagacactgtcaagattaagttataccagcaaaagtgcagtagtgtcacttttttcctgtcaatatatagagacttctaaatcataatcatccttttttaaaaaaaagaattttaaaaaagatggatttgacacactcaccatttaatcatttccagcaaaatatatgtttggctgaaattatgtcaaatggatgtaatatagggtttgtttgctgcttttgatggctacgttttggagagagcaatcttgctgtgaaacagtgtggatgtaaattttataaggctgactcttactaaccaccatttcccctgtggtttgttatcagtacaattctttgttgcttaatctagagctatgcacaccaaattgctgagatgtttagtagctgataaagaaaccttttaaaaaaataatataaatgaatgaaatataaactgtgagataaatatcattatagcatgtaatattaaattcctcctgtctcctctgtcagtttgtgaagtgattgacattttgtagctagtttaaaattattaaaaattatagactccagatgatctgctttaattt

SEQ ID NO: 733085 - DNA, 1735 bp, Homo sapiens
agcggggccatctttgatgagggcagagctcacgttgcattgaagacgaaacctcggggaggtcaggcgctgtctttccttccctccctgctcggcggctccaccacagttgcaacctgcagaggcccggagaacacaaccctcccgagaagcccaggtccagagccaaacccgtcactgaccccccagcccaggcgcccagccactccccaccgctaccatggccgaagacgcagacatgcgcaatgagctggaggagatgcagcgaagggctgaccagttggctgatgagtcgctggaaagcacccgtcgtatgctgcaactggttgaagagagtaaagatgctggtatcaggactttggttatgttggatgaacaaggagaacaactggaacgcattgaggaagggatggaccaaatcaataaggacatgaaagaagcagaaaagaatttgacggacctaggaaaattctgcgggctttgtgtgtgtccctgtaacaagcttaaatcaagtgatgcttacaaaaaagcctggggcaataatcaggacggagtggtggccagccagcctgctcgtgtagtggacgaacgggagcagatggccatcagtggcggcttcatccgcagggtaacaaatgatgcccgagaaaatgaaatggatgaaaacctagagcaggtgagcggcatcatcgggaacctccgtcacatggccctggatatgggcaatgagatcgatacacagaatcgccagatcgacaggatcatggagaaggctgattccaacaaaaccagaattgatgaggccaaccaacgtgcaacaaagatgctgggaagtggttaagtgtgcccacccgtgttctcctccaaatgctgtcgggcaagatagctccttcatgcttttctcatggtattatctagtaggtctgcacacataacacacatcagtccacccccattgtgaatgttgtcctgtgtcatctgtcagcttcccaacaatactttgtgtcttttgttctctcttggtctctttctttccaaaggttgtacatagtggtcatttggtggctctaactccttgattgtcaggctctgaatctctcaaaatgtgccgtctttggttcctcatggctgttatctgtctttatgatttcatgattagacaatgtggaattacataacaggcattgcactaaaagtgatgtgatttatgcatttatgcatgagaactaaatagatttttagattcctacttaaacaaaaactttccatgacagtagcatactgatgagacaacacacacacacacaaaacaacagcaacaacaacagaacaacaacaaagcatgctcagtattgagacactgtcaagattaagttataccagcaaaagtgcagtagtgtcacttttttcctgtcaatatatagagacttctaaatcataatcatccttttttaaaaaaaagaattttaaaaaagatggatttgacacactcaccatttaatcatttccagcaaaatatatgtttggctgaaattatgtcaaatggatgtaatatagggtttgtttgctgcttttgatggctacgttttggagagagcaatcttgctgtgaaacagtgtggatgtaaattttataaggctgactcttactaaccaccatttcccctgtggtttgttatcagtacaattctttgttgacccacaggtaccgaactcgagtcgtatcatgtcaactt

SEQ ID NO: 733086 - DNA, 1868 bp, Homo sapiens
agcggggccatctttgatgagggcagagctcacgttgcattgaagacgaaacctcggggaggtcaggcgctgtctttccttccctccctgctcggcggctccaccacagttgcaacctgcagaggcccggagaacacaaccctcccgagaagcccaggtccagagccaaacccgtcactgaccccccagcccaggcgcccagccactccccaccgctaccatggccgaagacgcagacatgcgcaatgagctggaggagatgcagcgaagggctgaccagttggctgatgagtcgctggaaagcacccgtcgtatgctgcaactggttgaagagagtaaagatgctggtatcaggactttggttatgttggatgaacaaggagaacaactggaacgcattgaggaagggatggaccaaatcaataaggacatgaaagaagcagaaaagaatttgacggacctaggaaaattctgcgggctttgtgtgtgtccctgtaacaagcttaaatcaagtgatgcttacaaaaaagcctggggcaataatcaggacggagtggtggccagccagcctgctcgtgtagtggacgaacgggagcagatggccatcagtggcggcttcatccgcagggtaacaaatgatgcccgagaaaatgaaatggatgaaaacctagagcaggtgagcggcatcatcgggaacctccgtcacatggccctggatatgggcaatgagatcgatacacagaatcgccagatcgacaggatcatggagaaggctgattccaacaaaaccagaattgatgaggccaaccaacgtgcaacaaagatgctgggaagtggttaagtgtgcccacccgtgttctcctccaaatgctgtcgggcaagatagctccttcatgcttttctcatggtattatctagtaggtctgcacacataacacacatcagtccacccccattgtgaatgttgtcctgtgtcatctgtcagcttcccaacaatactttgtgtcttttgttctctcttggtctctttctttccaaaggttgtacatagtggtcatttggtggctctaactccttgattgtcaggctctgaatctctcaaaatgtgccgtctttggttcctcatggctgttatctgtctttatgatttcatgattagacaatgtggaattacataacaggcattgcactaaaagtgatgtgatttatgcatttatgcatgagaactaaatagatttttagattcctacttaaacaaaaactttccatgacagtagcatactgatgagacaacacacacacacacaaaacaacagcaacaacaacagaacaacaacaaagcatgctcagtattgagacactgtcaagattaagttataccagcaaaagtgcagtagtgtcacttttttcctgtcaatatatagagacttctaaatcataatcatccttttttcaaaatatatgtttggctgaaattatgtcaaatggatgtaatatagggtttgtttgctgcttttgatggctacgttttggagagagcaatcttgctgtgaaacagtgtggatgtaaattttataaggctgactcttactaaccaccatttcccctgtggtttgttatcagtacaattctttgttgcttaatctagagctatgcacaccaaattgctgagatgtttagtagctgataaagaaaccttttaaaaaaataatataaatgaatgaaatataaactgtgagataaatatcattatagcatgtaatattaaattcctcctgtctcctctgtcagtttgtgaagtgattgacattttgtagctagtttaaaattattaaaaattatagactccagatgatctgctttaattt

SEQ ID NO: 733087 - DNA, 2022 bp, Homo sapiens
agcggggccatctttgatgagggcagagctcacgttgcattgaagacgaaacctcggggaggtcaggcgctgtctttccttccctccctgctcggcggctccaccacagttgcaacctgcagaggcccggagaacacaaccctcccgagaagcccaggtccagagccaaacccgtcactgaccccccagcccaggcgcccagccactccccaccgctaccatggccgaagacgcagacatgcgcaatgagctggaggagatgcagcgaagggctgaccagttggctgatgagtcgctggaaagcacccgtcgtatgctgcaactggttgaagagagtaaagatgctggtatcaggactttggttatgttggatgaacaaggagaacaactcgatcgtgtcgaagaaggcatgaaccatatcaaccaagacatgaaggaggctgagaaaaatttaaaagatttagggaaatgctgtggccttttcatatgtccttgtaacaagcttaaatcaagtgatgcttacaaaaaagcctggggcaataatcaggacggagtggtggccagccagcctgctcgtgtagtggacgaacgggagcagatggccatcagtggcggcttcatccgcagggtaacaaatgatgcccgagaaaatgaaatggatgaaaacctagagcaggtgagcggcatcatcgggaacctccgtcacatggccctggatatgggcaatgagatcgatacacagaatcgccagatcgacaggatcatggagaaggctgattccaacaaaaccagaattgatgaggccaaccaacgtgcaacaaagatgctgggaagtggttaagtgtgcccacccgtgttctcctccaaatgctgtcgggcaagatagctccttcatgcttttctcatggtattatctagtaggtctgcacacataacacacatcagtccacccccattgtgaatgttgtcctgtgtcatctgtcagcttcccaacaatactttgtgtcttttgttctctcttggtctctttctttccaaaggttgtacatagtggtcatttggtggctctaactccttgatgtcttgagtttcatttttcattttctctcctcggtggcatttgctgaataacaacaatttaggaatgctcaatgtgctgttgattctttcaatccacagtattgttcttgtaaaactgtgacattccacagagttactgccacggtcctttgagtgtcaggctctgaatctctcaaaatgtgccgtctttggttcctcatggctgttatctgtctttatgatttcatgattagacaatgtggaattacataacaggcattgcactaaaagtgatgtgatttatgcatttatgcatgagaactaaatagatttttagattcctacttaaacaaaaactttccatgacagtagcatactgatgagacaacacacacacacacaaaacaacagcaacaacaacagaacaacaacaaagcatgctcagtattgagacactgtcaagattaagttataccagcaaaagtgcagtagtgtcacttttttcctgtcaatatatagagacttctaaatcataatcatccttttttcaaaatatatgtttggctgaaattatgtcaaatggatgtaatatagggtttgtttgctgcttttgatggctacgttttggagagagcaatcttgctgtgaaacagtgtggatgtaaattttataaggctgactcttactaaccaccatttcccctgtggtttgttatcagtacaattctttgttgcttaatctagagctatgcacaccaaattgctgagatgtttagtagctgataaagaaaccttttaaaaaaataatataaatgaatgaaatataaactgtgagataaatatcattatagcatgtaatattaaattcctcctgtctcctctgtcagtttgtgaagtgattgacattttgtagctagtttaaaattattaaaaattatagactccagatgatctgctttaattt

SEQ ID NO: 733088 - DNA, 1926 bp, Homo sapiens
agcggggccatctttgatgagggcagagctcacgttgcattgaagacgaaacctcggggaggtcaggcgctgtctttccttccctccctgctcggcggctccaccacagttgcaacctgcagaggcccggagaacacaaccctcccgagaagcccaggtccagagccaaacccgtcactgaccccccagcccaggcgcccagccactccccaccgctaccatggccgaagacgcagacatgcgcaatgagctggaggagatgcagcgaagggctgaccagttggctgatgagtcgctggaaagcacccgtcgtatgctgcaactggttgaagagagtaaagatgctggtatcaggactttggttatgttggatgaacaaggagaacaactcgatcgtgtcgaagaaggcatgaaccatatcaaccaagacatgaaggaggctgagaaaaatttaaaagatttagggaaatgctgtggccttttcatatgtccttgtaacaagcttaaatcaagtgatgcttacaaaaaagcctggggcaataatcaggacggagtggtggccagccagcctgctcgtgtagtggacgaacgggagcagatggccatcagtggcggcttcatccgcagggtaacaaatgatgcccgagaaaatgaaatggatgaaaacctagagcaggtgagcggcatcatcgggaacctccgtcacatggccctggatatgggcaatgagatcgatacacagaatcgccagatcgacaggatcatggagaaggctgattccaacaaaaccagaattgatgaggccaaccaacgtgcaacaaagatgctgggaagtggttaagtgtgcccacccgtgttctcctccaaatgctgtcgggcaagatagctccttcatgcttttctcatggtattatctagtaggtctgcacacataacacacatcagtccacccccattgtgaatgttgtcctgtgtcatctgtcagcttcccaacaatactttgtgtcttttgttctctcttggtctctttctttccaaaggttgtacatagtggtcatttggtggctctaactccttgattgtcaggctctgaatctctcaaaatgtgccgtctttggttcctcatggctgttatctgtctttatgatttcatgattagacaatgtggaattacataacaggcattgcactaaaagtgatgtgatttatgcatttatgcatgagaactaaatagatttttagattcctacttaaacaaaaactttccatgacagtagcatactgatgagacaacacacacacacacaaaacaacagcaacaacaacagaacaacaacaaagcatgctcagtattgagacactgtcaagattaagttataccagcaaaagtgcagtagtgtcacttttttcctgtcaatatatagagacttctaaatcataatcatccttttttaaaaaaaagaattttaaaaaagatggatttgacacactcaccatttaatcatttccagcaaaatatatgtttggctgaaattatgtcaaatggatgtaatatagggtttgtttgctgcttttgatggctacgttttggagagagcaatcttgctgtgaaacagtgtggatgtaaattttataaggctgactcttactaaccaccatttcccctgtggtttgttatcagtacaattctttgttgcttaatctagagctatgcacaccaaattgctgagatgtttagtagctgataaagaaaccttttaaaaaaataatataaatgaatgaaatataaactgtgagataaatatcattatagcatgtaatattaaattcctcctgtctcctctgtcagtttgtgaagtgattgacattttgtagctagtttaaaattattaaaaattatagactccagatgatctgctttaattt

SEQ ID NO: 733089 - DNA, 1735 bp, Homo sapiens
agcggggccatctttgatgagggcagagctcacgttgcattgaagacgaaacctcggggaggtcaggcgctgtctttccttccctccctgctcggcggctccaccacagttgcaacctgcagaggcccggagaacacaaccctcccgagaagcccaggtccagagccaaacccgtcactgaccccccagcccaggcgcccagccactccccaccgctaccatggccgaagacgcagacatgcgcaatgagctggaggagatgcagcgaagggctgaccagttggctgatgagtcgctggaaagcacccgtcgtatgctgcaactggttgaagagagtaaagatgctggtatcaggactttggttatgttggatgaacaaggagaacaactcgatcgtgtcgaagaaggcatgaaccatatcaaccaagacatgaaggaggctgagaaaaatttaaaagatttagggaaatgctgtggccttttcatatgtccttgtaacaagcttaaatcaagtgatgcttacaaaaaagcctggggcaataatcaggacggagtggtggccagccagcctgctcgtgtagtggacgaacgggagcagatggccatcagtggcggcttcatccgcagggtaacaaatgatgcccgagaaaatgaaatggatgaaaacctagagcaggtgagcggcatcatcgggaacctccgtcacatggccctggatatgggcaatgagatcgatacacagaatcgccagatcgacaggatcatggagaaggctgattccaacaaaaccagaattgatgaggccaaccaacgtgcaacaaagatgctgggaagtggttaagtgtgcccacccgtgttctcctccaaatgctgtcgggcaagatagctccttcatgcttttctcatggtattatctagtaggtctgcacacataacacacatcagtccacccccattgtgaatgttgtcctgtgtcatctgtcagcttcccaacaatactttgtgtcttttgttctctcttggtctctttctttccaaaggttgtacatagtggtcatttggtggctctaactccttgattgtcaggctctgaatctctcaaaatgtgccgtctttggttcctcatggctgttatctgtctttatgatttcatgattagacaatgtggaattacataacaggcattgcactaaaagtgatgtgatttatgcatttatgcatgagaactaaatagatttttagattcctacttaaacaaaaactttccatgacagtagcatactgatgagacaacacacacacacacaaaacaacagcaacaacaacagaacaacaacaaagcatgctcagtattgagacactgtcaagattaagttataccagcaaaagtgcagtagtgtcacttttttcctgtcaatatatagagacttctaaatcataatcatccttttttaaaaaaaagaattttaaaaaagatggatttgacacactcaccatttaatcatttccagcaaaatatatgtttggctgaaattatgtcaaatggatgtaatatagggtttgtttgctgcttttgatggctacgttttggagagagcaatcttgctgtgaaacagtgtggatgtaaattttataaggctgactcttactaaccaccatttcccctgtggtttgttatcagtacaattctttgttgacccacaggtaccgaactcgagtcgtatcatgtcaactt

SEQ ID NO: 733090 - DNA, 1868 bp, Homo sapiens
agcggggccatctttgatgagggcagagctcacgttgcattgaagacgaaacctcggggaggtcaggcgctgtctttccttccctccctgctcggcggctccaccacagttgcaacctgcagaggcccggagaacacaaccctcccgagaagcccaggtccagagccaaacccgtcactgaccccccagcccaggcgcccagccactccccaccgctaccatggccgaagacgcagacatgcgcaatgagctggaggagatgcagcgaagggctgaccagttggctgatgagtcgctggaaagcacccgtcgtatgctgcaactggttgaagagagtaaagatgctggtatcaggactttggttatgttggatgaacaaggagaacaactcgatcgtgtcgaagaaggcatgaaccatatcaaccaagacatgaaggaggctgagaaaaatttaaaagatttagggaaatgctgtggccttttcatatgtccttgtaacaagcttaaatcaagtgatgcttacaaaaaagcctggggcaataatcaggacggagtggtggccagccagcctgctcgtgtagtggacgaacgggagcagatggccatcagtggcggcttcatccgcagggtaacaaatgatgcccgagaaaatgaaatggatgaaaacctagagcaggtgagcggcatcatcgggaacctccgtcacatggccctggatatgggcaatgagatcgatacacagaatcgccagatcgacaggatcatggagaaggctgattccaacaaaaccagaattgatgaggccaaccaacgtgcaacaaagatgctgggaagtggttaagtgtgcccacccgtgttctcctccaaatgctgtcgggcaagatagctccttcatgcttttctcatggtattatctagtaggtctgcacacataacacacatcagtccacccccattgtgaatgttgtcctgtgtcatctgtcagcttcccaacaatactttgtgtcttttgttctctcttggtctctttctttccaaaggttgtacatagtggtcatttggtggctctaactccttgattgtcaggctctgaatctctcaaaatgtgccgtctttggttcctcatggctgttatctgtctttatgatttcatgattagacaatgtggaattacataacaggcattgcactaaaagtgatgtgatttatgcatttatgcatgagaactaaatagatttttagattcctacttaaacaaaaactttccatgacagtagcatactgatgagacaacacacacacacacaaaacaacagcaacaacaacagaacaacaacaaagcatgctcagtattgagacactgtcaagattaagttataccagcaaaagtgcagtagtgtcacttttttcctgtcaatatatagagacttctaaatcataatcatccttttttcaaaatatatgtttggctgaaattatgtcaaatggatgtaatatagggtttgtttgctgcttttgatggctacgttttggagagagcaatcttgctgtgaaacagtgtggatgtaaattttataaggctgactcttactaaccaccatttcccctgtggtttgttatcagtacaattctttgttgcttaatctagagctatgcacaccaaattgctgagatgtttagtagctgataaagaaaccttttaaaaaaataatataaatgaatgaaatataaactgtgagataaatatcattatagcatgtaatattaaattcctcctgtctcctctgtcagtttgtgaagtgattgacattttgtagctagtttaaaattattaaaaattatagactccagatgatctgctttaattt

SEQ ID NO: 733091 - DNA, 674 bp, Homo sapiens
agcggggccatctttgatgagggcagagctcacgttgcattgaagacgaaacctcggggaggtcaggcgctgtctttccttccctccctgctcggcggctccaccacagttgcaacctgcagaggcccggagaacacaaccctcccgagaagcccaggtccagagccaaacccgtcactgaccccccagcccaggcgcccagccactccccaccgctaccatggccgaagacgcagacatgcgcaatgagctggaggagatgcagcgaagggctgaccagttggctgatgagtcgctggaaagcacccgtcgtatgctgcaactggttgaagaggtaagaagtgacagtattttaagataaaggaacaaatcccttatgctgatacatcctttcctagttgctatgatgtttccttgggccatgatcccctagattccagtgtggatgtagcctatcagaaaggcacagaatgagggagatgctgtatttaagttgccagatagccatgaagacaccttcaccctccttcccagcccaagccacctctgtagtctggtctgggaagcagagaataatagaatttccaagtctgtgctctcaagaaatcacagacgattgtatcactttaagcaaattagagcaattcttaatatacaaaggaattatctacata

SEQ ID NO: 733092 - DNA, 1629 bp, Homo sapiens
  misc_feature (11)..(11): n is a, c, g, or t
atcagctcggnccaagttagtgggacgcaataaggacatgaaagaagcagaaaagaatttgacggacctaggaaaattctgcgggctttgtgtgtgtccctgtaacaagcttaaatcaagtgatgcttacaaaaaagcctggggcaataatcaggacggagtggtggccagccagcctgctcgtgtagtggacgaacgggagcagatggccatcagtggcggcttcatccgcagggtaacaaatgatgcccgagaaaatgaaatggatgaaaacctagagcaggtgagcggcatcatcgggaacctccgtcacatggccctggatatgggcaatgagatcgatacacagaatcgccagatcgacaggatcatggagaaggctgattccaacaaaaccagaattgatgaggccaaccaacgtgcaacaaagatgctgggaagtggttaagtgtgcccacccgtgttctcctccaaatgctgtcgggcaagatagctccttcatgcttttctcatggtattatctagtaggtctgcacacataacacacatcagtccacccccattgtgaatgttgtcctgtgtcatctgtcagcttcccaacaatactttgtgtcttttgttctctcttggtctctttctttccaaaggttgtacatagtggtcatttggtggctctaactccttgatgtcttgagtttcatttttcattttctctcctcggtggcatttgctgaataacaacaatttaggaatgctcaatgtgctgttgattctttcaatccacagtattgttcttgtaaaactgtgacattccacagagttactgccacggtcctttgagtgtcaggctctgaatctctcaaaatgtgccgtctttggttcctcatggctgttatctgtctttatgatttcatgattagacaatgtggaattacataacaggcattgcactaaaagtgatgtgatttatgcatttatgcatgagaactaaatagatttttagattcctacttaaacaaaaactttccatgacagtagcatactgatgagacaacacacacacacacaaaacaacagcaacaacaacagaacaacaacaaagcatgctcagtattgagacactgtcaagattaagttataccagcaaaagtgcagtagtgtcacttttttcctgtcaatatatagagacttctaaatcataatcatccttttttcaaaatatatgtttggctgaaattatgtcaaatggatgtaatatagggtttgtttgctgcttttgatggctacgttttggagagagcaatcttgctgtgaaacagtgtggatgtaaattttataaggctgactcttactaaccaccatttcccctgtggtttgttatcagtacaattctttgttgcttaatctagagctatgcacaccaaattgctgagatgtttagtagctgataaagaaaccttttaaaaaaataatataaatgaatgaaatataaactgtgagataaatatcattatagcatgtaatattaaattcctcctgtctcctctgtcagtttgtgaagtgattgacattttgtagctagtttaaaattattaaaaattatagactccagatgatctgctttaattt

SEQ ID NO: 733093 - DNA, 1533 bp, Homo sapiens
  misc_feature (11)..(11): n is a, c, g, or t
atcagctcggnccaagttagtgggacgcaataaggacatgaaagaagcagaaaagaatttgacggacctaggaaaattctgcgggctttgtgtgtgtccctgtaacaagcttaaatcaagtgatgcttacaaaaaagcctggggcaataatcaggacggagtggtggccagccagcctgctcgtgtagtggacgaacgggagcagatggccatcagtggcggcttcatccgcagggtaacaaatgatgcccgagaaaatgaaatggatgaaaacctagagcaggtgagcggcatcatcgggaacctccgtcacatggccctggatatgggcaatgagatcgatacacagaatcgccagatcgacaggatcatggagaaggctgattccaacaaaaccagaattgatgaggccaaccaacgtgcaacaaagatgctgggaagtggttaagtgtgcccacccgtgttctcctccaaatgctgtcgggcaagatagctccttcatgcttttctcatggtattatctagtaggtctgcacacataacacacatcagtccacccccattgtgaatgttgtcctgtgtcatctgtcagcttcccaacaatactttgtgtcttttgttctctcttggtctctttctttccaaaggttgtacatagtggtcatttggtggctctaactccttgattgtcaggctctgaatctctcaaaatgtgccgtctttggttcctcatggctgttatctgtctttatgatttcatgattagacaatgtggaattacataacaggcattgcactaaaagtgatgtgatttatgcatttatgcatgagaactaaatagatttttagattcctacttaaacaaaaactttccatgacagtagcatactgatgagacaacacacacacacacaaaacaacagcaacaacaacagaacaacaacaaagcatgctcagtattgagacactgtcaagattaagttataccagcaaaagtgcagtagtgtcacttttttcctgtcaatatatagagacttctaaatcataatcatccttttttaaaaaaaagaattttaaaaaagatggatttgacacactcaccatttaatcatttccagcaaaatatatgtttggctgaaattatgtcaaatggatgtaatatagggtttgtttgctgcttttgatggctacgttttggagagagcaatcttgctgtgaaacagtgtggatgtaaattttataaggctgactcttactaaccaccatttcccctgtggtttgttatcagtacaattctttgttgcttaatctagagctatgcacaccaaattgctgagatgtttagtagctgataaagaaaccttttaaaaaaataatataaatgaatgaaatataaactgtgagataaatatcattatagcatgtaatattaaattcctcctgtctcctctgtcagtttgtgaagtgattgacattttgtagctagtttaaaattattaaaaattatagactccagatgatctgctttaattt

SEQ ID NO: 733094 - DNA, 1342 bp, Homo sapiens
  misc_feature (11)..(11): n is a, c, g, or t
atcagctcggnccaagttagtgggacgcaataaggacatgaaagaagcagaaaagaatttgacggacctaggaaaattctgcgggctttgtgtgtgtccctgtaacaagcttaaatcaagtgatgcttacaaaaaagcctggggcaataatcaggacggagtggtggccagccagcctgctcgtgtagtggacgaacgggagcagatggccatcagtggcggcttcatccgcagggtaacaaatgatgcccgagaaaatgaaatggatgaaaacctagagcaggtgagcggcatcatcgggaacctccgtcacatggccctggatatgggcaatgagatcgatacacagaatcgccagatcgacaggatcatggagaaggctgattccaacaaaaccagaattgatgaggccaaccaacgtgcaacaaagatgctgggaagtggttaagtgtgcccacccgtgttctcctccaaatgctgtcgggcaagatagctccttcatgcttttctcatggtattatctagtaggtctgcacacataacacacatcagtccacccccattgtgaatgttgtcctgtgtcatctgtcagcttcccaacaatactttgtgtcttttgttctctcttggtctctttctttccaaaggttgtacatagtggtcatttggtggctctaactccttgattgtcaggctctgaatctctcaaaatgtgccgtctttggttcctcatggctgttatctgtctttatgatttcatgattagacaatgtggaattacataacaggcattgcactaaaagtgatgtgatttatgcatttatgcatgagaactaaatagatttttagattcctacttaaacaaaaactttccatgacagtagcatactgatgagacaacacacacacacacaaaacaacagcaacaacaacagaacaacaacaaagcatgctcagtattgagacactgtcaagattaagttataccagcaaaagtgcagtagtgtcacttttttcctgtcaatatatagagacttctaaatcataatcatccttttttaaaaaaaagaattttaaaaaagatggatttgacacactcaccatttaatcatttccagcaaaatatatgtttggctgaaattatgtcaaatggatgtaatatagggtttgtttgctgcttttgatggctacgttttggagagagcaatcttgctgtgaaacagtgtggatgtaaattttataaggctgactcttactaaccaccatttcccctgtggtttgttatcagtacaattctttgttgacccacaggtaccgaactcgagtcgtatcatgtcaactt

SEQ ID NO: 733095 - DNA, 1475 bp, Homo sapiens
  misc_feature (11)..(11): n is a, c, g, or t
atcagctcggnccaagttagtgggacgcaataaggacatgaaagaagcagaaaagaatttgacggacctaggaaaattctgcgggctttgtgtgtgtccctgtaacaagcttaaatcaagtgatgcttacaaaaaagcctggggcaataatcaggacggagtggtggccagccagcctgctcgtgtagtggacgaacgggagcagatggccatcagtggcggcttcatccgcagggtaacaaatgatgcccgagaaaatgaaatggatgaaaacctagagcaggtgagcggcatcatcgggaacctccgtcacatggccctggatatgggcaatgagatcgatacacagaatcgccagatcgacaggatcatggagaaggctgattccaacaaaaccagaattgatgaggccaaccaacgtgcaacaaagatgctgggaagtggttaagtgtgcccacccgtgttctcctccaaatgctgtcgggcaagatagctccttcatgcttttctcatggtattatctagtaggtctgcacacataacacacatcagtccacccccattgtgaatgttgtcctgtgtcatctgtcagcttcccaacaatactttgtgtcttttgttctctcttggtctctttctttccaaaggttgtacatagtggtcatttggtggctctaactccttgattgtcaggctctgaatctctcaaaatgtgccgtctttggttcctcatggctgttatctgtctttatgatttcatgattagacaatgtggaattacataacaggcattgcactaaaagtgatgtgatttatgcatttatgcatgagaactaaatagatttttagattcctacttaaacaaaaactttccatgacagtagcatactgatgagacaacacacacacacacaaaacaacagcaacaacaacagaacaacaacaaagcatgctcagtattgagacactgtcaagattaagttataccagcaaaagtgcagtagtgtcacttttttcctgtcaatatatagagacttctaaatcataatcatccttttttcaaaatatatgtttggctgaaattatgtcaaatggatgtaatatagggtttgtttgctgcttttgatggctacgttttggagagagcaatcttgctgtgaaacagtgtggatgtaaattttataaggctgactcttactaaccaccatttcccctgtggtttgttatcagtacaattctttgttgcttaatctagagctatgcacaccaaattgctgagatgtttagtagctgataaagaaaccttttaaaaaaataatataaatgaatgaaatataaactgtgagataaatatcattatagcatgtaatattaaattcctcctgtctcctctgtcagtttgtgaagtgattgacattttgtagctagtttaaaattattaaaaattatagactccagatgatctgctttaattt

SEQ ID NO: 733096 - DNA, 2039 bp, Homo sapiens
cggtattccgtgtgtgcacgtctggtgggggctttataaagtgttttcgaggtgagctgctggggaaaagggaaacgggagccctgcaaatggagcgacggggaggaagagcgagggtccagagccaaacccgtcactgaccccccagcccaggcgcccagccactccccaccgctaccatggccgaagacgcagacatgcgcaatgagctggaggagatgcagcgaagggctgaccagttggctgatgagtcgctggaaagcacccgtcgtatgctgcaactggttgaagagagtaaagatgctggtatcaggactttggttatgttggatgaacaaggagaacaactcgatcgtgtcgaagaaggcatgaaccatatcaaccaagacatgaaggaggctgagaaaaatttaaaagatttagggaaatgctgtggccttttcatatgtccttgtaacaagcttaaatcaagtgatgcttacaaaaaagcctggggcaataatcaggacggagtggtggccagccagcctgctcgtgtagtggacgaacgggagcagatggccatcagtggcggcttcatccgcagggtaacaaatgatgcccgagaaaatgaaatggatgaaaacctagagcaggtgagcggcatcatcgggaacctccgtcacatggccctggatatgggcaatgagatcgatacacagaatcgccagatcgacaggatcatggagaaggctgattccaacaaaaccagaattgatgaggccaaccaacgtgcaacaaagatgctgggaagtggttaagtgtgcccacccgtgttctcctccaaatgctgtcgggcaagatagctccttcatgcttttctcatggtattatctagtaggtctgcacacataacacacatcagtccacccccattgtgaatgttgtcctgtgtcatctgtcagcttcccaacaatactttgtgtcttttgttctctcttggtctctttctttccaaaggttgtacatagtggtcatttggtggctctaactccttgatgtcttgagtttcatttttcattttctctcctcggtggcatttgctgaataacaacaatttaggaatgctcaatgtgctgttgattctttcaatccacagtattgttcttgtaaaactgtgacattccacagagttactgccacggtcctttgagtgtcaggctctgaatctctcaaaatgtgccgtctttggttcctcatggctgttatctgtctttatgatttcatgattagacaatgtggaattacataacaggcattgcactaaaagtgatgtgatttatgcatttatgcatgagaactaaatagatttttagattcctacttaaacaaaaactttccatgacagtagcatactgatgagacaacacacacacacacaaaacaacagcaacaacaacagaacaacaacaaagcatgctcagtattgagacactgtcaagattaagttataccagcaaaagtgcagtagtgtcacttttttcctgtcaatatatagagacttctaaatcataatcatccttttttaaaaaaaagaattttaaaaaagatggatttgacacactcaccatttaatcatttccagcaaaatatatgtttggctgaaattatgtcaaatggatgtaatatagggtttgtttgctgcttttgatggctacgttttggagagagcaatcttgctgtgaaacagtgtggatgtaaattttataaggctgactcttactaaccaccatttcccctgtggtttgttatcagtacaattctttgttgcttaatctagagctatgcacaccaaattgctgagatgtttagtagctgataaagaaaccttttaaaaaaataatataaatgaatgaaatataaactgtgagataaatatcattatagcatgtaatattaaattcctcctgtctcctctgtcagtttgtgaagtgattgacattttgtagctagtttaaaattattaaaaattatagactccagatgatctgctttaattt

SEQ ID NO: 733097 - DNA, 1848 bp, Homo sapiens
cggtattccgtgtgtgcacgtctggtgggggctttataaagtgttttcgaggtgagctgctggggaaaagggaaacgggagccctgcaaatggagcgacggggaggaagagcgagggtccagagccaaacccgtcactgaccccccagcccaggcgcccagccactccccaccgctaccatggccgaagacgcagacatgcgcaatgagctggaggagatgcagcgaagggctgaccagttggctgatgagtcgctggaaagcacccgtcgtatgctgcaactggttgaagagagtaaagatgctggtatcaggactttggttatgttggatgaacaaggagaacaactcgatcgtgtcgaagaaggcatgaaccatatcaaccaagacatgaaggaggctgagaaaaatttaaaagatttagggaaatgctgtggccttttcatatgtccttgtaacaagcttaaatcaagtgatgcttacaaaaaagcctggggcaataatcaggacggagtggtggccagccagcctgctcgtgtagtggacgaacgggagcagatggccatcagtggcggcttcatccgcagggtaacaaatgatgcccgagaaaatgaaatggatgaaaacctagagcaggtgagcggcatcatcgggaacctccgtcacatggccctggatatgggcaatgagatcgatacacagaatcgccagatcgacaggatcatggagaaggctgattccaacaaaaccagaattgatgaggccaaccaacgtgcaacaaagatgctgggaagtggttaagtgtgcccacccgtgttctcctccaaatgctgtcgggcaagatagctccttcatgcttttctcatggtattatctagtaggtctgcacacataacacacatcagtccacccccattgtgaatgttgtcctgtgtcatctgtcagcttcccaacaatactttgtgtcttttgttctctcttggtctctttctttccaaaggttgtacatagtggtcatttggtggctctaactccttgatgtcttgagtttcatttttcattttctctcctcggtggcatttgctgaataacaacaatttaggaatgctcaatgtgctgttgattctttcaatccacagtattgttcttgtaaaactgtgacattccacagagttactgccacggtcctttgagtgtcaggctctgaatctctcaaaatgtgccgtctttggttcctcatggctgttatctgtctttatgatttcatgattagacaatgtggaattacataacaggcattgcactaaaagtgatgtgatttatgcatttatgcatgagaactaaatagatttttagattcctacttaaacaaaaactttccatgacagtagcatactgatgagacaacacacacacacacaaaacaacagcaacaacaacagaacaacaacaaagcatgctcagtattgagacactgtcaagattaagttataccagcaaaagtgcagtagtgtcacttttttcctgtcaatatatagagacttctaaatcataatcatccttttttaaaaaaaagaattttaaaaaagatggatttgacacactcaccatttaatcatttccagcaaaatatatgtttggctgaaattatgtcaaatggatgtaatatagggtttgtttgctgcttttgatggctacgttttggagagagcaatcttgctgtgaaacagtgtggatgtaaattttataaggctgactcttactaaccaccatttcccctgtggtttgttatcagtacaattctttgttgacccacaggtaccgaactcgagtcgtatcatgtcaactt

SEQ ID NO: 733098 - DNA, 1981 bp, Homo sapiens
cggtattccgtgtgtgcacgtctggtgggggctttataaagtgttttcgaggtgagctgctggggaaaagggaaacgggagccctgcaaatggagcgacggggaggaagagcgagggtccagagccaaacccgtcactgaccccccagcccaggcgcccagccactccccaccgctaccatggccgaagacgcagacatgcgcaatgagctggaggagatgcagcgaagggctgaccagttggctgatgagtcgctggaaagcacccgtcgtatgctgcaactggttgaagagagtaaagatgctggtatcaggactttggttatgttggatgaacaaggagaacaactcgatcgtgtcgaagaaggcatgaaccatatcaaccaagacatgaaggaggctgagaaaaatttaaaagatttagggaaatgctgtggccttttcatatgtccttgtaacaagcttaaatcaagtgatgcttacaaaaaagcctggggcaataatcaggacggagtggtggccagccagcctgctcgtgtagtggacgaacgggagcagatggccatcagtggcggcttcatccgcagggtaacaaatgatgcccgagaaaatgaaatggatgaaaacctagagcaggtgagcggcatcatcgggaacctccgtcacatggccctggatatgggcaatgagatcgatacacagaatcgccagatcgacaggatcatggagaaggctgattccaacaaaaccagaattgatgaggccaaccaacgtgcaacaaagatgctgggaagtggttaagtgtgcccacccgtgttctcctccaaatgctgtcgggcaagatagctccttcatgcttttctcatggtattatctagtaggtctgcacacataacacacatcagtccacccccattgtgaatgttgtcctgtgtcatctgtcagcttcccaacaatactttgtgtcttttgttctctcttggtctctttctttccaaaggttgtacatagtggtcatttggtggctctaactccttgatgtcttgagtttcatttttcattttctctcctcggtggcatttgctgaataacaacaatttaggaatgctcaatgtgctgttgattctttcaatccacagtattgttcttgtaaaactgtgacattccacagagttactgccacggtcctttgagtgtcaggctctgaatctctcaaaatgtgccgtctttggttcctcatggctgttatctgtctttatgatttcatgattagacaatgtggaattacataacaggcattgcactaaaagtgatgtgatttatgcatttatgcatgagaactaaatagatttttagattcctacttaaacaaaaactttccatgacagtagcatactgatgagacaacacacacacacacaaaacaacagcaacaacaacagaacaacaacaaagcatgctcagtattgagacactgtcaagattaagttataccagcaaaagtgcagtagtgtcacttttttcctgtcaatatatagagacttctaaatcataatcatccttttttcaaaatatatgtttggctgaaattatgtcaaatggatgtaatatagggtttgtttgctgcttttgatggctacgttttggagagagcaatcttgctgtgaaacagtgtggatgtaaattttataaggctgactcttactaaccaccatttcccctgtggtttgttatcagtacaattctttgttgcttaatctagagctatgcacaccaaattgctgagatgtttagtagctgataaagaaaccttttaaaaaaataatataaatgaatgaaatataaactgtgagataaatatcattatagcatgtaatattaaattcctcctgtctcctctgtcagtttgtgaagtgattgacattttgtagctagtttaaaattattaaaaattatagactccagatgatctgctttaattt

SEQ ID NO: 733099 - DNA, 1885 bp, Homo sapiens
cggtattccgtgtgtgcacgtctggtgggggctttataaagtgttttcgaggtgagctgctggggaaaagggaaacgggagccctgcaaatggagcgacggggaggaagagcgagggtccagagccaaacccgtcactgaccccccagcccaggcgcccagccactccccaccgctaccatggccgaagacgcagacatgcgcaatgagctggaggagatgcagcgaagggctgaccagttggctgatgagtcgctggaaagcacccgtcgtatgctgcaactggttgaagagagtaaagatgctggtatcaggactttggttatgttggatgaacaaggagaacaactcgatcgtgtcgaagaaggcatgaaccatatcaaccaagacatgaaggaggctgagaaaaatttaaaagatttagggaaatgctgtggccttttcatatgtccttgtaacaagcttaaatcaagtgatgcttacaaaaaagcctggggcaataatcaggacggagtggtggccagccagcctgctcgtgtagtggacgaacgggagcagatggccatcagtggcggcttcatccgcagggtaacaaatgatgcccgagaaaatgaaatggatgaaaacctagagcaggtgagcggcatcatcgggaacctccgtcacatggccctggatatgggcaatgagatcgatacacagaatcgccagatcgacaggatcatggagaaggctgattccaacaaaaccagaattgatgaggccaaccaacgtgcaacaaagatgctgggaagtggttaagtgtgcccacccgtgttctcctccaaatgctgtcgggcaagatagctccttcatgcttttctcatggtattatctagtaggtctgcacacataacacacatcagtccacccccattgtgaatgttgtcctgtgtcatctgtcagcttcccaacaatactttgtgtcttttgttctctcttggtctctttctttccaaaggttgtacatagtggtcatttggtggctctaactccttgattgtcaggctctgaatctctcaaaatgtgccgtctttggttcctcatggctgttatctgtctttatgatttcatgattagacaatgtggaattacataacaggcattgcactaaaagtgatgtgatttatgcatttatgcatgagaactaaatagatttttagattcctacttaaacaaaaactttccatgacagtagcatactgatgagacaacacacacacacacaaaacaacagcaacaacaacagaacaacaacaaagcatgctcagtattgagacactgtcaagattaagttataccagcaaaagtgcagtagtgtcacttttttcctgtcaatatatagagacttctaaatcataatcatccttttttaaaaaaaagaattttaaaaaagatggatttgacacactcaccatttaatcatttccagcaaaatatatgtttggctgaaattatgtcaaatggatgtaatatagggtttgtttgctgcttttgatggctacgttttggagagagcaatcttgctgtgaaacagtgtggatgtaaattttataaggctgactcttactaaccaccatttcccctgtggtttgttatcagtacaattctttgttgcttaatctagagctatgcacaccaaattgctgagatgtttagtagctgataaagaaaccttttaaaaaaataatataaatgaatgaaatataaactgtgagataaatatcattatagcatgtaatattaaattcctcctgtctcctctgtcagtttgtgaagtgattgacattttgtagctagtttaaaattattaaaaattatagactccagatgatctgctttaattt

SEQ ID NO: 733100 - DNA, 1694 bp, Homo sapiens
cggtattccgtgtgtgcacgtctggtgggggctttataaagtgttttcgaggtgagctgctggggaaaagggaaacgggagccctgcaaatggagcgacggggaggaagagcgagggtccagagccaaacccgtcactgaccccccagcccaggcgcccagccactccccaccgctaccatggccgaagacgcagacatgcgcaatgagctggaggagatgcagcgaagggctgaccagttggctgatgagtcgctggaaagcacccgtcgtatgctgcaactggttgaagagagtaaagatgctggtatcaggactttggttatgttggatgaacaaggagaacaactcgatcgtgtcgaagaaggcatgaaccatatcaaccaagacatgaaggaggctgagaaaaatttaaaagatttagggaaatgctgtggccttttcatatgtccttgtaacaagcttaaatcaagtgatgcttacaaaaaagcctggggcaataatcaggacggagtggtggccagccagcctgctcgtgtagtggacgaacgggagcagatggccatcagtggcggcttcatccgcagggtaacaaatgatgcccgagaaaatgaaatggatgaaaacctagagcaggtgagcggcatcatcgggaacctccgtcacatggccctggatatgggcaatgagatcgatacacagaatcgccagatcgacaggatcatggagaaggctgattccaacaaaaccagaattgatgaggccaaccaacgtgcaacaaagatgctgggaagtggttaagtgtgcccacccgtgttctcctccaaatgctgtcgggcaagatagctccttcatgcttttctcatggtattatctagtaggtctgcacacataacacacatcagtccacccccattgtgaatgttgtcctgtgtcatctgtcagcttcccaacaatactttgtgtcttttgttctctcttggtctctttctttccaaaggttgtacatagtggtcatttggtggctctaactccttgattgtcaggctctgaatctctcaaaatgtgccgtctttggttcctcatggctgttatctgtctttatgatttcatgattagacaatgtggaattacataacaggcattgcactaaaagtgatgtgatttatgcatttatgcatgagaactaaatagatttttagattcctacttaaacaaaaactttccatgacagtagcatactgatgagacaacacacacacacacaaaacaacagcaacaacaacagaacaacaacaaagcatgctcagtattgagacactgtcaagattaagttataccagcaaaagtgcagtagtgtcacttttttcctgtcaatatatagagacttctaaatcataatcatccttttttaaaaaaaagaattttaaaaaagatggatttgacacactcaccatttaatcatttccagcaaaatatatgtttggctgaaattatgtcaaatggatgtaatatagggtttgtttgctgcttttgatggctacgttttggagagagcaatcttgctgtgaaacagtgtggatgtaaattttataaggctgactcttactaaccaccatttcccctgtggtttgttatcagtacaattctttgttgacccacaggtaccgaactcgagtcgtatcatgtcaactt

SEQ ID NO: 733101 - DNA, 1827 bp, Homo sapiens
cggtattccgtgtgtgcacgtctggtgggggctttataaagtgttttcgaggtgagctgctggggaaaagggaaacgggagccctgcaaatggagcgacggggaggaagagcgagggtccagagccaaacccgtcactgaccccccagcccaggcgcccagccactccccaccgctaccatggccgaagacgcagacatgcgcaatgagctggaggagatgcagcgaagggctgaccagttggctgatgagtcgctggaaagcacccgtcgtatgctgcaactggttgaagagagtaaagatgctggtatcaggactttggttatgttggatgaacaaggagaacaactcgatcgtgtcgaagaaggcatgaaccatatcaaccaagacatgaaggaggctgagaaaaatttaaaagatttagggaaatgctgtggccttttcatatgtccttgtaacaagcttaaatcaagtgatgcttacaaaaaagcctggggcaataatcaggacggagtggtggccagccagcctgctcgtgtagtggacgaacgggagcagatggccatcagtggcggcttcatccgcagggtaacaaatgatgcccgagaaaatgaaatggatgaaaacctagagcaggtgagcggcatcatcgggaacctccgtcacatggccctggatatgggcaatgagatcgatacacagaatcgccagatcgacaggatcatggagaaggctgattccaacaaaaccagaattgatgaggccaaccaacgtgcaacaaagatgctgggaagtggttaagtgtgcccacccgtgttctcctccaaatgctgtcgggcaagatagctccttcatgcttttctcatggtattatctagtaggtctgcacacataacacacatcagtccacccccattgtgaatgttgtcctgtgtcatctgtcagcttcccaacaatactttgtgtcttttgttctctcttggtctctttctttccaaaggttgtacatagtggtcatttggtggctctaactccttgattgtcaggctctgaatctctcaaaatgtgccgtctttggttcctcatggctgttatctgtctttatgatttcatgattagacaatgtggaattacataacaggcattgcactaaaagtgatgtgatttatgcatttatgcatgagaactaaatagatttttagattcctacttaaacaaaaactttccatgacagtagcatactgatgagacaacacacacacacacaaaacaacagcaacaacaacagaacaacaacaaagcatgctcagtattgagacactgtcaagattaagttataccagcaaaagtgcagtagtgtcacttttttcctgtcaatatatagagacttctaaatcataatcatccttttttcaaaatatatgtttggctgaaattatgtcaaatggatgtaatatagggtttgtttgctgcttttgatggctacgttttggagagagcaatcttgctgtgaaacagtgtggatgtaaattttataaggctgactcttactaaccaccatttcccctgtggtttgttatcagtacaattctttgttgcttaatctagagctatgcacaccaaattgctgagatgtttagtagctgataaagaaaccttttaaaaaaataatataaatgaatgaaatataaactgtgagataaatatcattatagcatgtaatattaaattcctcctgtctcctctgtcagtttgtgaagtgattgacattttgtagctagtttaaaattattaaaaattatagactccagatgatctgctttaattt

SEQ ID NO: 733102 - DNA, 2378 bp, Homo sapiens
gagaatggtcaacttctggagtagtttggcttaaatgagaatgcttcactttctactcatgcctgtagctggtgcatgaagaagacgtagaggggtttccctttttggtgctagatggcttgttctctcttctcttttcctgcattcatttcactatgcttcttttactttttgtctctgtggacaaaggtttgtacatcaactctggatgtatggtgactgtttggaagtaccgatatattatctaattcaaatcactctagaggcaatgcaaagaccatcactcttggccaaccaccaatcctttatgtccttcatggagctttggaaatgttagttccacacgtgttgggatgttttcttgatgacagtgtgttgctgtggtgtgatgtgcacactctacttggcagtcttgttttgtgtctgtctgccagtatgtttttctctgttttatgtctccaaatataatcacatcactaaaatagaattaaatgtcctccagctaccttaatccttgtccaaaatccaaactaaaccacaaaacaaaccaaaacaagaacaaccttgtgggcaaagattgcagtccattgcaatggattcgattggaagtgaaatgttgagtagctgaggcatggtggtggccaactgtttgggtctggattatgatatatcggtattatctaatgcctcgacttaaaactcattcgcttggttcgattcttcgcttgaagaagtgacaattgttgagagcttgctcctccacccctgtgccttgtcactcaccctctcttttgcataggcttaaatcaagtgatgcttacaaaaaagcctggggcaataatcaggacggagtggtggccagccagcctgctcgtgtagtggacgaacgggagcagatggccatcagtggcggcttcatccgcagggtaacaaatgatgcccgagaaaatgaaatggatgaaaacctagagcaggtgagcggcatcatcgggaacctccgtcacatggccctggatatgggcaatgagatcgatacacagaatcgccagatcgacaggatcatggagaaggctgattccaacaaaaccagaattgatgaggccaaccaacgtgcaacaaagatgctgggaagtggttaagtgtgcccacccgtgttctcctccaaatgctgtcgggcaagatagctccttcatgcttttctcatggtattatctagtaggtctgcacacataacacacatcagtccacccccattgtgaatgttgtcctgtgtcatctgtcagcttcccaacaatactttgtgtcttttgttctctcttggtctctttctttccaaaggttgtacatagtggtcatttggtggctctaactccttgatgtcttgagtttcatttttcattttctctcctcggtggcatttgctgaataacaacaatttaggaatgctcaatgtgctgttgattctttcaatccacagtattgttcttgtaaaactgtgacattccacagagttactgccacggtcctttgagtgtcaggctctgaatctctcaaaatgtgccgtctttggttcctcatggctgttatctgtctttatgatttcatgattagacaatgtggaattacataacaggcattgcactaaaagtgatgtgatttatgcatttatgcatgagaactaaatagatttttagattcctacttaaacaaaaactttccatgacagtagcatactgatgagacaacacacacacacacaaaacaacagcaacaacaacagaacaacaacaaagcatgctcagtattgagacactgtcaagattaagttataccagcaaaagtgcagtagtgtcacttttttcctgtcaatatatagagacttctaaatcataatcatccttttttaaaaaaaagaattttaaaaaagatggatttgacacactcaccatttaatcatttccagcaaaatatatgtttggctgaaattatgtcaaatggatgtaatatagggtttgtttgctgcttttgatggctacgttttggagagagcaatcttgctgtgaaacagtgtggatgtaaattttataaggctgactcttactaaccaccatttcccctgtggtttgttatcagtacaattctttgttgcttaatctagagctatgcacaccaaattgctgagatgtttagtagctgataaagaaaccttttaaaaaaataatataaatgaatgaaatataaactgtgagataaatatcattatagcatgtaatattaaattcctcctgtctcctctgtcagtttgtgaagtgattgacattttgtagctagtttaaaattattaaaaattatagactccagatgatctgctttaattt

SEQ ID NO: 733103 - DNA, 2187 bp, Homo sapiens
gagaatggtcaacttctggagtagtttggcttaaatgagaatgcttcactttctactcatgcctgtagctggtgcatgaagaagacgtagaggggtttccctttttggtgctagatggcttgttctctcttctcttttcctgcattcatttcactatgcttcttttactttttgtctctgtggacaaaggtttgtacatcaactctggatgtatggtgactgtttggaagtaccgatatattatctaattcaaatcactctagaggcaatgcaaagaccatcactcttggccaaccaccaatcctttatgtccttcatggagctttggaaatgttagttccacacgtgttgggatgttttcttgatgacagtgtgttgctgtggtgtgatgtgcacactctacttggcagtcttgttttgtgtctgtctgccagtatgtttttctctgttttatgtctccaaatataatcacatcactaaaatagaattaaatgtcctccagctaccttaatccttgtccaaaatccaaactaaaccacaaaacaaaccaaaacaagaacaaccttgtgggcaaagattgcagtccattgcaatggattcgattggaagtgaaatgttgagtagctgaggcatggtggtggccaactgtttgggtctggattatgatatatcggtattatctaatgcctcgacttaaaactcattcgcttggttcgattcttcgcttgaagaagtgacaattgttgagagcttgctcctccacccctgtgccttgtcactcaccctctcttttgcataggcttaaatcaagtgatgcttacaaaaaagcctggggcaataatcaggacggagtggtggccagccagcctgctcgtgtagtggacgaacgggagcagatggccatcagtggcggcttcatccgcagggtaacaaatgatgcccgagaaaatgaaatggatgaaaacctagagcaggtgagcggcatcatcgggaacctccgtcacatggccctggatatgggcaatgagatcgatacacagaatcgccagatcgacaggatcatggagaaggctgattccaacaaaaccagaattgatgaggccaaccaacgtgcaacaaagatgctgggaagtggttaagtgtgcccacccgtgttctcctccaaatgctgtcgggcaagatagctccttcatgcttttctcatggtattatctagtaggtctgcacacataacacacatcagtccacccccattgtgaatgttgtcctgtgtcatctgtcagcttcccaacaatactttgtgtcttttgttctctcttggtctctttctttccaaaggttgtacatagtggtcatttggtggctctaactccttgatgtcttgagtttcatttttcattttctctcctcggtggcatttgctgaataacaacaatttaggaatgctcaatgtgctgttgattctttcaatccacagtattgttcttgtaaaactgtgacattccacagagttactgccacggtcctttgagtgtcaggctctgaatctctcaaaatgtgccgtctttggttcctcatggctgttatctgtctttatgatttcatgattagacaatgtggaattacataacaggcattgcactaaaagtgatgtgatttatgcatttatgcatgagaactaaatagatttttagattcctacttaaacaaaaactttccatgacagtagcatactgatgagacaacacacacacacacaaaacaacagcaacaacaacagaacaacaacaaagcatgctcagtattgagacactgtcaagattaagttataccagcaaaagtgcagtagtgtcacttttttcctgtcaatatatagagacttctaaatcataatcatccttttttaaaaaaaagaattttaaaaaagatggatttgacacactcaccatttaatcatttccagcaaaatatatgtttggctgaaattatgtcaaatggatgtaatatagggtttgtttgctgcttttgatggctacgttttggagagagcaatcttgctgtgaaacagtgtggatgtaaattttataaggctgactcttactaaccaccatttcccctgtggtttgttatcagtacaattctttgttgacccacaggtaccgaactcgagtcgtatcatgtcaactt

SEQ ID NO: 733104 - DNA, 2320 bp, Homo sapiens
gagaatggtcaacttctggagtagtttggcttaaatgagaatgcttcactttctactcatgcctgtagctggtgcatgaagaagacgtagaggggtttccctttttggtgctagatggcttgttctctcttctcttttcctgcattcatttcactatgcttcttttactttttgtctctgtggacaaaggtttgtacatcaactctggatgtatggtgactgtttggaagtaccgatatattatctaattcaaatcactctagaggcaatgcaaagaccatcactcttggccaaccaccaatcctttatgtccttcatggagctttggaaatgttagttccacacgtgttgggatgttttcttgatgacagtgtgttgctgtggtgtgatgtgcacactctacttggcagtcttgttttgtgtctgtctgccagtatgtttttctctgttttatgtctccaaatataatcacatcactaaaatagaattaaatgtcctccagctaccttaatccttgtccaaaatccaaactaaaccacaaaacaaaccaaaacaagaacaaccttgtgggcaaagattgcagtccattgcaatggattcgattggaagtgaaatgttgagtagctgaggcatggtggtggccaactgtttgggtctggattatgatatatcggtattatctaatgcctcgacttaaaactcattcgcttggttcgattcttcgcttgaagaagtgacaattgttgagagcttgctcctccacccctgtgccttgtcactcaccctctcttttgcataggcttaaatcaagtgatgcttacaaaaaagcctggggcaataatcaggacggagtggtggccagccagcctgctcgtgtagtggacgaacgggagcagatggccatcagtggcggcttcatccgcagggtaacaaatgatgcccgagaaaatgaaatggatgaaaacctagagcaggtgagcggcatcatcgggaacctccgtcacatggccctggatatgggcaatgagatcgatacacagaatcgccagatcgacaggatcatggagaaggctgattccaacaaaaccagaattgatgaggccaaccaacgtgcaacaaagatgctgggaagtggttaagtgtgcccacccgtgttctcctccaaatgctgtcgggcaagatagctccttcatgcttttctcatggtattatctagtaggtctgcacacataacacacatcagtccacccccattgtgaatgttgtcctgtgtcatctgtcagcttcccaacaatactttgtgtcttttgttctctcttggtctctttctttccaaaggttgtacatagtggtcatttggtggctctaactccttgatgtcttgagtttcatttttcattttctctcctcggtggcatttgctgaataacaacaatttaggaatgctcaatgtgctgttgattctttcaatccacagtattgttcttgtaaaactgtgacattccacagagttactgccacggtcctttgagtgtcaggctctgaatctctcaaaatgtgccgtctttggttcctcatggctgttatctgtctttatgatttcatgattagacaatgtggaattacataacaggcattgcactaaaagtgatgtgatttatgcatttatgcatgagaactaaatagatttttagattcctacttaaacaaaaactttccatgacagtagcatactgatgagacaacacacacacacacaaaacaacagcaacaacaacagaacaacaacaaagcatgctcagtattgagacactgtcaagattaagttataccagcaaaagtgcagtagtgtcacttttttcctgtcaatatatagagacttctaaatcataatcatccttttttcaaaatatatgtttggctgaaattatgtcaaatggatgtaatatagggtttgtttgctgcttttgatggctacgttttggagagagcaatcttgctgtgaaacagtgtggatgtaaattttataaggctgactcttactaaccaccatttcccctgtggtttgttatcagtacaattctttgttgcttaatctagagctatgcacaccaaattgctgagatgtttagtagctgataaagaaaccttttaaaaaaataatataaatgaatgaaatataaactgtgagataaatatcattatagcatgtaatattaaattcctcctgtctcctctgtcagtttgtgaagtgattgacattttgtagctagtttaaaattattaaaaattatagactccagatgatctgctttaattt

SEQ ID NO: 733105 - DNA, 2224 bp, Homo sapiens
gagaatggtcaacttctggagtagtttggcttaaatgagaatgcttcactttctactcatgcctgtagctggtgcatgaagaagacgtagaggggtttccctttttggtgctagatggcttgttctctcttctcttttcctgcattcatttcactatgcttcttttactttttgtctctgtggacaaaggtttgtacatcaactctggatgtatggtgactgtttggaagtaccgatatattatctaattcaaatcactctagaggcaatgcaaagaccatcactcttggccaaccaccaatcctttatgtccttcatggagctttggaaatgttagttccacacgtgttgggatgttttcttgatgacagtgtgttgctgtggtgtgatgtgcacactctacttggcagtcttgttttgtgtctgtctgccagtatgtttttctctgttttatgtctccaaatataatcacatcactaaaatagaattaaatgtcctccagctaccttaatccttgtccaaaatccaaactaaaccacaaaacaaaccaaaacaagaacaaccttgtgggcaaagattgcagtccattgcaatggattcgattggaagtgaaatgttgagtagctgaggcatggtggtggccaactgtttgggtctggattatgatatatcggtattatctaatgcctcgacttaaaactcattcgcttggttcgattcttcgcttgaagaagtgacaattgttgagagcttgctcctccacccctgtgccttgtcactcaccctctcttttgcataggcttaaatcaagtgatgcttacaaaaaagcctggggcaataatcaggacggagtggtggccagccagcctgctcgtgtagtggacgaacgggagcagatggccatcagtggcggcttcatccgcagggtaacaaatgatgcccgagaaaatgaaatggatgaaaacctagagcaggtgagcggcatcatcgggaacctccgtcacatggccctggatatgggcaatgagatcgatacacagaatcgccagatcgacaggatcatggagaaggctgattccaacaaaaccagaattgatgaggccaaccaacgtgcaacaaagatgctgggaagtggttaagtgtgcccacccgtgttctcctccaaatgctgtcgggcaagatagctccttcatgcttttctcatggtattatctagtaggtctgcacacataacacacatcagtccacccccattgtgaatgttgtcctgtgtcatctgtcagcttcccaacaatactttgtgtcttttgttctctcttggtctctttctttccaaaggttgtacatagtggtcatttggtggctctaactccttgattgtcaggctctgaatctctcaaaatgtgccgtctttggttcctcatggctgttatctgtctttatgatttcatgattagacaatgtggaattacataacaggcattgcactaaaagtgatgtgatttatgcatttatgcatgagaactaaatagatttttagattcctacttaaacaaaaactttccatgacagtagcatactgatgagacaacacacacacacacaaaacaacagcaacaacaacagaacaacaacaaagcatgctcagtattgagacactgtcaagattaagttataccagcaaaagtgcagtagtgtcacttttttcctgtcaatatatagagacttctaaatcataatcatccttttttaaaaaaaagaattttaaaaaagatggatttgacacactcaccatttaatcatttccagcaaaatatatgtttggctgaaattatgtcaaatggatgtaatatagggtttgtttgctgcttttgatggctacgttttggagagagcaatcttgctgtgaaacagtgtggatgtaaattttataaggctgactcttactaaccaccatttcccctgtggtttgttatcagtacaattctttgttgcttaatctagagctatgcacaccaaattgctgagatgtttagtagctgataaagaaaccttttaaaaaaataatataaatgaatgaaatataaactgtgagataaatatcattatagcatgtaatattaaattcctcctgtctcctctgtcagtttgtgaagtgattgacattttgtagctagtttaaaattattaaaaattatagactccagatgatctgctttaattt

SEQ ID NO: 733106 - DNA, 2033 bp, Homo sapiens
gagaatggtcaacttctggagtagtttggcttaaatgagaatgcttcactttctactcatgcctgtagctggtgcatgaagaagacgtagaggggtttccctttttggtgctagatggcttgttctctcttctcttttcctgcattcatttcactatgcttcttttactttttgtctctgtggacaaaggtttgtacatcaactctggatgtatggtgactgtttggaagtaccgatatattatctaattcaaatcactctagaggcaatgcaaagaccatcactcttggccaaccaccaatcctttatgtccttcatggagctttggaaatgttagttccacacgtgttgggatgttttcttgatgacagtgtgttgctgtggtgtgatgtgcacactctacttggcagtcttgttttgtgtctgtctgccagtatgtttttctctgttttatgtctccaaatataatcacatcactaaaatagaattaaatgtcctccagctaccttaatccttgtccaaaatccaaactaaaccacaaaacaaaccaaaacaagaacaaccttgtgggcaaagattgcagtccattgcaatggattcgattggaagtgaaatgttgagtagctgaggcatggtggtggccaactgtttgggtctggattatgatatatcggtattatctaatgcctcgacttaaaactcattcgcttggttcgattcttcgcttgaagaagtgacaattgttgagagcttgctcctccacccctgtgccttgtcactcaccctctcttttgcataggcttaaatcaagtgatgcttacaaaaaagcctggggcaataatcaggacggagtggtggccagccagcctgctcgtgtagtggacgaacgggagcagatggccatcagtggcggcttcatccgcagggtaacaaatgatgcccgagaaaatgaaatggatgaaaacctagagcaggtgagcggcatcatcgggaacctccgtcacatggccctggatatgggcaatgagatcgatacacagaatcgccagatcgacaggatcatggagaaggctgattccaacaaaaccagaattgatgaggccaaccaacgtgcaacaaagatgctgggaagtggttaagtgtgcccacccgtgttctcctccaaatgctgtcgggcaagatagctccttcatgcttttctcatggtattatctagtaggtctgcacacataacacacatcagtccacccccattgtgaatgttgtcctgtgtcatctgtcagcttcccaacaatactttgtgtcttttgttctctcttggtctctttctttccaaaggttgtacatagtggtcatttggtggctctaactccttgattgtcaggctctgaatctctcaaaatgtgccgtctttggttcctcatggctgttatctgtctttatgatttcatgattagacaatgtggaattacataacaggcattgcactaaaagtgatgtgatttatgcatttatgcatgagaactaaatagatttttagattcctacttaaacaaaaactttccatgacagtagcatactgatgagacaacacacacacacacaaaacaacagcaacaacaacagaacaacaacaaagcatgctcagtattgagacactgtcaagattaagttataccagcaaaagtgcagtagtgtcacttttttcctgtcaatatatagagacttctaaatcataatcatccttttttaaaaaaaagaattttaaaaaagatggatttgacacactcaccatttaatcatttccagcaaaatatatgtttggctgaaattatgtcaaatggatgtaatatagggtttgtttgctgcttttgatggctacgttttggagagagcaatcttgctgtgaaacagtgtggatgtaaattttataaggctgactcttactaaccaccatttcccctgtggtttgttatcagtacaattctttgttgacccacaggtaccgaactcgagtcgtatcatgtcaactt

SEQ ID NO: 733107 - DNA, 2166 bp, Homo sapiens
gagaatggtcaacttctggagtagtttggcttaaatgagaatgcttcactttctactcatgcctgtagctggtgcatgaagaagacgtagaggggtttccctttttggtgctagatggcttgttctctcttctcttttcctgcattcatttcactatgcttcttttactttttgtctctgtggacaaaggtttgtacatcaactctggatgtatggtgactgtttggaagtaccgatatattatctaattcaaatcactctagaggcaatgcaaagaccatcactcttggccaaccaccaatcctttatgtccttcatggagctttggaaatgttagttccacacgtgttgggatgttttcttgatgacagtgtgttgctgtggtgtgatgtgcacactctacttggcagtcttgttttgtgtctgtctgccagtatgtttttctctgttttatgtctccaaatataatcacatcactaaaatagaattaaatgtcctccagctaccttaatccttgtccaaaatccaaactaaaccacaaaacaaaccaaaacaagaacaaccttgtgggcaaagattgcagtccattgcaatggattcgattggaagtgaaatgttgagtagctgaggcatggtggtggccaactgtttgggtctggattatgatatatcggtattatctaatgcctcgacttaaaactcattcgcttggttcgattcttcgcttgaagaagtgacaattgttgagagcttgctcctccacccctgtgccttgtcactcaccctctcttttgcataggcttaaatcaagtgatgcttacaaaaaagcctggggcaataatcaggacggagtggtggccagccagcctgctcgtgtagtggacgaacgggagcagatggccatcagtggcggcttcatccgcagggtaacaaatgatgcccgagaaaatgaaatggatgaaaacctagagcaggtgagcggcatcatcgggaacctccgtcacatggccctggatatgggcaatgagatcgatacacagaatcgccagatcgacaggatcatggagaaggctgattccaacaaaaccagaattgatgaggccaaccaacgtgcaacaaagatgctgggaagtggttaagtgtgcccacccgtgttctcctccaaatgctgtcgggcaagatagctccttcatgcttttctcatggtattatctagtaggtctgcacacataacacacatcagtccacccccattgtgaatgttgtcctgtgtcatctgtcagcttcccaacaatactttgtgtcttttgttctctcttggtctctttctttccaaaggttgtacatagtggtcatttggtggctctaactccttgattgtcaggctctgaatctctcaaaatgtgccgtctttggttcctcatggctgttatctgtctttatgatttcatgattagacaatgtggaattacataacaggcattgcactaaaagtgatgtgatttatgcatttatgcatgagaactaaatagatttttagattcctacttaaacaaaaactttccatgacagtagcatactgatgagacaacacacacacacacaaaacaacagcaacaacaacagaacaacaacaaagcatgctcagtattgagacactgtcaagattaagttataccagcaaaagtgcagtagtgtcacttttttcctgtcaatatatagagacttctaaatcataatcatccttttttcaaaatatatgtttggctgaaattatgtcaaatggatgtaatatagggtttgtttgctgcttttgatggctacgttttggagagagcaatcttgctgtgaaacagtgtggatgtaaattttataaggctgactcttactaaccaccatttcccctgtggtttgttatcagtacaattctttgttgcttaatctagagctatgcacaccaaattgctgagatgtttagtagctgataaagaaaccttttaaaaaaataatataaatgaatgaaatataaactgtgagataaatatcattatagcatgtaatattaaattcctcctgtctcctctgtcagtttgtgaagtgattgacattttgtagctagtttaaaattattaaaaattatagactccagatgatctgctttaattt

SEQ ID NO: 733108 - DNA, 2312 bp, Homo sapiens
gagaatggtcaacttctggagtagtttggcttaaatgagaatgcttcactttctactcatgcctgtagctggtgcatgaagaagacgtagaggggtttccctttttggtgctagatggcttgttctctcttctcttttcctgcattcatttcactatgcttcttttactttttgtctctgtggacaaaggtttgtacatcaactctggatgtatggtgactgtttggaagtaccgatatattatctaattcaaatcactctagaggcaatgcaaagaccatcactcttggccaaccaccaatcctttatgtccttcatggagctttggaaatgttagttccacacgtgttgggatgttttcttgatgacagtgtgttgctgtggtgtgatgtgcacactctacttggcagtcttgttttgtgtctgtctgccagtatgtttttctctgttttatgtctccaaatataatcacatcactaaaatagaattaaatgtcctccagctaccttaatccttgtccaaaatccaaactaaaccacaaaacaaaccaaaacaagaacaaccttgtgggcaaagattgcagtccattgcaatggattcgattggaagtgaaatgttgagtagctgaggcatggtggtggccaactgtttgggtctggattatgatatatcggtattatctaatgcctcgacttaaaactcattcgcttggttcgattcttcgcttgaagaagtgacaattgttgagagcttgctcctccacccctgtgccttgtcactcaccctctcttttgcataggcttaaatcaagtgatgcttacaaaaaagcctggggcaataatcaggacggagtggtggccagccagcctgctcgtgtagtggacgaacgggagcagatggccatcagtggcggcttcatccgcagggtaacaaatgatgcccgagaaaatgaaatggatgaaaacctagagcaggtgagcggcatcatcgggaacctccgtcacatggccctggatatgggcaatgagatcgatacacagaatcgccagatcgacaggatcatggagaagtaagtgtgcccacccgtgttctcctccaaatgctgtcgggcaagatagctccttcatgcttttctcatggtattatctagtaggtctgcacacataacacacatcagtccacccccattgtgaatgttgtcctgtgtcatctgtcagcttcccaacaatactttgtgtcttttgttctctcttggtctctttctttccaaaggttgtacatagtggtcatttggtggctctaactccttgatgtcttgagtttcatttttcattttctctcctcggtggcatttgctgaataacaacaatttaggaatgctcaatgtgctgttgattctttcaatccacagtattgttcttgtaaaactgtgacattccacagagttactgccacggtcctttgagtgtcaggctctgaatctctcaaaatgtgccgtctttggttcctcatggctgttatctgtctttatgatttcatgattagacaatgtggaattacataacaggcattgcactaaaagtgatgtgatttatgcatttatgcatgagaactaaatagatttttagattcctacttaaacaaaaactttccatgacagtagcatactgatgagacaacacacacacacacaaaacaacagcaacaacaacagaacaacaacaaagcatgctcagtattgagacactgtcaagattaagttataccagcaaaagtgcagtagtgtcacttttttcctgtcaatatatagagacttctaaatcataatcatccttttttaaaaaaaagaattttaaaaaagatggatttgacacactcaccatttaatcatttccagcaaaatatatgtttggctgaaattatgtcaaatggatgtaatatagggtttgtttgctgcttttgatggctacgttttggagagagcaatcttgctgtgaaacagtgtggatgtaaattttataaggctgactcttactaaccaccatttcccctgtggtttgttatcagtacaattctttgttgcttaatctagagctatgcacaccaaattgctgagatgtttagtagctgataaagaaaccttttaaaaaaataatataaatgaatgaaatataaactgtgagataaatatcattatagcatgtaatattaaattcctcctgtctcctctgtcagtttgtgaagtgattgacattttgtagctagtttaaaattattaaaaattatagactccagatgatctgctttaattt

SEQ ID NO: 733109 - DNA, 2121 bp, Homo sapiens
gagaatggtcaacttctggagtagtttggcttaaatgagaatgcttcactttctactcatgcctgtagctggtgcatgaagaagacgtagaggggtttccctttttggtgctagatggcttgttctctcttctcttttcctgcattcatttcactatgcttcttttactttttgtctctgtggacaaaggtttgtacatcaactctggatgtatggtgactgtttggaagtaccgatatattatctaattcaaatcactctagaggcaatgcaaagaccatcactcttggccaaccaccaatcctttatgtccttcatggagctttggaaatgttagttccacacgtgttgggatgttttcttgatgacagtgtgttgctgtggtgtgatgtgcacactctacttggcagtcttgttttgtgtctgtctgccagtatgtttttctctgttttatgtctccaaatataatcacatcactaaaatagaattaaatgtcctccagctaccttaatccttgtccaaaatccaaactaaaccacaaaacaaaccaaaacaagaacaaccttgtgggcaaagattgcagtccattgcaatggattcgattggaagtgaaatgttgagtagctgaggcatggtggtggccaactgtttgggtctggattatgatatatcggtattatctaatgcctcgacttaaaactcattcgcttggttcgattcttcgcttgaagaagtgacaattgttgagagcttgctcctccacccctgtgccttgtcactcaccctctcttttgcataggcttaaatcaagtgatgcttacaaaaaagcctggggcaataatcaggacggagtggtggccagccagcctgctcgtgtagtggacgaacgggagcagatggccatcagtggcggcttcatccgcagggtaacaaatgatgcccgagaaaatgaaatggatgaaaacctagagcaggtgagcggcatcatcgggaacctccgtcacatggccctggatatgggcaatgagatcgatacacagaatcgccagatcgacaggatcatggagaagtaagtgtgcccacccgtgttctcctccaaatgctgtcgggcaagatagctccttcatgcttttctcatggtattatctagtaggtctgcacacataacacacatcagtccacccccattgtgaatgttgtcctgtgtcatctgtcagcttcccaacaatactttgtgtcttttgttctctcttggtctctttctttccaaaggttgtacatagtggtcatttggtggctctaactccttgatgtcttgagtttcatttttcattttctctcctcggtggcatttgctgaataacaacaatttaggaatgctcaatgtgctgttgattctttcaatccacagtattgttcttgtaaaactgtgacattccacagagttactgccacggtcctttgagtgtcaggctctgaatctctcaaaatgtgccgtctttggttcctcatggctgttatctgtctttatgatttcatgattagacaatgtggaattacataacaggcattgcactaaaagtgatgtgatttatgcatttatgcatgagaactaaatagatttttagattcctacttaaacaaaaactttccatgacagtagcatactgatgagacaacacacacacacacaaaacaacagcaacaacaacagaacaacaacaaagcatgctcagtattgagacactgtcaagattaagttataccagcaaaagtgcagtagtgtcacttttttcctgtcaatatatagagacttctaaatcataatcatccttttttaaaaaaaagaattttaaaaaagatggatttgacacactcaccatttaatcatttccagcaaaatatatgtttggctgaaattatgtcaaatggatgtaatatagggtttgtttgctgcttttgatggctacgttttggagagagcaatcttgctgtgaaacagtgtggatgtaaattttataaggctgactcttactaaccaccatttcccctgtggtttgttatcagtacaattctttgttgacccacaggtaccgaactcgagtcgtatcatgtcaactt

SEQ ID NO: 733110 - DNA, 2254 bp, Homo sapiens
gagaatggtcaacttctggagtagtttggcttaaatgagaatgcttcactttctactcatgcctgtagctggtgcatgaagaagacgtagaggggtttccctttttggtgctagatggcttgttctctcttctcttttcctgcattcatttcactatgcttcttttactttttgtctctgtggacaaaggtttgtacatcaactctggatgtatggtgactgtttggaagtaccgatatattatctaattcaaatcactctagaggcaatgcaaagaccatcactcttggccaaccaccaatcctttatgtccttcatggagctttggaaatgttagttccacacgtgttgggatgttttcttgatgacagtgtgttgctgtggtgtgatgtgcacactctacttggcagtcttgttttgtgtctgtctgccagtatgtttttctctgttttatgtctccaaatataatcacatcactaaaatagaattaaatgtcctccagctaccttaatccttgtccaaaatccaaactaaaccacaaaacaaaccaaaacaagaacaaccttgtgggcaaagattgcagtccattgcaatggattcgattggaagtgaaatgttgagtagctgaggcatggtggtggccaactgtttgggtctggattatgatatatcggtattatctaatgcctcgacttaaaactcattcgcttggttcgattcttcgcttgaagaagtgacaattgttgagagcttgctcctccacccctgtgccttgtcactcaccctctcttttgcataggcttaaatcaagtgatgcttacaaaaaagcctggggcaataatcaggacggagtggtggccagccagcctgctcgtgtagtggacgaacgggagcagatggccatcagtggcggcttcatccgcagggtaacaaatgatgcccgagaaaatgaaatggatgaaaacctagagcaggtgagcggcatcatcgggaacctccgtcacatggccctggatatgggcaatgagatcgatacacagaatcgccagatcgacaggatcatggagaagtaagtgtgcccacccgtgttctcctccaaatgctgtcgggcaagatagctccttcatgcttttctcatggtattatctagtaggtctgcacacataacacacatcagtccacccccattgtgaatgttgtcctgtgtcatctgtcagcttcccaacaatactttgtgtcttttgttctctcttggtctctttctttccaaaggttgtacatagtggtcatttggtggctctaactccttgatgtcttgagtttcatttttcattttctctcctcggtggcatttgctgaataacaacaatttaggaatgctcaatgtgctgttgattctttcaatccacagtattgttcttgtaaaactgtgacattccacagagttactgccacggtcctttgagtgtcaggctctgaatctctcaaaatgtgccgtctttggttcctcatggctgttatctgtctttatgatttcatgattagacaatgtggaattacataacaggcattgcactaaaagtgatgtgatttatgcatttatgcatgagaactaaatagatttttagattcctacttaaacaaaaactttccatgacagtagcatactgatgagacaacacacacacacacaaaacaacagcaacaacaacagaacaacaacaaagcatgctcagtattgagacactgtcaagattaagttataccagcaaaagtgcagtagtgtcacttttttcctgtcaatatatagagacttctaaatcataatcatccttttttcaaaatatatgtttggctgaaattatgtcaaatggatgtaatatagggtttgtttgctgcttttgatggctacgttttggagagagcaatcttgctgtgaaacagtgtggatgtaaattttataaggctgactcttactaaccaccatttcccctgtggtttgttatcagtacaattctttgttgcttaatctagagctatgcacaccaaattgctgagatgtttagtagctgataaagaaaccttttaaaaaaataatataaatgaatgaaatataaactgtgagataaatatcattatagcatgtaatattaaattcctcctgtctcctctgtcagtttgtgaagtgattgacattttgtagctagtttaaaattattaaaaattatagactccagatgatctgctttaattt

SEQ ID NO: 733111 - DNA, 2158 bp, Homo sapiens
gagaatggtcaacttctggagtagtttggcttaaatgagaatgcttcactttctactcatgcctgtagctggtgcatgaagaagacgtagaggggtttccctttttggtgctagatggcttgttctctcttctcttttcctgcattcatttcactatgcttcttttactttttgtctctgtggacaaaggtttgtacatcaactctggatgtatggtgactgtttggaagtaccgatatattatctaattcaaatcactctagaggcaatgcaaagaccatcactcttggccaaccaccaatcctttatgtccttcatggagctttggaaatgttagttccacacgtgttgggatgttttcttgatgacagtgtgttgctgtggtgtgatgtgcacactctacttggcagtcttgttttgtgtctgtctgccagtatgtttttctctgttttatgtctccaaatataatcacatcactaaaatagaattaaatgtcctccagctaccttaatccttgtccaaaatccaaactaaaccacaaaacaaaccaaaacaagaacaaccttgtgggcaaagattgcagtccattgcaatggattcgattggaagtgaaatgttgagtagctgaggcatggtggtggccaactgtttgggtctggattatgatatatcggtattatctaatgcctcgacttaaaactcattcgcttggttcgattcttcgcttgaagaagtgacaattgttgagagcttgctcctccacccctgtgccttgtcactcaccctctcttttgcataggcttaaatcaagtgatgcttacaaaaaagcctggggcaataatcaggacggagtggtggccagccagcctgctcgtgtagtggacgaacgggagcagatggccatcagtggcggcttcatccgcagggtaacaaatgatgcccgagaaaatgaaatggatgaaaacctagagcaggtgagcggcatcatcgggaacctccgtcacatggccctggatatgggcaatgagatcgatacacagaatcgccagatcgacaggatcatggagaagtaagtgtgcccacccgtgttctcctccaaatgctgtcgggcaagatagctccttcatgcttttctcatggtattatctagtaggtctgcacacataacacacatcagtccacccccattgtgaatgttgtcctgtgtcatctgtcagcttcccaacaatactttgtgtcttttgttctctcttggtctctttctttccaaaggttgtacatagtggtcatttggtggctctaactccttgattgtcaggctctgaatctctcaaaatgtgccgtctttggttcctcatggctgttatctgtctttatgatttcatgattagacaatgtggaattacataacaggcattgcactaaaagtgatgtgatttatgcatttatgcatgagaactaaatagatttttagattcctacttaaacaaaaactttccatgacagtagcatactgatgagacaacacacacacacacaaaacaacagcaacaacaacagaacaacaacaaagcatgctcagtattgagacactgtcaagattaagttataccagcaaaagtgcagtagtgtcacttttttcctgtcaatatatagagacttctaaatcataatcatccttttttaaaaaaaagaattttaaaaaagatggatttgacacactcaccatttaatcatttccagcaaaatatatgtttggctgaaattatgtcaaatggatgtaatatagggtttgtttgctgcttttgatggctacgttttggagagagcaatcttgctgtgaaacagtgtggatgtaaattttataaggctgactcttactaaccaccatttcccctgtggtttgttatcagtacaattctttgttgcttaatctagagctatgcacaccaaattgctgagatgtttagtagctgataaagaaaccttttaaaaaaataatataaatgaatgaaatataaactgtgagataaatatcattatagcatgtaatattaaattcctcctgtctcctctgtcagtttgtgaagtgattgacattttgtagctagtttaaaattattaaaaattatagactccagatgatctgctttaattt

SEQ ID NO: 733112 - DNA, 1967 bp, Homo sapiens
gagaatggtcaacttctggagtagtttggcttaaatgagaatgcttcactttctactcatgcctgtagctggtgcatgaagaagacgtagaggggtttccctttttggtgctagatggcttgttctctcttctcttttcctgcattcatttcactatgcttcttttactttttgtctctgtggacaaaggtttgtacatcaactctggatgtatggtgactgtttggaagtaccgatatattatctaattcaaatcactctagaggcaatgcaaagaccatcactcttggccaaccaccaatcctttatgtccttcatggagctttggaaatgttagttccacacgtgttgggatgttttcttgatgacagtgtgttgctgtggtgtgatgtgcacactctacttggcagtcttgttttgtgtctgtctgccagtatgtttttctctgttttatgtctccaaatataatcacatcactaaaatagaattaaatgtcctccagctaccttaatccttgtccaaaatccaaactaaaccacaaaacaaaccaaaacaagaacaaccttgtgggcaaagattgcagtccattgcaatggattcgattggaagtgaaatgttgagtagctgaggcatggtggtggccaactgtttgggtctggattatgatatatcggtattatctaatgcctcgacttaaaactcattcgcttggttcgattcttcgcttgaagaagtgacaattgttgagagcttgctcctccacccctgtgccttgtcactcaccctctcttttgcataggcttaaatcaagtgatgcttacaaaaaagcctggggcaataatcaggacggagtggtggccagccagcctgctcgtgtagtggacgaacgggagcagatggccatcagtggcggcttcatccgcagggtaacaaatgatgcccgagaaaatgaaatggatgaaaacctagagcaggtgagcggcatcatcgggaacctccgtcacatggccctggatatgggcaatgagatcgatacacagaatcgccagatcgacaggatcatggagaagtaagtgtgcccacccgtgttctcctccaaatgctgtcgggcaagatagctccttcatgcttttctcatggtattatctagtaggtctgcacacataacacacatcagtccacccccattgtgaatgttgtcctgtgtcatctgtcagcttcccaacaatactttgtgtcttttgttctctcttggtctctttctttccaaaggttgtacatagtggtcatttggtggctctaactccttgattgtcaggctctgaatctctcaaaatgtgccgtctttggttcctcatggctgttatctgtctttatgatttcatgattagacaatgtggaattacataacaggcattgcactaaaagtgatgtgatttatgcatttatgcatgagaactaaatagatttttagattcctacttaaacaaaaactttccatgacagtagcatactgatgagacaacacacacacacacaaaacaacagcaacaacaacagaacaacaacaaagcatgctcagtattgagacactgtcaagattaagttataccagcaaaagtgcagtagtgtcacttttttcctgtcaatatatagagacttctaaatcataatcatccttttttaaaaaaaagaattttaaaaaagatggatttgacacactcaccatttaatcatttccagcaaaatatatgtttggctgaaattatgtcaaatggatgtaatatagggtttgtttgctgcttttgatggctacgttttggagagagcaatcttgctgtgaaacagtgtggatgtaaattttataaggctgactcttactaaccaccatttcccctgtggtttgttatcagtacaattctttgttgacccacaggtaccgaactcgagtcgtatcatgtcaactt

SEQ ID NO: 733113 - DNA, 2100 bp, Homo sapiens
gagaatggtcaacttctggagtagtttggcttaaatgagaatgcttcactttctactcatgcctgtagctggtgcatgaagaagacgtagaggggtttccctttttggtgctagatggcttgttctctcttctcttttcctgcattcatttcactatgcttcttttactttttgtctctgtggacaaaggtttgtacatcaactctggatgtatggtgactgtttggaagtaccgatatattatctaattcaaatcactctagaggcaatgcaaagaccatcactcttggccaaccaccaatcctttatgtccttcatggagctttggaaatgttagttccacacgtgttgggatgttttcttgatgacagtgtgttgctgtggtgtgatgtgcacactctacttggcagtcttgttttgtgtctgtctgccagtatgtttttctctgttttatgtctccaaatataatcacatcactaaaatagaattaaatgtcctccagctaccttaatccttgtccaaaatccaaactaaaccacaaaacaaaccaaaacaagaacaaccttgtgggcaaagattgcagtccattgcaatggattcgattggaagtgaaatgttgagtagctgaggcatggtggtggccaactgtttgggtctggattatgatatatcggtattatctaatgcctcgacttaaaactcattcgcttggttcgattcttcgcttgaagaagtgacaattgttgagagcttgctcctccacccctgtgccttgtcactcaccctctcttttgcataggcttaaatcaagtgatgcttacaaaaaagcctggggcaataatcaggacggagtggtggccagccagcctgctcgtgtagtggacgaacgggagcagatggccatcagtggcggcttcatccgcagggtaacaaatgatgcccgagaaaatgaaatggatgaaaacctagagcaggtgagcggcatcatcgggaacctccgtcacatggccctggatatgggcaatgagatcgatacacagaatcgccagatcgacaggatcatggagaagtaagtgtgcccacccgtgttctcctccaaatgctgtcgggcaagatagctccttcatgcttttctcatggtattatctagtaggtctgcacacataacacacatcagtccacccccattgtgaatgttgtcctgtgtcatctgtcagcttcccaacaatactttgtgtcttttgttctctcttggtctctttctttccaaaggttgtacatagtggtcatttggtggctctaactccttgattgtcaggctctgaatctctcaaaatgtgccgtctttggttcctcatggctgttatctgtctttatgatttcatgattagacaatgtggaattacataacaggcattgcactaaaagtgatgtgatttatgcatttatgcatgagaactaaatagatttttagattcctacttaaacaaaaactttccatgacagtagcatactgatgagacaacacacacacacacaaaacaacagcaacaacaacagaacaacaacaaagcatgctcagtattgagacactgtcaagattaagttataccagcaaaagtgcagtagtgtcacttttttcctgtcaatatatagagacttctaaatcataatcatccttttttcaaaatatatgtttggctgaaattatgtcaaatggatgtaatatagggtttgtttgctgcttttgatggctacgttttggagagagcaatcttgctgtgaaacagtgtggatgtaaattttataaggctgactcttactaaccaccatttcccctgtggtttgttatcagtacaattctttgttgcttaatctagagctatgcacaccaaattgctgagatgtttagtagctgataaagaaaccttttaaaaaaataatataaatgaatgaaatataaactgtgagataaatatcattatagcatgtaatattaaattcctcctgtctcctctgtcagtttgtgaagtgattgacattttgtagctagtttaaaattattaaaaattatagactccagatgatctgctttaattt

SEQ ID NO: 733114 - DNA, 1973 bp, Homo sapiens
cggtattccgtgtgtgcacgtctggtgggggctttataaagtgttttcgaggtgagctgctggggaaaagggaaacgggagccctgcaaatggagcgacggggaggaagagcgagggtccagagccaaacccgtcactgaccccccagcccaggcgcccagccactccccaccgctaccatggccgaagacgcagacatgcgcaatgagctggaggagatgcagcgaagggctgaccagttggctgatgagtcgctggaaagcacccgtcgtatgctgcaactggttgaagagagtaaagatgctggtatcaggactttggttatgttggatgaacaaggagaacaactggaacgcattgaggaagggatggaccaaatcaataaggacatgaaagaagcagaaaagaatttgacggacctaggaaaattctgcgggctttgtgtgtgtccctgtaacaagcttaaatcaagtgatgcttacaaaaaagcctggggcaataatcaggacggagtggtggccagccagcctgctcgtgtagtggacgaacgggagcagatggccatcagtggcggcttcatccgcagggtaacaaatgatgcccgagaaaatgaaatggatgaaaacctagagcaggtgagcggcatcatcgggaacctccgtcacatggccctggatatgggcaatgagatcgatacacagaatcgccagatcgacaggatcatggagaagtaagtgtgcccacccgtgttctcctccaaatgctgtcgggcaagatagctccttcatgcttttctcatggtattatctagtaggtctgcacacataacacacatcagtccacccccattgtgaatgttgtcctgtgtcatctgtcagcttcccaacaatactttgtgtcttttgttctctcttggtctctttctttccaaaggttgtacatagtggtcatttggtggctctaactccttgatgtcttgagtttcatttttcattttctctcctcggtggcatttgctgaataacaacaatttaggaatgctcaatgtgctgttgattctttcaatccacagtattgttcttgtaaaactgtgacattccacagagttactgccacggtcctttgagtgtcaggctctgaatctctcaaaatgtgccgtctttggttcctcatggctgttatctgtctttatgatttcatgattagacaatgtggaattacataacaggcattgcactaaaagtgatgtgatttatgcatttatgcatgagaactaaatagatttttagattcctacttaaacaaaaactttccatgacagtagcatactgatgagacaacacacacacacacaaaacaacagcaacaacaacagaacaacaacaaagcatgctcagtattgagacactgtcaagattaagttataccagcaaaagtgcagtagtgtcacttttttcctgtcaatatatagagacttctaaatcataatcatccttttttaaaaaaaagaattttaaaaaagatggatttgacacactcaccatttaatcatttccagcaaaatatatgtttggctgaaattatgtcaaatggatgtaatatagggtttgtttgctgcttttgatggctacgttttggagagagcaatcttgctgtgaaacagtgtggatgtaaattttataaggctgactcttactaaccaccatttcccctgtggtttgttatcagtacaattctttgttgcttaatctagagctatgcacaccaaattgctgagatgtttagtagctgataaagaaaccttttaaaaaaataatataaatgaatgaaatataaactgtgagataaatatcattatagcatgtaatattaaattcctcctgtctcctctgtcagtttgtgaagtgattgacattttgtagctagtttaaaattattaaaaattatagactccagatgatctgctttaattt

SEQ ID NO: 733115 - DNA, 1782 bp, Homo sapiens
cggtattccgtgtgtgcacgtctggtgggggctttataaagtgttttcgaggtgagctgctggggaaaagggaaacgggagccctgcaaatggagcgacggggaggaagagcgagggtccagagccaaacccgtcactgaccccccagcccaggcgcccagccactccccaccgctaccatggccgaagacgcagacatgcgcaatgagctggaggagatgcagcgaagggctgaccagttggctgatgagtcgctggaaagcacccgtcgtatgctgcaactggttgaagagagtaaagatgctggtatcaggactttggttatgttggatgaacaaggagaacaactggaacgcattgaggaagggatggaccaaatcaataaggacatgaaagaagcagaaaagaatttgacggacctaggaaaattctgcgggctttgtgtgtgtccctgtaacaagcttaaatcaagtgatgcttacaaaaaagcctggggcaataatcaggacggagtggtggccagccagcctgctcgtgtagtggacgaacgggagcagatggccatcagtggcggcttcatccgcagggtaacaaatgatgcccgagaaaatgaaatggatgaaaacctagagcaggtgagcggcatcatcgggaacctccgtcacatggccctggatatgggcaatgagatcgatacacagaatcgccagatcgacaggatcatggagaagtaagtgtgcccacccgtgttctcctccaaatgctgtcgggcaagatagctccttcatgcttttctcatggtattatctagtaggtctgcacacataacacacatcagtccacccccattgtgaatgttgtcctgtgtcatctgtcagcttcccaacaatactttgtgtcttttgttctctcttggtctctttctttccaaaggttgtacatagtggtcatttggtggctctaactccttgatgtcttgagtttcatttttcattttctctcctcggtggcatttgctgaataacaacaatttaggaatgctcaatgtgctgttgattctttcaatccacagtattgttcttgtaaaactgtgacattccacagagttactgccacggtcctttgagtgtcaggctctgaatctctcaaaatgtgccgtctttggttcctcatggctgttatctgtctttatgatttcatgattagacaatgtggaattacataacaggcattgcactaaaagtgatgtgatttatgcatttatgcatgagaactaaatagatttttagattcctacttaaacaaaaactttccatgacagtagcatactgatgagacaacacacacacacacaaaacaacagcaacaacaacagaacaacaacaaagcatgctcagtattgagacactgtcaagattaagttataccagcaaaagtgcagtagtgtcacttttttcctgtcaatatatagagacttctaaatcataatcatccttttttaaaaaaaagaattttaaaaaagatggatttgacacactcaccatttaatcatttccagcaaaatatatgtttggctgaaattatgtcaaatggatgtaatatagggtttgtttgctgcttttgatggctacgttttggagagagcaatcttgctgtgaaacagtgtggatgtaaattttataaggctgactcttactaaccaccatttcccctgtggtttgttatcagtacaattctttgttgacccacaggtaccgaactcgagtcgtatcatgtcaactt

SEQ ID NO: 733116 - DNA, 1915 bp, Homo sapiens
cggtattccgtgtgtgcacgtctggtgggggctttataaagtgttttcgaggtgagctgctggggaaaagggaaacgggagccctgcaaatggagcgacggggaggaagagcgagggtccagagccaaacccgtcactgaccccccagcccaggcgcccagccactccccaccgctaccatggccgaagacgcagacatgcgcaatgagctggaggagatgcagcgaagggctgaccagttggctgatgagtcgctggaaagcacccgtcgtatgctgcaactggttgaagagagtaaagatgctggtatcaggactttggttatgttggatgaacaaggagaacaactggaacgcattgaggaagggatggaccaaatcaataaggacatgaaagaagcagaaaagaatttgacggacctaggaaaattctgcgggctttgtgtgtgtccctgtaacaagcttaaatcaagtgatgcttacaaaaaagcctggggcaataatcaggacggagtggtggccagccagcctgctcgtgtagtggacgaacgggagcagatggccatcagtggcggcttcatccgcagggtaacaaatgatgcccgagaaaatgaaatggatgaaaacctagagcaggtgagcggcatcatcgggaacctccgtcacatggccctggatatgggcaatgagatcgatacacagaatcgccagatcgacaggatcatggagaagtaagtgtgcccacccgtgttctcctccaaatgctgtcgggcaagatagctccttcatgcttttctcatggtattatctagtaggtctgcacacataacacacatcagtccacccccattgtgaatgttgtcctgtgtcatctgtcagcttcccaacaatactttgtgtcttttgttctctcttggtctctttctttccaaaggttgtacatagtggtcatttggtggctctaactccttgatgtcttgagtttcatttttcattttctctcctcggtggcatttgctgaataacaacaatttaggaatgctcaatgtgctgttgattctttcaatccacagtattgttcttgtaaaactgtgacattccacagagttactgccacggtcctttgagtgtcaggctctgaatctctcaaaatgtgccgtctttggttcctcatggctgttatctgtctttatgatttcatgattagacaatgtggaattacataacaggcattgcactaaaagtgatgtgatttatgcatttatgcatgagaactaaatagatttttagattcctacttaaacaaaaactttccatgacagtagcatactgatgagacaacacacacacacacaaaacaacagcaacaacaacagaacaacaacaaagcatgctcagtattgagacactgtcaagattaagttataccagcaaaagtgcagtagtgtcacttttttcctgtcaatatatagagacttctaaatcataatcatccttttttcaaaatatatgtttggctgaaattatgtcaaatggatgtaatatagggtttgtttgctgcttttgatggctacgttttggagagagcaatcttgctgtgaaacagtgtggatgtaaattttataaggctgactcttactaaccaccatttcccctgtggtttgttatcagtacaattctttgttgcttaatctagagctatgcacaccaaattgctgagatgtttagtagctgataaagaaaccttttaaaaaaataatataaatgaatgaaatataaactgtgagataaatatcattatagcatgtaatattaaattcctcctgtctcctctgtcagtttgtgaagtgattgacattttgtagctagtttaaaattattaaaaattatagactccagatgatctgctttaattt

SEQ ID NO: 733117 - DNA, 1819 bp, Homo sapiens
cggtattccgtgtgtgcacgtctggtgggggctttataaagtgttttcgaggtgagctgctggggaaaagggaaacgggagccctgcaaatggagcgacggggaggaagagcgagggtccagagccaaacccgtcactgaccccccagcccaggcgcccagccactccccaccgctaccatggccgaagacgcagacatgcgcaatgagctggaggagatgcagcgaagggctgaccagttggctgatgagtcgctggaaagcacccgtcgtatgctgcaactggttgaagagagtaaagatgctggtatcaggactttggttatgttggatgaacaaggagaacaactggaacgcattgaggaagggatggaccaaatcaataaggacatgaaagaagcagaaaagaatttgacggacctaggaaaattctgcgggctttgtgtgtgtccctgtaacaagcttaaatcaagtgatgcttacaaaaaagcctggggcaataatcaggacggagtggtggccagccagcctgctcgtgtagtggacgaacgggagcagatggccatcagtggcggcttcatccgcagggtaacaaatgatgcccgagaaaatgaaatggatgaaaacctagagcaggtgagcggcatcatcgggaacctccgtcacatggccctggatatgggcaatgagatcgatacacagaatcgccagatcgacaggatcatggagaagtaagtgtgcccacccgtgttctcctccaaatgctgtcgggcaagatagctccttcatgcttttctcatggtattatctagtaggtctgcacacataacacacatcagtccacccccattgtgaatgttgtcctgtgtcatctgtcagcttcccaacaatactttgtgtcttttgttctctcttggtctctttctttccaaaggttgtacatagtggtcatttggtggctctaactccttgattgtcaggctctgaatctctcaaaatgtgccgtctttggttcctcatggctgttatctgtctttatgatttcatgattagacaatgtggaattacataacaggcattgcactaaaagtgatgtgatttatgcatttatgcatgagaactaaatagatttttagattcctacttaaacaaaaactttccatgacagtagcatactgatgagacaacacacacacacacaaaacaacagcaacaacaacagaacaacaacaaagcatgctcagtattgagacactgtcaagattaagttataccagcaaaagtgcagtagtgtcacttttttcctgtcaatatatagagacttctaaatcataatcatccttttttaaaaaaaagaattttaaaaaagatggatttgacacactcaccatttaatcatttccagcaaaatatatgtttggctgaaattatgtcaaatggatgtaatatagggtttgtttgctgcttttgatggctacgttttggagagagcaatcttgctgtgaaacagtgtggatgtaaattttataaggctgactcttactaaccaccatttcccctgtggtttgttatcagtacaattctttgttgcttaatctagagctatgcacaccaaattgctgagatgtttagtagctgataaagaaaccttttaaaaaaataatataaatgaatgaaatataaactgtgagataaatatcattatagcatgtaatattaaattcctcctgtctcctctgtcagtttgtgaagtgattgacattttgtagctagtttaaaattattaaaaattatagactccagatgatctgctttaattt

SEQ ID NO: 733118 - DNA, 1628 bp, Homo sapiens
cggtattccgtgtgtgcacgtctggtgggggctttataaagtgttttcgaggtgagctgctggggaaaagggaaacgggagccctgcaaatggagcgacggggaggaagagcgagggtccagagccaaacccgtcactgaccccccagcccaggcgcccagccactccccaccgctaccatggccgaagacgcagacatgcgcaatgagctggaggagatgcagcgaagggctgaccagttggctgatgagtcgctggaaagcacccgtcgtatgctgcaactggttgaagagagtaaagatgctggtatcaggactttggttatgttggatgaacaaggagaacaactggaacgcattgaggaagggatggaccaaatcaataaggacatgaaagaagcagaaaagaatttgacggacctaggaaaattctgcgggctttgtgtgtgtccctgtaacaagcttaaatcaagtgatgcttacaaaaaagcctggggcaataatcaggacggagtggtggccagccagcctgctcgtgtagtggacgaacgggagcagatggccatcagtggcggcttcatccgcagggtaacaaatgatgcccgagaaaatgaaatggatgaaaacctagagcaggtgagcggcatcatcgggaacctccgtcacatggccctggatatgggcaatgagatcgatacacagaatcgccagatcgacaggatcatggagaagtaagtgtgcccacccgtgttctcctccaaatgctgtcgggcaagatagctccttcatgcttttctcatggtattatctagtaggtctgcacacataacacacatcagtccacccccattgtgaatgttgtcctgtgtcatctgtcagcttcccaacaatactttgtgtcttttgttctctcttggtctctttctttccaaaggttgtacatagtggtcatttggtggctctaactccttgattgtcaggctctgaatctctcaaaatgtgccgtctttggttcctcatggctgttatctgtctttatgatttcatgattagacaatgtggaattacataacaggcattgcactaaaagtgatgtgatttatgcatttatgcatgagaactaaatagatttttagattcctacttaaacaaaaactttccatgacagtagcatactgatgagacaacacacacacacacaaaacaacagcaacaacaacagaacaacaacaaagcatgctcagtattgagacactgtcaagattaagttataccagcaaaagtgcagtagtgtcacttttttcctgtcaatatatagagacttctaaatcataatcatccttttttaaaaaaaagaattttaaaaaagatggatttgacacactcaccatttaatcatttccagcaaaatatatgtttggctgaaattatgtcaaatggatgtaatatagggtttgtttgctgcttttgatggctacgttttggagagagcaatcttgctgtgaaacagtgtggatgtaaattttataaggctgactcttactaaccaccatttcccctgtggtttgttatcagtacaattctttgttgacccacaggtaccgaactcgagtcgtatcatgtcaactt

SEQ ID NO: 733119 - DNA, 1761 bp, Homo sapiens
cggtattccgtgtgtgcacgtctggtgggggctttataaagtgttttcgaggtgagctgctggggaaaagggaaacgggagccctgcaaatggagcgacggggaggaagagcgagggtccagagccaaacccgtcactgaccccccagcccaggcgcccagccactccccaccgctaccatggccgaagacgcagacatgcgcaatgagctggaggagatgcagcgaagggctgaccagttggctgatgagtcgctggaaagcacccgtcgtatgctgcaactggttgaagagagtaaagatgctggtatcaggactttggttatgttggatgaacaaggagaacaactggaacgcattgaggaagggatggaccaaatcaataaggacatgaaagaagcagaaaagaatttgacggacctaggaaaattctgcgggctttgtgtgtgtccctgtaacaagcttaaatcaagtgatgcttacaaaaaagcctggggcaataatcaggacggagtggtggccagccagcctgctcgtgtagtggacgaacgggagcagatggccatcagtggcggcttcatccgcagggtaacaaatgatgcccgagaaaatgaaatggatgaaaacctagagcaggtgagcggcatcatcgggaacctccgtcacatggccctggatatgggcaatgagatcgatacacagaatcgccagatcgacaggatcatggagaagtaagtgtgcccacccgtgttctcctccaaatgctgtcgggcaagatagctccttcatgcttttctcatggtattatctagtaggtctgcacacataacacacatcagtccacccccattgtgaatgttgtcctgtgtcatctgtcagcttcccaacaatactttgtgtcttttgttctctcttggtctctttctttccaaaggttgtacatagtggtcatttggtggctctaactccttgattgtcaggctctgaatctctcaaaatgtgccgtctttggttcctcatggctgttatctgtctttatgatttcatgattagacaatgtggaattacataacaggcattgcactaaaagtgatgtgatttatgcatttatgcatgagaactaaatagatttttagattcctacttaaacaaaaactttccatgacagtagcatactgatgagacaacacacacacacacaaaacaacagcaacaacaacagaacaacaacaaagcatgctcagtattgagacactgtcaagattaagttataccagcaaaagtgcagtagtgtcacttttttcctgtcaatatatagagacttctaaatcataatcatccttttttcaaaatatatgtttggctgaaattatgtcaaatggatgtaatatagggtttgtttgctgcttttgatggctacgttttggagagagcaatcttgctgtgaaacagtgtggatgtaaattttataaggctgactcttactaaccaccatttcccctgtggtttgttatcagtacaattctttgttgcttaatctagagctatgcacaccaaattgctgagatgtttagtagctgataaagaaaccttttaaaaaaataatataaatgaatgaaatataaactgtgagataaatatcattatagcatgtaatattaaattcctcctgtctcctctgtcagtttgtgaagtgattgacattttgtagctagtttaaaattattaaaaattatagactccagatgatctgctttaattt

SEQ ID NO: 733120 - DNA, 2014 bp, Homo sapiens
agcggggccatctttgatgagggcagagctcacgttgcattgaagacgaaacctcggggaggtcaggcgctgtctttccttccctccctgctcggcggctccaccacagttgcaacctgcagaggcccggagaacacaaccctcccgagaagcccaggtccagagccaaacccgtcactgaccccccagcccaggcgcccagccactccccaccgctaccatggccgaagacgcagacatgcgcaatgagctggaggagatgcagcgaagggctgaccagttggctgatgagtcgctggaaagcacccgtcgtatgctgcaactggttgaagagagtaaagatgctggtatcaggactttggttatgttggatgaacaaggagaacaactggaacgcattgaggaagggatggaccaaatcaataaggacatgaaagaagcagaaaagaatttgacggacctaggaaaattctgcgggctttgtgtgtgtccctgtaacaagcttaaatcaagtgatgcttacaaaaaagcctggggcaataatcaggacggagtggtggccagccagcctgctcgtgtagtggacgaacgggagcagatggccatcagtggcggcttcatccgcagggtaacaaatgatgcccgagaaaatgaaatggatgaaaacctagagcaggtgagcggcatcatcgggaacctccgtcacatggccctggatatgggcaatgagatcgatacacagaatcgccagatcgacaggatcatggagaagtaagtgtgcccacccgtgttctcctccaaatgctgtcgggcaagatagctccttcatgcttttctcatggtattatctagtaggtctgcacacataacacacatcagtccacccccattgtgaatgttgtcctgtgtcatctgtcagcttcccaacaatactttgtgtcttttgttctctcttggtctctttctttccaaaggttgtacatagtggtcatttggtggctctaactccttgatgtcttgagtttcatttttcattttctctcctcggtggcatttgctgaataacaacaatttaggaatgctcaatgtgctgttgattctttcaatccacagtattgttcttgtaaaactgtgacattccacagagttactgccacggtcctttgagtgtcaggctctgaatctctcaaaatgtgccgtctttggttcctcatggctgttatctgtctttatgatttcatgattagacaatgtggaattacataacaggcattgcactaaaagtgatgtgatttatgcatttatgcatgagaactaaatagatttttagattcctacttaaacaaaaactttccatgacagtagcatactgatgagacaacacacacacacacaaaacaacagcaacaacaacagaacaacaacaaagcatgctcagtattgagacactgtcaagattaagttataccagcaaaagtgcagtagtgtcacttttttcctgtcaatatatagagacttctaaatcataatcatccttttttaaaaaaaagaattttaaaaaagatggatttgacacactcaccatttaatcatttccagcaaaatatatgtttggctgaaattatgtcaaatggatgtaatatagggtttgtttgctgcttttgatggctacgttttggagagagcaatcttgctgtgaaacagtgtggatgtaaattttataaggctgactcttactaaccaccatttcccctgtggtttgttatcagtacaattctttgttgcttaatctagagctatgcacaccaaattgctgagatgtttagtagctgataaagaaaccttttaaaaaaataatataaatgaatgaaatataaactgtgagataaatatcattatagcatgtaatattaaattcctcctgtctcctctgtcagtttgtgaagtgattgacattttgtagctagtttaaaattattaaaaattatagactccagatgatctgctttaattt

SEQ ID NO: 733121 - DNA, 1823 bp, Homo sapiens
agcggggccatctttgatgagggcagagctcacgttgcattgaagacgaaacctcggggaggtcaggcgctgtctttccttccctccctgctcggcggctccaccacagttgcaacctgcagaggcccggagaacacaaccctcccgagaagcccaggtccagagccaaacccgtcactgaccccccagcccaggcgcccagccactccccaccgctaccatggccgaagacgcagacatgcgcaatgagctggaggagatgcagcgaagggctgaccagttggctgatgagtcgctggaaagcacccgtcgtatgctgcaactggttgaagagagtaaagatgctggtatcaggactttggttatgttggatgaacaaggagaacaactggaacgcattgaggaagggatggaccaaatcaataaggacatgaaagaagcagaaaagaatttgacggacctaggaaaattctgcgggctttgtgtgtgtccctgtaacaagcttaaatcaagtgatgcttacaaaaaagcctggggcaataatcaggacggagtggtggccagccagcctgctcgtgtagtggacgaacgggagcagatggccatcagtggcggcttcatccgcagggtaacaaatgatgcccgagaaaatgaaatggatgaaaacctagagcaggtgagcggcatcatcgggaacctccgtcacatggccctggatatgggcaatgagatcgatacacagaatcgccagatcgacaggatcatggagaagtaagtgtgcccacccgtgttctcctccaaatgctgtcgggcaagatagctccttcatgcttttctcatggtattatctagtaggtctgcacacataacacacatcagtccacccccattgtgaatgttgtcctgtgtcatctgtcagcttcccaacaatactttgtgtcttttgttctctcttggtctctttctttccaaaggttgtacatagtggtcatttggtggctctaactccttgatgtcttgagtttcatttttcattttctctcctcggtggcatttgctgaataacaacaatttaggaatgctcaatgtgctgttgattctttcaatccacagtattgttcttgtaaaactgtgacattccacagagttactgccacggtcctttgagtgtcaggctctgaatctctcaaaatgtgccgtctttggttcctcatggctgttatctgtctttatgatttcatgattagacaatgtggaattacataacaggcattgcactaaaagtgatgtgatttatgcatttatgcatgagaactaaatagatttttagattcctacttaaacaaaaactttccatgacagtagcatactgatgagacaacacacacacacacaaaacaacagcaacaacaacagaacaacaacaaagcatgctcagtattgagacactgtcaagattaagttataccagcaaaagtgcagtagtgtcacttttttcctgtcaatatatagagacttctaaatcataatcatccttttttaaaaaaaagaattttaaaaaagatggatttgacacactcaccatttaatcatttccagcaaaatatatgtttggctgaaattatgtcaaatggatgtaatatagggtttgtttgctgcttttgatggctacgttttggagagagcaatcttgctgtgaaacagtgtggatgtaaattttataaggctgactcttactaaccaccatttcccctgtggtttgttatcagtacaattctttgttgacccacaggtaccgaactcgagtcgtatcatgtcaactt

SEQ ID NO: 733122 - DNA, 1956 bp, Homo sapiens
agcggggccatctttgatgagggcagagctcacgttgcattgaagacgaaacctcggggaggtcaggcgctgtctttccttccctccctgctcggcggctccaccacagttgcaacctgcagaggcccggagaacacaaccctcccgagaagcccaggtccagagccaaacccgtcactgaccccccagcccaggcgcccagccactccccaccgctaccatggccgaagacgcagacatgcgcaatgagctggaggagatgcagcgaagggctgaccagttggctgatgagtcgctggaaagcacccgtcgtatgctgcaactggttgaagagagtaaagatgctggtatcaggactttggttatgttggatgaacaaggagaacaactggaacgcattgaggaagggatggaccaaatcaataaggacatgaaagaagcagaaaagaatttgacggacctaggaaaattctgcgggctttgtgtgtgtccctgtaacaagcttaaatcaagtgatgcttacaaaaaagcctggggcaataatcaggacggagtggtggccagccagcctgctcgtgtagtggacgaacgggagcagatggccatcagtggcggcttcatccgcagggtaacaaatgatgcccgagaaaatgaaatggatgaaaacctagagcaggtgagcggcatcatcgggaacctccgtcacatggccctggatatgggcaatgagatcgatacacagaatcgccagatcgacaggatcatggagaagtaagtgtgcccacccgtgttctcctccaaatgctgtcgggcaagatagctccttcatgcttttctcatggtattatctagtaggtctgcacacataacacacatcagtccacccccattgtgaatgttgtcctgtgtcatctgtcagcttcccaacaatactttgtgtcttttgttctctcttggtctctttctttccaaaggttgtacatagtggtcatttggtggctctaactccttgatgtcttgagtttcatttttcattttctctcctcggtggcatttgctgaataacaacaatttaggaatgctcaatgtgctgttgattctttcaatccacagtattgttcttgtaaaactgtgacattccacagagttactgccacggtcctttgagtgtcaggctctgaatctctcaaaatgtgccgtctttggttcctcatggctgttatctgtctttatgatttcatgattagacaatgtggaattacataacaggcattgcactaaaagtgatgtgatttatgcatttatgcatgagaactaaatagatttttagattcctacttaaacaaaaactttccatgacagtagcatactgatgagacaacacacacacacacaaaacaacagcaacaacaacagaacaacaacaaagcatgctcagtattgagacactgtcaagattaagttataccagcaaaagtgcagtagtgtcacttttttcctgtcaatatatagagacttctaaatcataatcatccttttttcaaaatatatgtttggctgaaattatgtcaaatggatgtaatatagggtttgtttgctgcttttgatggctacgttttggagagagcaatcttgctgtgaaacagtgtggatgtaaattttataaggctgactcttactaaccaccatttcccctgtggtttgttatcagtacaattctttgttgcttaatctagagctatgcacaccaaattgctgagatgtttagtagctgataaagaaaccttttaaaaaaataatataaatgaatgaaatataaactgtgagataaatatcattatagcatgtaatattaaattcctcctgtctcctctgtcagtttgtgaagtgattgacattttgtagctagtttaaaattattaaaaattatagactccagatgatctgctttaattt

SEQ ID NO: 733123 - DNA, 1860 bp, Homo sapiens
agcggggccatctttgatgagggcagagctcacgttgcattgaagacgaaacctcggggaggtcaggcgctgtctttccttccctccctgctcggcggctccaccacagttgcaacctgcagaggcccggagaacacaaccctcccgagaagcccaggtccagagccaaacccgtcactgaccccccagcccaggcgcccagccactccccaccgctaccatggccgaagacgcagacatgcgcaatgagctggaggagatgcagcgaagggctgaccagttggctgatgagtcgctggaaagcacccgtcgtatgctgcaactggttgaagagagtaaagatgctggtatcaggactttggttatgttggatgaacaaggagaacaactggaacgcattgaggaagggatggaccaaatcaataaggacatgaaagaagcagaaaagaatttgacggacctaggaaaattctgcgggctttgtgtgtgtccctgtaacaagcttaaatcaagtgatgcttacaaaaaagcctggggcaataatcaggacggagtggtggccagccagcctgctcgtgtagtggacgaacgggagcagatggccatcagtggcggcttcatccgcagggtaacaaatgatgcccgagaaaatgaaatggatgaaaacctagagcaggtgagcggcatcatcgggaacctccgtcacatggccctggatatgggcaatgagatcgatacacagaatcgccagatcgacaggatcatggagaagtaagtgtgcccacccgtgttctcctccaaatgctgtcgggcaagatagctccttcatgcttttctcatggtattatctagtaggtctgcacacataacacacatcagtccacccccattgtgaatgttgtcctgtgtcatctgtcagcttcccaacaatactttgtgtcttttgttctctcttggtctctttctttccaaaggttgtacatagtggtcatttggtggctctaactccttgattgtcaggctctgaatctctcaaaatgtgccgtctttggttcctcatggctgttatctgtctttatgatttcatgattagacaatgtggaattacataacaggcattgcactaaaagtgatgtgatttatgcatttatgcatgagaactaaatagatttttagattcctacttaaacaaaaactttccatgacagtagcatactgatgagacaacacacacacacacaaaacaacagcaacaacaacagaacaacaacaaagcatgctcagtattgagacactgtcaagattaagttataccagcaaaagtgcagtagtgtcacttttttcctgtcaatatatagagacttctaaatcataatcatccttttttaaaaaaaagaattttaaaaaagatggatttgacacactcaccatttaatcatttccagcaaaatatatgtttggctgaaattatgtcaaatggatgtaatatagggtttgtttgctgcttttgatggctacgttttggagagagcaatcttgctgtgaaacagtgtggatgtaaattttataaggctgactcttactaaccaccatttcccctgtggtttgttatcagtacaattctttgttgcttaatctagagctatgcacaccaaattgctgagatgtttagtagctgataaagaaaccttttaaaaaaataatataaatgaatgaaatataaactgtgagataaatatcattatagcatgtaatattaaattcctcctgtctcctctgtcagtttgtgaagtgattgacattttgtagctagtttaaaattattaaaaattatagactccagatgatctgctttaattt

SEQ ID NO: 733124 - DNA, 1669 bp, Homo sapiens
agcggggccatctttgatgagggcagagctcacgttgcattgaagacgaaacctcggggaggtcaggcgctgtctttccttccctccctgctcggcggctccaccacagttgcaacctgcagaggcccggagaacacaaccctcccgagaagcccaggtccagagccaaacccgtcactgaccccccagcccaggcgcccagccactccccaccgctaccatggccgaagacgcagacatgcgcaatgagctggaggagatgcagcgaagggctgaccagttggctgatgagtcgctggaaagcacccgtcgtatgctgcaactggttgaagagagtaaagatgctggtatcaggactttggttatgttggatgaacaaggagaacaactggaacgcattgaggaagggatggaccaaatcaataaggacatgaaagaagcagaaaagaatttgacggacctaggaaaattctgcgggctttgtgtgtgtccctgtaacaagcttaaatcaagtgatgcttacaaaaaagcctggggcaataatcaggacggagtggtggccagccagcctgctcgtgtagtggacgaacgggagcagatggccatcagtggcggcttcatccgcagggtaacaaatgatgcccgagaaaatgaaatggatgaaaacctagagcaggtgagcggcatcatcgggaacctccgtcacatggccctggatatgggcaatgagatcgatacacagaatcgccagatcgacaggatcatggagaagtaagtgtgcccacccgtgttctcctccaaatgctgtcgggcaagatagctccttcatgcttttctcatggtattatctagtaggtctgcacacataacacacatcagtccacccccattgtgaatgttgtcctgtgtcatctgtcagcttcccaacaatactttgtgtcttttgttctctcttggtctctttctttccaaaggttgtacatagtggtcatttggtggctctaactccttgattgtcaggctctgaatctctcaaaatgtgccgtctttggttcctcatggctgttatctgtctttatgatttcatgattagacaatgtggaattacataacaggcattgcactaaaagtgatgtgatttatgcatttatgcatgagaactaaatagatttttagattcctacttaaacaaaaactttccatgacagtagcatactgatgagacaacacacacacacacaaaacaacagcaacaacaacagaacaacaacaaagcatgctcagtattgagacactgtcaagattaagttataccagcaaaagtgcagtagtgtcacttttttcctgtcaatatatagagacttctaaatcataatcatccttttttaaaaaaaagaattttaaaaaagatggatttgacacactcaccatttaatcatttccagcaaaatatatgtttggctgaaattatgtcaaatggatgtaatatagggtttgtttgctgcttttgatggctacgttttggagagagcaatcttgctgtgaaacagtgtggatgtaaattttataaggctgactcttactaaccaccatttcccctgtggtttgttatcagtacaattctttgttgacccacaggtaccgaactcgagtcgtatcatgtcaactt

SEQ ID NO: 733125 - DNA, 1802 bp, Homo sapiens
agcggggccatctttgatgagggcagagctcacgttgcattgaagacgaaacctcggggaggtcaggcgctgtctttccttccctccctgctcggcggctccaccacagttgcaacctgcagaggcccggagaacacaaccctcccgagaagcccaggtccagagccaaacccgtcactgaccccccagcccaggcgcccagccactccccaccgctaccatggccgaagacgcagacatgcgcaatgagctggaggagatgcagcgaagggctgaccagttggctgatgagtcgctggaaagcacccgtcgtatgctgcaactggttgaagagagtaaagatgctggtatcaggactttggttatgttggatgaacaaggagaacaactggaacgcattgaggaagggatggaccaaatcaataaggacatgaaagaagcagaaaagaatttgacggacctaggaaaattctgcgggctttgtgtgtgtccctgtaacaagcttaaatcaagtgatgcttacaaaaaagcctggggcaataatcaggacggagtggtggccagccagcctgctcgtgtagtggacgaacgggagcagatggccatcagtggcggcttcatccgcagggtaacaaatgatgcccgagaaaatgaaatggatgaaaacctagagcaggtgagcggcatcatcgggaacctccgtcacatggccctggatatgggcaatgagatcgatacacagaatcgccagatcgacaggatcatggagaagtaagtgtgcccacccgtgttctcctccaaatgctgtcgggcaagatagctccttcatgcttttctcatggtattatctagtaggtctgcacacataacacacatcagtccacccccattgtgaatgttgtcctgtgtcatctgtcagcttcccaacaatactttgtgtcttttgttctctcttggtctctttctttccaaaggttgtacatagtggtcatttggtggctctaactccttgattgtcaggctctgaatctctcaaaatgtgccgtctttggttcctcatggctgttatctgtctttatgatttcatgattagacaatgtggaattacataacaggcattgcactaaaagtgatgtgatttatgcatttatgcatgagaactaaatagatttttagattcctacttaaacaaaaactttccatgacagtagcatactgatgagacaacacacacacacacaaaacaacagcaacaacaacagaacaacaacaaagcatgctcagtattgagacactgtcaagattaagttataccagcaaaagtgcagtagtgtcacttttttcctgtcaatatatagagacttctaaatcataatcatccttttttcaaaatatatgtttggctgaaattatgtcaaatggatgtaatatagggtttgtttgctgcttttgatggctacgttttggagagagcaatcttgctgtgaaacagtgtggatgtaaattttataaggctgactcttactaaccaccatttcccctgtggtttgttatcagtacaattctttgttgcttaatctagagctatgcacaccaaattgctgagatgtttagtagctgataaagaaaccttttaaaaaaataatataaatgaatgaaatataaactgtgagataaatatcattatagcatgtaatattaaattcctcctgtctcctctgtcagtttgtgaagtgattgacattttgtagctagtttaaaattattaaaaattatagactccagatgatctgctttaattt

SEQ ID NO: 733126 - DNA, 2014 bp, Homo sapiens
agcggggccatctttgatgagggcagagctcacgttgcattgaagacgaaacctcggggaggtcaggcgctgtctttccttccctccctgctcggcggctccaccacagttgcaacctgcagaggcccggagaacacaaccctcccgagaagcccaggtccagagccaaacccgtcactgaccccccagcccaggcgcccagccactccccaccgctaccatggccgaagacgcagacatgcgcaatgagctggaggagatgcagcgaagggctgaccagttggctgatgagtcgctggaaagcacccgtcgtatgctgcaactggttgaagagagtaaagatgctggtatcaggactttggttatgttggatgaacaaggagaacaactcgatcgtgtcgaagaaggcatgaaccatatcaaccaagacatgaaggaggctgagaaaaatttaaaagatttagggaaatgctgtggccttttcatatgtccttgtaacaagcttaaatcaagtgatgcttacaaaaaagcctggggcaataatcaggacggagtggtggccagccagcctgctcgtgtagtggacgaacgggagcagatggccatcagtggcggcttcatccgcagggtaacaaatgatgcccgagaaaatgaaatggatgaaaacctagagcaggtgagcggcatcatcgggaacctccgtcacatggccctggatatgggcaatgagatcgatacacagaatcgccagatcgacaggatcatggagaagtaagtgtgcccacccgtgttctcctccaaatgctgtcgggcaagatagctccttcatgcttttctcatggtattatctagtaggtctgcacacataacacacatcagtccacccccattgtgaatgttgtcctgtgtcatctgtcagcttcccaacaatactttgtgtcttttgttctctcttggtctctttctttccaaaggttgtacatagtggtcatttggtggctctaactccttgatgtcttgagtttcatttttcattttctctcctcggtggcatttgctgaataacaacaatttaggaatgctcaatgtgctgttgattctttcaatccacagtattgttcttgtaaaactgtgacattccacagagttactgccacggtcctttgagtgtcaggctctgaatctctcaaaatgtgccgtctttggttcctcatggctgttatctgtctttatgatttcatgattagacaatgtggaattacataacaggcattgcactaaaagtgatgtgatttatgcatttatgcatgagaactaaatagatttttagattcctacttaaacaaaaactttccatgacagtagcatactgatgagacaacacacacacacacaaaacaacagcaacaacaacagaacaacaacaaagcatgctcagtattgagacactgtcaagattaagttataccagcaaaagtgcagtagtgtcacttttttcctgtcaatatatagagacttctaaatcataatcatccttttttaaaaaaaagaattttaaaaaagatggatttgacacactcaccatttaatcatttccagcaaaatatatgtttggctgaaattatgtcaaatggatgtaatatagggtttgtttgctgcttttgatggctacgttttggagagagcaatcttgctgtgaaacagtgtggatgtaaattttataaggctgactcttactaaccaccatttcccctgtggtttgttatcagtacaattctttgttgcttaatctagagctatgcacaccaaattgctgagatgtttagtagctgataaagaaaccttttaaaaaaataatataaatgaatgaaatataaactgtgagataaatatcattatagcatgtaatattaaattcctcctgtctcctctgtcagtttgtgaagtgattgacattttgtagctagtttaaaattattaaaaattatagactccagatgatctgctttaattt

SEQ ID NO: 733127 - DNA, 1823 bp, Homo sapiens
agcggggccatctttgatgagggcagagctcacgttgcattgaagacgaaacctcggggaggtcaggcgctgtctttccttccctccctgctcggcggctccaccacagttgcaacctgcagaggcccggagaacacaaccctcccgagaagcccaggtccagagccaaacccgtcactgaccccccagcccaggcgcccagccactccccaccgctaccatggccgaagacgcagacatgcgcaatgagctggaggagatgcagcgaagggctgaccagttggctgatgagtcgctggaaagcacccgtcgtatgctgcaactggttgaagagagtaaagatgctggtatcaggactttggttatgttggatgaacaaggagaacaactcgatcgtgtcgaagaaggcatgaaccatatcaaccaagacatgaaggaggctgagaaaaatttaaaagatttagggaaatgctgtggccttttcatatgtccttgtaacaagcttaaatcaagtgatgcttacaaaaaagcctggggcaataatcaggacggagtggtggccagccagcctgctcgtgtagtggacgaacgggagcagatggccatcagtggcggcttcatccgcagggtaacaaatgatgcccgagaaaatgaaatggatgaaaacctagagcaggtgagcggcatcatcgggaacctccgtcacatggccctggatatgggcaatgagatcgatacacagaatcgccagatcgacaggatcatggagaagtaagtgtgcccacccgtgttctcctccaaatgctgtcgggcaagatagctccttcatgcttttctcatggtattatctagtaggtctgcacacataacacacatcagtccacccccattgtgaatgttgtcctgtgtcatctgtcagcttcccaacaatactttgtgtcttttgttctctcttggtctctttctttccaaaggttgtacatagtggtcatttggtggctctaactccttgatgtcttgagtttcatttttcattttctctcctcggtggcatttgctgaataacaacaatttaggaatgctcaatgtgctgttgattctttcaatccacagtattgttcttgtaaaactgtgacattccacagagttactgccacggtcctttgagtgtcaggctctgaatctctcaaaatgtgccgtctttggttcctcatggctgttatctgtctttatgatttcatgattagacaatgtggaattacataacaggcattgcactaaaagtgatgtgatttatgcatttatgcatgagaactaaatagatttttagattcctacttaaacaaaaactttccatgacagtagcatactgatgagacaacacacacacacacaaaacaacagcaacaacaacagaacaacaacaaagcatgctcagtattgagacactgtcaagattaagttataccagcaaaagtgcagtagtgtcacttttttcctgtcaatatatagagacttctaaatcataatcatccttttttaaaaaaaagaattttaaaaaagatggatttgacacactcaccatttaatcatttccagcaaaatatatgtttggctgaaattatgtcaaatggatgtaatatagggtttgtttgctgcttttgatggctacgttttggagagagcaatcttgctgtgaaacagtgtggatgtaaattttataaggctgactcttactaaccaccatttcccctgtggtttgttatcagtacaattctttgttgacccacaggtaccgaactcgagtcgtatcatgtcaactt

SEQ ID NO: 733128 - DNA, 1956 bp, Homo sapiens
agcggggccatctttgatgagggcagagctcacgttgcattgaagacgaaacctcggggaggtcaggcgctgtctttccttccctccctgctcggcggctccaccacagttgcaacctgcagaggcccggagaacacaaccctcccgagaagcccaggtccagagccaaacccgtcactgaccccccagcccaggcgcccagccactccccaccgctaccatggccgaagacgcagacatgcgcaatgagctggaggagatgcagcgaagggctgaccagttggctgatgagtcgctggaaagcacccgtcgtatgctgcaactggttgaagagagtaaagatgctggtatcaggactttggttatgttggatgaacaaggagaacaactcgatcgtgtcgaagaaggcatgaaccatatcaaccaagacatgaaggaggctgagaaaaatttaaaagatttagggaaatgctgtggccttttcatatgtccttgtaacaagcttaaatcaagtgatgcttacaaaaaagcctggggcaataatcaggacggagtggtggccagccagcctgctcgtgtagtggacgaacgggagcagatggccatcagtggcggcttcatccgcagggtaacaaatgatgcccgagaaaatgaaatggatgaaaacctagagcaggtgagcggcatcatcgggaacctccgtcacatggccctggatatgggcaatgagatcgatacacagaatcgccagatcgacaggatcatggagaagtaagtgtgcccacccgtgttctcctccaaatgctgtcgggcaagatagctccttcatgcttttctcatggtattatctagtaggtctgcacacataacacacatcagtccacccccattgtgaatgttgtcctgtgtcatctgtcagcttcccaacaatactttgtgtcttttgttctctcttggtctctttctttccaaaggttgtacatagtggtcatttggtggctctaactccttgatgtcttgagtttcatttttcattttctctcctcggtggcatttgctgaataacaacaatttaggaatgctcaatgtgctgttgattctttcaatccacagtattgttcttgtaaaactgtgacattccacagagttactgccacggtcctttgagtgtcaggctctgaatctctcaaaatgtgccgtctttggttcctcatggctgttatctgtctttatgatttcatgattagacaatgtggaattacataacaggcattgcactaaaagtgatgtgatttatgcatttatgcatgagaactaaatagatttttagattcctacttaaacaaaaactttccatgacagtagcatactgatgagacaacacacacacacacaaaacaacagcaacaacaacagaacaacaacaaagcatgctcagtattgagacactgtcaagattaagttataccagcaaaagtgcagtagtgtcacttttttcctgtcaatatatagagacttctaaatcataatcatccttttttcaaaatatatgtttggctgaaattatgtcaaatggatgtaatatagggtttgtttgctgcttttgatggctacgttttggagagagcaatcttgctgtgaaacagtgtggatgtaaattttataaggctgactcttactaaccaccatttcccctgtggtttgttatcagtacaattctttgttgcttaatctagagctatgcacaccaaattgctgagatgtttagtagctgataaagaaaccttttaaaaaaataatataaatgaatgaaatataaactgtgagataaatatcattatagcatgtaatattaaattcctcctgtctcctctgtcagtttgtgaagtgattgacattttgtagctagtttaaaattattaaaaattatagactccagatgatctgctttaattt

SEQ ID NO: 733129 - DNA, 1860 bp, Homo sapiens
agcggggccatctttgatgagggcagagctcacgttgcattgaagacgaaacctcggggaggtcaggcgctgtctttccttccctccctgctcggcggctccaccacagttgcaacctgcagaggcccggagaacacaaccctcccgagaagcccaggtccagagccaaacccgtcactgaccccccagcccaggcgcccagccactccccaccgctaccatggccgaagacgcagacatgcgcaatgagctggaggagatgcagcgaagggctgaccagttggctgatgagtcgctggaaagcacccgtcgtatgctgcaactggttgaagagagtaaagatgctggtatcaggactttggttatgttggatgaacaaggagaacaactcgatcgtgtcgaagaaggcatgaaccatatcaaccaagacatgaaggaggctgagaaaaatttaaaagatttagggaaatgctgtggccttttcatatgtccttgtaacaagcttaaatcaagtgatgcttacaaaaaagcctggggcaataatcaggacggagtggtggccagccagcctgctcgtgtagtggacgaacgggagcagatggccatcagtggcggcttcatccgcagggtaacaaatgatgcccgagaaaatgaaatggatgaaaacctagagcaggtgagcggcatcatcgggaacctccgtcacatggccctggatatgggcaatgagatcgatacacagaatcgccagatcgacaggatcatggagaagtaagtgtgcccacccgtgttctcctccaaatgctgtcgggcaagatagctccttcatgcttttctcatggtattatctagtaggtctgcacacataacacacatcagtccacccccattgtgaatgttgtcctgtgtcatctgtcagcttcccaacaatactttgtgtcttttgttctctcttggtctctttctttccaaaggttgtacatagtggtcatttggtggctctaactccttgattgtcaggctctgaatctctcaaaatgtgccgtctttggttcctcatggctgttatctgtctttatgatttcatgattagacaatgtggaattacataacaggcattgcactaaaagtgatgtgatttatgcatttatgcatgagaactaaatagatttttagattcctacttaaacaaaaactttccatgacagtagcatactgatgagacaacacacacacacacaaaacaacagcaacaacaacagaacaacaacaaagcatgctcagtattgagacactgtcaagattaagttataccagcaaaagtgcagtagtgtcacttttttcctgtcaatatatagagacttctaaatcataatcatccttttttaaaaaaaagaattttaaaaaagatggatttgacacactcaccatttaatcatttccagcaaaatatatgtttggctgaaattatgtcaaatggatgtaatatagggtttgtttgctgcttttgatggctacgttttggagagagcaatcttgctgtgaaacagtgtggatgtaaattttataaggctgactcttactaaccaccatttcccctgtggtttgttatcagtacaattctttgttgcttaatctagagctatgcacaccaaattgctgagatgtttagtagctgataaagaaaccttttaaaaaaataatataaatgaatgaaatataaactgtgagataaatatcattatagcatgtaatattaaattcctcctgtctcctctgtcagtttgtgaagtgattgacattttgtagctagtttaaaattattaaaaattatagactccagatgatctgctttaattt

SEQ ID NO: 733130 - DNA, 1669 bp, Homo sapiens
agcggggccatctttgatgagggcagagctcacgttgcattgaagacgaaacctcggggaggtcaggcgctgtctttccttccctccctgctcggcggctccaccacagttgcaacctgcagaggcccggagaacacaaccctcccgagaagcccaggtccagagccaaacccgtcactgaccccccagcccaggcgcccagccactccccaccgctaccatggccgaagacgcagacatgcgcaatgagctggaggagatgcagcgaagggctgaccagttggctgatgagtcgctggaaagcacccgtcgtatgctgcaactggttgaagagagtaaagatgctggtatcaggactttggttatgttggatgaacaaggagaacaactcgatcgtgtcgaagaaggcatgaaccatatcaaccaagacatgaaggaggctgagaaaaatttaaaagatttagggaaatgctgtggccttttcatatgtccttgtaacaagcttaaatcaagtgatgcttacaaaaaagcctggggcaataatcaggacggagtggtggccagccagcctgctcgtgtagtggacgaacgggagcagatggccatcagtggcggcttcatccgcagggtaacaaatgatgcccgagaaaatgaaatggatgaaaacctagagcaggtgagcggcatcatcgggaacctccgtcacatggccctggatatgggcaatgagatcgatacacagaatcgccagatcgacaggatcatggagaagtaagtgtgcccacccgtgttctcctccaaatgctgtcgggcaagatagctccttcatgcttttctcatggtattatctagtaggtctgcacacataacacacatcagtccacccccattgtgaatgttgtcctgtgtcatctgtcagcttcccaacaatactttgtgtcttttgttctctcttggtctctttctttccaaaggttgtacatagtggtcatttggtggctctaactccttgattgtcaggctctgaatctctcaaaatgtgccgtctttggttcctcatggctgttatctgtctttatgatttcatgattagacaatgtggaattacataacaggcattgcactaaaagtgatgtgatttatgcatttatgcatgagaactaaatagatttttagattcctacttaaacaaaaactttccatgacagtagcatactgatgagacaacacacacacacacaaaacaacagcaacaacaacagaacaacaacaaagcatgctcagtattgagacactgtcaagattaagttataccagcaaaagtgcagtagtgtcacttttttcctgtcaatatatagagacttctaaatcataatcatccttttttaaaaaaaagaattttaaaaaagatggatttgacacactcaccatttaatcatttccagcaaaatatatgtttggctgaaattatgtcaaatggatgtaatatagggtttgtttgctgcttttgatggctacgttttggagagagcaatcttgctgtgaaacagtgtggatgtaaattttataaggctgactcttactaaccaccatttcccctgtggtttgttatcagtacaattctttgttgacccacaggtaccgaactcgagtcgtatcatgtcaactt

SEQ ID NO: 733131 - DNA, 1802 bp, Homo sapiens
agcggggccatctttgatgagggcagagctcacgttgcattgaagacgaaacctcggggaggtcaggcgctgtctttccttccctccctgctcggcggctccaccacagttgcaacctgcagaggcccggagaacacaaccctcccgagaagcccaggtccagagccaaacccgtcactgaccccccagcccaggcgcccagccactccccaccgctaccatggccgaagacgcagacatgcgcaatgagctggaggagatgcagcgaagggctgaccagttggctgatgagtcgctggaaagcacccgtcgtatgctgcaactggttgaagagagtaaagatgctggtatcaggactttggttatgttggatgaacaaggagaacaactcgatcgtgtcgaagaaggcatgaaccatatcaaccaagacatgaaggaggctgagaaaaatttaaaagatttagggaaatgctgtggccttttcatatgtccttgtaacaagcttaaatcaagtgatgcttacaaaaaagcctggggcaataatcaggacggagtggtggccagccagcctgctcgtgtagtggacgaacgggagcagatggccatcagtggcggcttcatccgcagggtaacaaatgatgcccgagaaaatgaaatggatgaaaacctagagcaggtgagcggcatcatcgggaacctccgtcacatggccctggatatgggcaatgagatcgatacacagaatcgccagatcgacaggatcatggagaagtaagtgtgcccacccgtgttctcctccaaatgctgtcgggcaagatagctccttcatgcttttctcatggtattatctagtaggtctgcacacataacacacatcagtccacccccattgtgaatgttgtcctgtgtcatctgtcagcttcccaacaatactttgtgtcttttgttctctcttggtctctttctttccaaaggttgtacatagtggtcatttggtggctctaactccttgattgtcaggctctgaatctctcaaaatgtgccgtctttggttcctcatggctgttatctgtctttatgatttcatgattagacaatgtggaattacataacaggcattgcactaaaagtgatgtgatttatgcatttatgcatgagaactaaatagatttttagattcctacttaaacaaaaactttccatgacagtagcatactgatgagacaacacacacacacacaaaacaacagcaacaacaacagaacaacaacaaagcatgctcagtattgagacactgtcaagattaagttataccagcaaaagtgcagtagtgtcacttttttcctgtcaatatatagagacttctaaatcataatcatccttttttcaaaatatatgtttggctgaaattatgtcaaatggatgtaatatagggtttgtttgctgcttttgatggctacgttttggagagagcaatcttgctgtgaaacagtgtggatgtaaattttataaggctgactcttactaaccaccatttcccctgtggtttgttatcagtacaattctttgttgcttaatctagagctatgcacaccaaattgctgagatgtttagtagctgataaagaaaccttttaaaaaaataatataaatgaatgaaatataaactgtgagataaatatcattatagcatgtaatattaaattcctcctgtctcctctgtcagtttgtgaagtgattgacattttgtagctagtttaaaattattaaaaattatagactccagatgatctgctttaattt

SEQ ID NO: 733132 - DNA, 1927 bp, Homo sapiens
agcggggccatctttgatgagggcagagctcacgttgcattgaagacgaaacctcggggaggtcaggcgctgtctttccttccctccctgctcggcggctccaccacagttgcaacctgcagaggcccggagaacacaaccctcccgagaagcccaggtccagagccaaacccgtcactgaccccccagcccaggcgcccagccactccccaccgctaccatggccgaagaacaactggaacgcattgaggaagggatggaccaaatcaataaggacatgaaagaagcagaaaagaatttgacggacctaggaaaattctgcgggctttgtgtgtgtccctgtaacaagcttaaatcaagtgatgcttacaaaaaagcctggggcaataatcaggacggagtggtggccagccagcctgctcgtgtagtggacgaacgggagcagatggccatcagtggcggcttcatccgcagggtaacaaatgatgcccgagaaaatgaaatggatgaaaacctagagcaggtgagcggcatcatcgggaacctccgtcacatggccctggatatgggcaatgagatcgatacacagaatcgccagatcgacaggatcatggagaaggctgattccaacaaaaccagaattgatgaggccaaccaacgtgcaacaaagatgctgggaagtggttaagtgtgcccacccgtgttctcctccaaatgctgtcgggcaagatagctccttcatgcttttctcatggtattatctagtaggtctgcacacataacacacatcagtccacccccattgtgaatgttgtcctgtgtcatctgtcagcttcccaacaatactttgtgtcttttgttctctcttggtctctttctttccaaaggttgtacatagtggtcatttggtggctctaactccttgatgtcttgagtttcatttttcattttctctcctcggtggcatttgctgaataacaacaatttaggaatgctcaatgtgctgttgattctttcaatccacagtattgttcttgtaaaactgtgacattccacagagttactgccacggtcctttgagtgtcaggctctgaatctctcaaaatgtgccgtctttggttcctcatggctgttatctgtctttatgatttcatgattagacaatgtggaattacataacaggcattgcactaaaagtgatgtgatttatgcatttatgcatgagaactaaatagatttttagattcctacttaaacaaaaactttccatgacagtagcatactgatgagacaacacacacacacacaaaacaacagcaacaacaacagaacaacaacaaagcatgctcagtattgagacactgtcaagattaagttataccagcaaaagtgcagtagtgtcacttttttcctgtcaatatatagagacttctaaatcataatcatccttttttaaaaaaaagaattttaaaaaagatggatttgacacactcaccatttaatcatttccagcaaaatatatgtttggctgaaattatgtcaaatggatgtaatatagggtttgtttgctgcttttgatggctacgttttggagagagcaatcttgctgtgaaacagtgtggatgtaaattttataaggctgactcttactaaccaccatttcccctgtggtttgttatcagtacaattctttgttgcttaatctagagctatgcacaccaaattgctgagatgtttagtagctgataaagaaaccttttaaaaaaataatataaatgaatgaaatataaactgtgagataaatatcattatagcatgtaatattaaattcctcctgtctcctctgtcagtttgtgaagtgattgacattttgtagctagtttaaaattattaaaaattatagactccagatgatctgctttaattt

SEQ ID NO: 733133 - DNA, 1736 bp, Homo sapiens
agcggggccatctttgatgagggcagagctcacgttgcattgaagacgaaacctcggggaggtcaggcgctgtctttccttccctccctgctcggcggctccaccacagttgcaacctgcagaggcccggagaacacaaccctcccgagaagcccaggtccagagccaaacccgtcactgaccccccagcccaggcgcccagccactccccaccgctaccatggccgaagaacaactggaacgcattgaggaagggatggaccaaatcaataaggacatgaaagaagcagaaaagaatttgacggacctaggaaaattctgcgggctttgtgtgtgtccctgtaacaagcttaaatcaagtgatgcttacaaaaaagcctggggcaataatcaggacggagtggtggccagccagcctgctcgtgtagtggacgaacgggagcagatggccatcagtggcggcttcatccgcagggtaacaaatgatgcccgagaaaatgaaatggatgaaaacctagagcaggtgagcggcatcatcgggaacctccgtcacatggccctggatatgggcaatgagatcgatacacagaatcgccagatcgacaggatcatggagaaggctgattccaacaaaaccagaattgatgaggccaaccaacgtgcaacaaagatgctgggaagtggttaagtgtgcccacccgtgttctcctccaaatgctgtcgggcaagatagctccttcatgcttttctcatggtattatctagtaggtctgcacacataacacacatcagtccacccccattgtgaatgttgtcctgtgtcatctgtcagcttcccaacaatactttgtgtcttttgttctctcttggtctctttctttccaaaggttgtacatagtggtcatttggtggctctaactccttgatgtcttgagtttcatttttcattttctctcctcggtggcatttgctgaataacaacaatttaggaatgctcaatgtgctgttgattctttcaatccacagtattgttcttgtaaaactgtgacattccacagagttactgccacggtcctttgagtgtcaggctctgaatctctcaaaatgtgccgtctttggttcctcatggctgttatctgtctttatgatttcatgattagacaatgtggaattacataacaggcattgcactaaaagtgatgtgatttatgcatttatgcatgagaactaaatagatttttagattcctacttaaacaaaaactttccatgacagtagcatactgatgagacaacacacacacacacaaaacaacagcaacaacaacagaacaacaacaaagcatgctcagtattgagacactgtcaagattaagttataccagcaaaagtgcagtagtgtcacttttttcctgtcaatatatagagacttctaaatcataatcatccttttttaaaaaaaagaattttaaaaaagatggatttgacacactcaccatttaatcatttccagcaaaatatatgtttggctgaaattatgtcaaatggatgtaatatagggtttgtttgctgcttttgatggctacgttttggagagagcaatcttgctgtgaaacagtgtggatgtaaattttataaggctgactcttactaaccaccatttcccctgtggtttgttatcagtacaattctttgttgacccacaggtaccgaactcgagtcgtatcatgtcaactt

SEQ ID NO: 733134 - DNA, 1869 bp, Homo sapiens
agcggggccatctttgatgagggcagagctcacgttgcattgaagacgaaacctcggggaggtcaggcgctgtctttccttccctccctgctcggcggctccaccacagttgcaacctgcagaggcccggagaacacaaccctcccgagaagcccaggtccagagccaaacccgtcactgaccccccagcccaggcgcccagccactccccaccgctaccatggccgaagaacaactggaacgcattgaggaagggatggaccaaatcaataaggacatgaaagaagcagaaaagaatttgacggacctaggaaaattctgcgggctttgtgtgtgtccctgtaacaagcttaaatcaagtgatgcttacaaaaaagcctggggcaataatcaggacggagtggtggccagccagcctgctcgtgtagtggacgaacgggagcagatggccatcagtggcggcttcatccgcagggtaacaaatgatgcccgagaaaatgaaatggatgaaaacctagagcaggtgagcggcatcatcgggaacctccgtcacatggccctggatatgggcaatgagatcgatacacagaatcgccagatcgacaggatcatggagaaggctgattccaacaaaaccagaattgatgaggccaaccaacgtgcaacaaagatgctgggaagtggttaagtgtgcccacccgtgttctcctccaaatgctgtcgggcaagatagctccttcatgcttttctcatggtattatctagtaggtctgcacacataacacacatcagtccacccccattgtgaatgttgtcctgtgtcatctgtcagcttcccaacaatactttgtgtcttttgttctctcttggtctctttctttccaaaggttgtacatagtggtcatttggtggctctaactccttgatgtcttgagtttcatttttcattttctctcctcggtggcatttgctgaataacaacaatttaggaatgctcaatgtgctgttgattctttcaatccacagtattgttcttgtaaaactgtgacattccacagagttactgccacggtcctttgagtgtcaggctctgaatctctcaaaatgtgccgtctttggttcctcatggctgttatctgtctttatgatttcatgattagacaatgtggaattacataacaggcattgcactaaaagtgatgtgatttatgcatttatgcatgagaactaaatagatttttagattcctacttaaacaaaaactttccatgacagtagcatactgatgagacaacacacacacacacaaaacaacagcaacaacaacagaacaacaacaaagcatgctcagtattgagacactgtcaagattaagttataccagcaaaagtgcagtagtgtcacttttttcctgtcaatatatagagacttctaaatcataatcatccttttttcaaaatatatgtttggctgaaattatgtcaaatggatgtaatatagggtttgtttgctgcttttgatggctacgttttggagagagcaatcttgctgtgaaacagtgtggatgtaaattttataaggctgactcttactaaccaccatttcccctgtggtttgttatcagtacaattctttgttgcttaatctagagctatgcacaccaaattgctgagatgtttagtagctgataaagaaaccttttaaaaaaataatataaatgaatgaaatataaactgtgagataaatatcattatagcatgtaatattaaattcctcctgtctcctctgtcagtttgtgaagtgattgacattttgtagctagtttaaaattattaaaaattatagactccagatgatctgctttaattt

SEQ ID NO: 733135 - DNA, 1773 bp, Homo sapiens
agcggggccatctttgatgagggcagagctcacgttgcattgaagacgaaacctcggggaggtcaggcgctgtctttccttccctccctgctcggcggctccaccacagttgcaacctgcagaggcccggagaacacaaccctcccgagaagcccaggtccagagccaaacccgtcactgaccccccagcccaggcgcccagccactccccaccgctaccatggccgaagaacaactggaacgcattgaggaagggatggaccaaatcaataaggacatgaaagaagcagaaaagaatttgacggacctaggaaaattctgcgggctttgtgtgtgtccctgtaacaagcttaaatcaagtgatgcttacaaaaaagcctggggcaataatcaggacggagtggtggccagccagcctgctcgtgtagtggacgaacgggagcagatggccatcagtggcggcttcatccgcagggtaacaaatgatgcccgagaaaatgaaatggatgaaaacctagagcaggtgagcggcatcatcgggaacctccgtcacatggccctggatatgggcaatgagatcgatacacagaatcgccagatcgacaggatcatggagaaggctgattccaacaaaaccagaattgatgaggccaaccaacgtgcaacaaagatgctgggaagtggttaagtgtgcccacccgtgttctcctccaaatgctgtcgggcaagatagctccttcatgcttttctcatggtattatctagtaggtctgcacacataacacacatcagtccacccccattgtgaatgttgtcctgtgtcatctgtcagcttcccaacaatactttgtgtcttttgttctctcttggtctctttctttccaaaggttgtacatagtggtcatttggtggctctaactccttgattgtcaggctctgaatctctcaaaatgtgccgtctttggttcctcatggctgttatctgtctttatgatttcatgattagacaatgtggaattacataacaggcattgcactaaaagtgatgtgatttatgcatttatgcatgagaactaaatagatttttagattcctacttaaacaaaaactttccatgacagtagcatactgatgagacaacacacacacacacaaaacaacagcaacaacaacagaacaacaacaaagcatgctcagtattgagacactgtcaagattaagttataccagcaaaagtgcagtagtgtcacttttttcctgtcaatatatagagacttctaaatcataatcatccttttttaaaaaaaagaattttaaaaaagatggatttgacacactcaccatttaatcatttccagcaaaatatatgtttggctgaaattatgtcaaatggatgtaatatagggtttgtttgctgcttttgatggctacgttttggagagagcaatcttgctgtgaaacagtgtggatgtaaattttataaggctgactcttactaaccaccatttcccctgtggtttgttatcagtacaattctttgttgcttaatctagagctatgcacaccaaattgctgagatgtttagtagctgataaagaaaccttttaaaaaaataatataaatgaatgaaatataaactgtgagataaatatcattatagcatgtaatattaaattcctcctgtctcctctgtcagtttgtgaagtgattgacattttgtagctagtttaaaattattaaaaattatagactccagatgatctgctttaattt

SEQ ID NO: 733136 - DNA, 1582 bp, Homo sapiens
agcggggccatctttgatgagggcagagctcacgttgcattgaagacgaaacctcggggaggtcaggcgctgtctttccttccctccctgctcggcggctccaccacagttgcaacctgcagaggcccggagaacacaaccctcccgagaagcccaggtccagagccaaacccgtcactgaccccccagcccaggcgcccagccactccccaccgctaccatggccgaagaacaactggaacgcattgaggaagggatggaccaaatcaataaggacatgaaagaagcagaaaagaatttgacggacctaggaaaattctgcgggctttgtgtgtgtccctgtaacaagcttaaatcaagtgatgcttacaaaaaagcctggggcaataatcaggacggagtggtggccagccagcctgctcgtgtagtggacgaacgggagcagatggccatcagtggcggcttcatccgcagggtaacaaatgatgcccgagaaaatgaaatggatgaaaacctagagcaggtgagcggcatcatcgggaacctccgtcacatggccctggatatgggcaatgagatcgatacacagaatcgccagatcgacaggatcatggagaaggctgattccaacaaaaccagaattgatgaggccaaccaacgtgcaacaaagatgctgggaagtggttaagtgtgcccacccgtgttctcctccaaatgctgtcgggcaagatagctccttcatgcttttctcatggtattatctagtaggtctgcacacataacacacatcagtccacccccattgtgaatgttgtcctgtgtcatctgtcagcttcccaacaatactttgtgtcttttgttctctcttggtctctttctttccaaaggttgtacatagtggtcatttggtggctctaactccttgattgtcaggctctgaatctctcaaaatgtgccgtctttggttcctcatggctgttatctgtctttatgatttcatgattagacaatgtggaattacataacaggcattgcactaaaagtgatgtgatttatgcatttatgcatgagaactaaatagatttttagattcctacttaaacaaaaactttccatgacagtagcatactgatgagacaacacacacacacacaaaacaacagcaacaacaacagaacaacaacaaagcatgctcagtattgagacactgtcaagattaagttataccagcaaaagtgcagtagtgtcacttttttcctgtcaatatatagagacttctaaatcataatcatccttttttaaaaaaaagaattttaaaaaagatggatttgacacactcaccatttaatcatttccagcaaaatatatgtttggctgaaattatgtcaaatggatgtaatatagggtttgtttgctgcttttgatggctacgttttggagagagcaatcttgctgtgaaacagtgtggatgtaaattttataaggctgactcttactaaccaccatttcccctgtggtttgttatcagtacaattctttgttgacccacaggtaccgaactcgagtcgtatcatgtcaactt

SEQ ID NO: 733137 - DNA, 1715 bp, Homo sapiens
agcggggccatctttgatgagggcagagctcacgttgcattgaagacgaaacctcggggaggtcaggcgctgtctttccttccctccctgctcggcggctccaccacagttgcaacctgcagaggcccggagaacacaaccctcccgagaagcccaggtccagagccaaacccgtcactgaccccccagcccaggcgcccagccactccccaccgctaccatggccgaagaacaactggaacgcattgaggaagggatggaccaaatcaataaggacatgaaagaagcagaaaagaatttgacggacctaggaaaattctgcgggctttgtgtgtgtccctgtaacaagcttaaatcaagtgatgcttacaaaaaagcctggggcaataatcaggacggagtggtggccagccagcctgctcgtgtagtggacgaacgggagcagatggccatcagtggcggcttcatccgcagggtaacaaatgatgcccgagaaaatgaaatggatgaaaacctagagcaggtgagcggcatcatcgggaacctccgtcacatggccctggatatgggcaatgagatcgatacacagaatcgccagatcgacaggatcatggagaaggctgattccaacaaaaccagaattgatgaggccaaccaacgtgcaacaaagatgctgggaagtggttaagtgtgcccacccgtgttctcctccaaatgctgtcgggcaagatagctccttcatgcttttctcatggtattatctagtaggtctgcacacataacacacatcagtccacccccattgtgaatgttgtcctgtgtcatctgtcagcttcccaacaatactttgtgtcttttgttctctcttggtctctttctttccaaaggttgtacatagtggtcatttggtggctctaactccttgattgtcaggctctgaatctctcaaaatgtgccgtctttggttcctcatggctgttatctgtctttatgatttcatgattagacaatgtggaattacataacaggcattgcactaaaagtgatgtgatttatgcatttatgcatgagaactaaatagatttttagattcctacttaaacaaaaactttccatgacagtagcatactgatgagacaacacacacacacacaaaacaacagcaacaacaacagaacaacaacaaagcatgctcagtattgagacactgtcaagattaagttataccagcaaaagtgcagtagtgtcacttttttcctgtcaatatatagagacttctaaatcataatcatccttttttcaaaatatatgtttggctgaaattatgtcaaatggatgtaatatagggtttgtttgctgcttttgatggctacgttttggagagagcaatcttgctgtgaaacagtgtggatgtaaattttataaggctgactcttactaaccaccatttcccctgtggtttgttatcagtacaattctttgttgcttaatctagagctatgcacaccaaattgctgagatgtttagtagctgataaagaaaccttttaaaaaaataatataaatgaatgaaatataaactgtgagataaatatcattatagcatgtaatattaaattcctcctgtctcctctgtcagtttgtgaagtgattgacattttgtagctagtttaaaattattaaaaattatagactccagatgatctgctttaattt

SEQ ID NO: 733138 - DNA, 1861 bp, Homo sapiens
agcggggccatctttgatgagggcagagctcacgttgcattgaagacgaaacctcggggaggtcaggcgctgtctttccttccctccctgctcggcggctccaccacagttgcaacctgcagaggcccggagaacacaaccctcccgagaagcccaggtccagagccaaacccgtcactgaccccccagcccaggcgcccagccactccccaccgctaccatggccgaagaacaactggaacgcattgaggaagggatggaccaaatcaataaggacatgaaagaagcagaaaagaatttgacggacctaggaaaattctgcgggctttgtgtgtgtccctgtaacaagcttaaatcaagtgatgcttacaaaaaagcctggggcaataatcaggacggagtggtggccagccagcctgctcgtgtagtggacgaacgggagcagatggccatcagtggcggcttcatccgcagggtaacaaatgatgcccgagaaaatgaaatggatgaaaacctagagcaggtgagcggcatcatcgggaacctccgtcacatggccctggatatgggcaatgagatcgatacacagaatcgccagatcgacaggatcatggagaagtaagtgtgcccacccgtgttctcctccaaatgctgtcgggcaagatagctccttcatgcttttctcatggtattatctagtaggtctgcacacataacacacatcagtccacccccattgtgaatgttgtcctgtgtcatctgtcagcttcccaacaatactttgtgtcttttgttctctcttggtctctttctttccaaaggttgtacatagtggtcatttggtggctctaactccttgatgtcttgagtttcatttttcattttctctcctcggtggcatttgctgaataacaacaatttaggaatgctcaatgtgctgttgattctttcaatccacagtattgttcttgtaaaactgtgacattccacagagttactgccacggtcctttgagtgtcaggctctgaatctctcaaaatgtgccgtctttggttcctcatggctgttatctgtctttatgatttcatgattagacaatgtggaattacataacaggcattgcactaaaagtgatgtgatttatgcatttatgcatgagaactaaatagatttttagattcctacttaaacaaaaactttccatgacagtagcatactgatgagacaacacacacacacacaaaacaacagcaacaacaacagaacaacaacaaagcatgctcagtattgagacactgtcaagattaagttataccagcaaaagtgcagtagtgtcacttttttcctgtcaatatatagagacttctaaatcataatcatccttttttaaaaaaaagaattttaaaaaagatggatttgacacactcaccatttaatcatttccagcaaaatatatgtttggctgaaattatgtcaaatggatgtaatatagggtttgtttgctgcttttgatggctacgttttggagagagcaatcttgctgtgaaacagtgtggatgtaaattttataaggctgactcttactaaccaccatttcccctgtggtttgttatcagtacaattctttgttgcttaatctagagctatgcacaccaaattgctgagatgtttagtagctgataaagaaaccttttaaaaaaataatataaatgaatgaaatataaactgtgagataaatatcattatagcatgtaatattaaattcctcctgtctcctctgtcagtttgtgaagtgattgacattttgtagctagtttaaaattattaaaaattatagactccagatgatctgctttaattt

SEQ ID NO: 733139 - DNA, 1670 bp, Homo sapiens
agcggggccatctttgatgagggcagagctcacgttgcattgaagacgaaacctcggggaggtcaggcgctgtctttccttccctccctgctcggcggctccaccacagttgcaacctgcagaggcccggagaacacaaccctcccgagaagcccaggtccagagccaaacccgtcactgaccccccagcccaggcgcccagccactccccaccgctaccatggccgaagaacaactggaacgcattgaggaagggatggaccaaatcaataaggacatgaaagaagcagaaaagaatttgacggacctaggaaaattctgcgggctttgtgtgtgtccctgtaacaagcttaaatcaagtgatgcttacaaaaaagcctggggcaataatcaggacggagtggtggccagccagcctgctcgtgtagtggacgaacgggagcagatggccatcagtggcggcttcatccgcagggtaacaaatgatgcccgagaaaatgaaatggatgaaaacctagagcaggtgagcggcatcatcgggaacctccgtcacatggccctggatatgggcaatgagatcgatacacagaatcgccagatcgacaggatcatggagaagtaagtgtgcccacccgtgttctcctccaaatgctgtcgggcaagatagctccttcatgcttttctcatggtattatctagtaggtctgcacacataacacacatcagtccacccccattgtgaatgttgtcctgtgtcatctgtcagcttcccaacaatactttgtgtcttttgttctctcttggtctctttctttccaaaggttgtacatagtggtcatttggtggctctaactccttgatgtcttgagtttcatttttcattttctctcctcggtggcatttgctgaataacaacaatttaggaatgctcaatgtgctgttgattctttcaatccacagtattgttcttgtaaaactgtgacattccacagagttactgccacggtcctttgagtgtcaggctctgaatctctcaaaatgtgccgtctttggttcctcatggctgttatctgtctttatgatttcatgattagacaatgtggaattacataacaggcattgcactaaaagtgatgtgatttatgcatttatgcatgagaactaaatagatttttagattcctacttaaacaaaaactttccatgacagtagcatactgatgagacaacacacacacacacaaaacaacagcaacaacaacagaacaacaacaaagcatgctcagtattgagacactgtcaagattaagttataccagcaaaagtgcagtagtgtcacttttttcctgtcaatatatagagacttctaaatcataatcatccttttttaaaaaaaagaattttaaaaaagatggatttgacacactcaccatttaatcatttccagcaaaatatatgtttggctgaaattatgtcaaatggatgtaatatagggtttgtttgctgcttttgatggctacgttttggagagagcaatcttgctgtgaaacagtgtggatgtaaattttataaggctgactcttactaaccaccatttcccctgtggtttgttatcagtacaattctttgttgacccacaggtaccgaactcgagtcgtatcatgtcaactt

SEQ ID NO: 733140 - DNA, 1803 bp, Homo sapiens
agcggggccatctttgatgagggcagagctcacgttgcattgaagacgaaacctcggggaggtcaggcgctgtctttccttccctccctgctcggcggctccaccacagttgcaacctgcagaggcccggagaacacaaccctcccgagaagcccaggtccagagccaaacccgtcactgaccccccagcccaggcgcccagccactccccaccgctaccatggccgaagaacaactggaacgcattgaggaagggatggaccaaatcaataaggacatgaaagaagcagaaaagaatttgacggacctaggaaaattctgcgggctttgtgtgtgtccctgtaacaagcttaaatcaagtgatgcttacaaaaaagcctggggcaataatcaggacggagtggtggccagccagcctgctcgtgtagtggacgaacgggagcagatggccatcagtggcggcttcatccgcagggtaacaaatgatgcccgagaaaatgaaatggatgaaaacctagagcaggtgagcggcatcatcgggaacctccgtcacatggccctggatatgggcaatgagatcgatacacagaatcgccagatcgacaggatcatggagaagtaagtgtgcccacccgtgttctcctccaaatgctgtcgggcaagatagctccttcatgcttttctcatggtattatctagtaggtctgcacacataacacacatcagtccacccccattgtgaatgttgtcctgtgtcatctgtcagcttcccaacaatactttgtgtcttttgttctctcttggtctctttctttccaaaggttgtacatagtggtcatttggtggctctaactccttgatgtcttgagtttcatttttcattttctctcctcggtggcatttgctgaataacaacaatttaggaatgctcaatgtgctgttgattctttcaatccacagtattgttcttgtaaaactgtgacattccacagagttactgccacggtcctttgagtgtcaggctctgaatctctcaaaatgtgccgtctttggttcctcatggctgttatctgtctttatgatttcatgattagacaatgtggaattacataacaggcattgcactaaaagtgatgtgatttatgcatttatgcatgagaactaaatagatttttagattcctacttaaacaaaaactttccatgacagtagcatactgatgagacaacacacacacacacaaaacaacagcaacaacaacagaacaacaacaaagcatgctcagtattgagacactgtcaagattaagttataccagcaaaagtgcagtagtgtcacttttttcctgtcaatatatagagacttctaaatcataatcatccttttttcaaaatatatgtttggctgaaattatgtcaaatggatgtaatatagggtttgtttgctgcttttgatggctacgttttggagagagcaatcttgctgtgaaacagtgtggatgtaaattttataaggctgactcttactaaccaccatttcccctgtggtttgttatcagtacaattctttgttgcttaatctagagctatgcacaccaaattgctgagatgtttagtagctgataaagaaaccttttaaaaaaataatataaatgaatgaaatataaactgtgagataaatatcattatagcatgtaatattaaattcctcctgtctcctctgtcagtttgtgaagtgattgacattttgtagctagtttaaaattattaaaaattatagactccagatgatctgctttaattt

SEQ ID NO: 733141 - DNA, 1707 bp, Homo sapiens
agcggggccatctttgatgagggcagagctcacgttgcattgaagacgaaacctcggggaggtcaggcgctgtctttccttccctccctgctcggcggctccaccacagttgcaacctgcagaggcccggagaacacaaccctcccgagaagcccaggtccagagccaaacccgtcactgaccccccagcccaggcgcccagccactccccaccgctaccatggccgaagaacaactggaacgcattgaggaagggatggaccaaatcaataaggacatgaaagaagcagaaaagaatttgacggacctaggaaaattctgcgggctttgtgtgtgtccctgtaacaagcttaaatcaagtgatgcttacaaaaaagcctggggcaataatcaggacggagtggtggccagccagcctgctcgtgtagtggacgaacgggagcagatggccatcagtggcggcttcatccgcagggtaacaaatgatgcccgagaaaatgaaatggatgaaaacctagagcaggtgagcggcatcatcgggaacctccgtcacatggccctggatatgggcaatgagatcgatacacagaatcgccagatcgacaggatcatggagaagtaagtgtgcccacccgtgttctcctccaaatgctgtcgggcaagatagctccttcatgcttttctcatggtattatctagtaggtctgcacacataacacacatcagtccacccccattgtgaatgttgtcctgtgtcatctgtcagcttcccaacaatactttgtgtcttttgttctctcttggtctctttctttccaaaggttgtacatagtggtcatttggtggctctaactccttgattgtcaggctctgaatctctcaaaatgtgccgtctttggttcctcatggctgttatctgtctttatgatttcatgattagacaatgtggaattacataacaggcattgcactaaaagtgatgtgatttatgcatttatgcatgagaactaaatagatttttagattcctacttaaacaaaaactttccatgacagtagcatactgatgagacaacacacacacacacaaaacaacagcaacaacaacagaacaacaacaaagcatgctcagtattgagacactgtcaagattaagttataccagcaaaagtgcagtagtgtcacttttttcctgtcaatatatagagacttctaaatcataatcatccttttttaaaaaaaagaattttaaaaaagatggatttgacacactcaccatttaatcatttccagcaaaatatatgtttggctgaaattatgtcaaatggatgtaatatagggtttgtttgctgcttttgatggctacgttttggagagagcaatcttgctgtgaaacagtgtggatgtaaattttataaggctgactcttactaaccaccatttcccctgtggtttgttatcagtacaattctttgttgcttaatctagagctatgcacaccaaattgctgagatgtttagtagctgataaagaaaccttttaaaaaaataatataaatgaatgaaatataaactgtgagataaatatcattatagcatgtaatattaaattcctcctgtctcctctgtcagtttgtgaagtgattgacattttgtagctagtttaaaattattaaaaattatagactccagatgatctgctttaattt

SEQ ID NO: 733142 - DNA, 1516 bp, Homo sapiens
agcggggccatctttgatgagggcagagctcacgttgcattgaagacgaaacctcggggaggtcaggcgctgtctttccttccctccctgctcggcggctccaccacagttgcaacctgcagaggcccggagaacacaaccctcccgagaagcccaggtccagagccaaacccgtcactgaccccccagcccaggcgcccagccactccccaccgctaccatggccgaagaacaactggaacgcattgaggaagggatggaccaaatcaataaggacatgaaagaagcagaaaagaatttgacggacctaggaaaattctgcgggctttgtgtgtgtccctgtaacaagcttaaatcaagtgatgcttacaaaaaagcctggggcaataatcaggacggagtggtggccagccagcctgctcgtgtagtggacgaacgggagcagatggccatcagtggcggcttcatccgcagggtaacaaatgatgcccgagaaaatgaaatggatgaaaacctagagcaggtgagcggcatcatcgggaacctccgtcacatggccctggatatgggcaatgagatcgatacacagaatcgccagatcgacaggatcatggagaagtaagtgtgcccacccgtgttctcctccaaatgctgtcgggcaagatagctccttcatgcttttctcatggtattatctagtaggtctgcacacataacacacatcagtccacccccattgtgaatgttgtcctgtgtcatctgtcagcttcccaacaatactttgtgtcttttgttctctcttggtctctttctttccaaaggttgtacatagtggtcatttggtggctctaactccttgattgtcaggctctgaatctctcaaaatgtgccgtctttggttcctcatggctgttatctgtctttatgatttcatgattagacaatgtggaattacataacaggcattgcactaaaagtgatgtgatttatgcatttatgcatgagaactaaatagatttttagattcctacttaaacaaaaactttccatgacagtagcatactgatgagacaacacacacacacacaaaacaacagcaacaacaacagaacaacaacaaagcatgctcagtattgagacactgtcaagattaagttataccagcaaaagtgcagtagtgtcacttttttcctgtcaatatatagagacttctaaatcataatcatccttttttaaaaaaaagaattttaaaaaagatggatttgacacactcaccatttaatcatttccagcaaaatatatgtttggctgaaattatgtcaaatggatgtaatatagggtttgtttgctgcttttgatggctacgttttggagagagcaatcttgctgtgaaacagtgtggatgtaaattttataaggctgactcttactaaccaccatttcccctgtggtttgttatcagtacaattctttgttgacccacaggtaccgaactcgagtcgtatcatgtcaactt

SEQ ID NO: 733143 - DNA, 1649 bp, Homo sapiens
agcggggccatctttgatgagggcagagctcacgttgcattgaagacgaaacctcggggaggtcaggcgctgtctttccttccctccctgctcggcggctccaccacagttgcaacctgcagaggcccggagaacacaaccctcccgagaagcccaggtccagagccaaacccgtcactgaccccccagcccaggcgcccagccactccccaccgctaccatggccgaagaacaactggaacgcattgaggaagggatggaccaaatcaataaggacatgaaagaagcagaaaagaatttgacggacctaggaaaattctgcgggctttgtgtgtgtccctgtaacaagcttaaatcaagtgatgcttacaaaaaagcctggggcaataatcaggacggagtggtggccagccagcctgctcgtgtagtggacgaacgggagcagatggccatcagtggcggcttcatccgcagggtaacaaatgatgcccgagaaaatgaaatggatgaaaacctagagcaggtgagcggcatcatcgggaacctccgtcacatggccctggatatgggcaatgagatcgatacacagaatcgccagatcgacaggatcatggagaagtaagtgtgcccacccgtgttctcctccaaatgctgtcgggcaagatagctccttcatgcttttctcatggtattatctagtaggtctgcacacataacacacatcagtccacccccattgtgaatgttgtcctgtgtcatctgtcagcttcccaacaatactttgtgtcttttgttctctcttggtctctttctttccaaaggttgtacatagtggtcatttggtggctctaactccttgattgtcaggctctgaatctctcaaaatgtgccgtctttggttcctcatggctgttatctgtctttatgatttcatgattagacaatgtggaattacataacaggcattgcactaaaagtgatgtgatttatgcatttatgcatgagaactaaatagatttttagattcctacttaaacaaaaactttccatgacagtagcatactgatgagacaacacacacacacacaaaacaacagcaacaacaacagaacaacaacaaagcatgctcagtattgagacactgtcaagattaagttataccagcaaaagtgcagtagtgtcacttttttcctgtcaatatatagagacttctaaatcataatcatccttttttcaaaatatatgtttggctgaaattatgtcaaatggatgtaatatagggtttgtttgctgcttttgatggctacgttttggagagagcaatcttgctgtgaaacagtgtggatgtaaattttataaggctgactcttactaaccaccatttcccctgtggtttgttatcagtacaattctttgttgcttaatctagagctatgcacaccaaattgctgagatgtttagtagctgataaagaaaccttttaaaaaaataatataaatgaatgaaatataaactgtgagataaatatcattatagcatgtaatattaaattcctcctgtctcctctgtcagtttgtgaagtgattgacattttgtagctagtttaaaattattaaaaattatagactccagatgatctgctttaattt

SEQ ID NO: 733144 - DNA, 1787 bp, Homo sapiens
agcggggccatctttgatgagggcagagctcacgttgcattgaagacgaaacctcggggaggtcaggcgctgtctttccttccctccctgctcggcggctccaccacagttgcaacctgcagaggcccggagaacacaaccctcccgagaagcccaggtccagagccaaacccgtcactgaccccccagcccaggcgcccagccactccccaccgctaccatggccgaagacgcagacatgcgcaatgagctggaggagatgcagcgaagggctgaccagttggctgatgagtcgctggaaagcacccgtcgtatgctgcaactggttgaagagggtaacaaatgatgcccgagaaaatgaaatggatgaaaacctagagcaggtgagcggcatcatcgggaacctccgtcacatggccctggatatgggcaatgagatcgatacacagaatcgccagatcgacaggatcatggagaaggctgattccaacaaaaccagaattgatgaggccaaccaacgtgcaacaaagatgctgggaagtggttaagtgtgcccacccgtgttctcctccaaatgctgtcgggcaagatagctccttcatgcttttctcatggtattatctagtaggtctgcacacataacacacatcagtccacccccattgtgaatgttgtcctgtgtcatctgtcagcttcccaacaatactttgtgtcttttgttctctcttggtctctttctttccaaaggttgtacatagtggtcatttggtggctctaactccttgatgtcttgagtttcatttttcattttctctcctcggtggcatttgctgaataacaacaatttaggaatgctcaatgtgctgttgattctttcaatccacagtattgttcttgtaaaactgtgacattccacagagttactgccacggtcctttgagtgtcaggctctgaatctctcaaaatgtgccgtctttggttcctcatggctgttatctgtctttatgatttcatgattagacaatgtggaattacataacaggcattgcactaaaagtgatgtgatttatgcatttatgcatgagaactaaatagatttttagattcctacttaaacaaaaactttccatgacagtagcatactgatgagacaacacacacacacacaaaacaacagcaacaacaacagaacaacaacaaagcatgctcagtattgagacactgtcaagattaagttataccagcaaaagtgcagtagtgtcacttttttcctgtcaatatatagagacttctaaatcataatcatccttttttaaaaaaaagaattttaaaaaagatggatttgacacactcaccatttaatcatttccagcaaaatatatgtttggctgaaattatgtcaaatggatgtaatatagggtttgtttgctgcttttgatggctacgttttggagagagcaatcttgctgtgaaacagtgtggatgtaaattttataaggctgactcttactaaccaccatttcccctgtggtttgttatcagtacaattctttgttgcttaatctagagctatgcacaccaaattgctgagatgtttagtagctgataaagaaaccttttaaaaaaataatataaatgaatgaaatataaactgtgagataaatatcattatagcatgtaatattaaattcctcctgtctcctctgtcagtttgtgaagtgattgacattttgtagctagtttaaaattattaaaaattatagactccagatgatctgctttaattt

SEQ ID NO: 733145 - DNA, 1596 bp, Homo sapiens
agcggggccatctttgatgagggcagagctcacgttgcattgaagacgaaacctcggggaggtcaggcgctgtctttccttccctccctgctcggcggctccaccacagttgcaacctgcagaggcccggagaacacaaccctcccgagaagcccaggtccagagccaaacccgtcactgaccccccagcccaggcgcccagccactccccaccgctaccatggccgaagacgcagacatgcgcaatgagctggaggagatgcagcgaagggctgaccagttggctgatgagtcgctggaaagcacccgtcgtatgctgcaactggttgaagagggtaacaaatgatgcccgagaaaatgaaatggatgaaaacctagagcaggtgagcggcatcatcgggaacctccgtcacatggccctggatatgggcaatgagatcgatacacagaatcgccagatcgacaggatcatggagaaggctgattccaacaaaaccagaattgatgaggccaaccaacgtgcaacaaagatgctgggaagtggttaagtgtgcccacccgtgttctcctccaaatgctgtcgggcaagatagctccttcatgcttttctcatggtattatctagtaggtctgcacacataacacacatcagtccacccccattgtgaatgttgtcctgtgtcatctgtcagcttcccaacaatactttgtgtcttttgttctctcttggtctctttctttccaaaggttgtacatagtggtcatttggtggctctaactccttgatgtcttgagtttcatttttcattttctctcctcggtggcatttgctgaataacaacaatttaggaatgctcaatgtgctgttgattctttcaatccacagtattgttcttgtaaaactgtgacattccacagagttactgccacggtcctttgagtgtcaggctctgaatctctcaaaatgtgccgtctttggttcctcatggctgttatctgtctttatgatttcatgattagacaatgtggaattacataacaggcattgcactaaaagtgatgtgatttatgcatttatgcatgagaactaaatagatttttagattcctacttaaacaaaaactttccatgacagtagcatactgatgagacaacacacacacacacaaaacaacagcaacaacaacagaacaacaacaaagcatgctcagtattgagacactgtcaagattaagttataccagcaaaagtgcagtagtgtcacttttttcctgtcaatatatagagacttctaaatcataatcatccttttttaaaaaaaagaattttaaaaaagatggatttgacacactcaccatttaatcatttccagcaaaatatatgtttggctgaaattatgtcaaatggatgtaatatagggtttgtttgctgcttttgatggctacgttttggagagagcaatcttgctgtgaaacagtgtggatgtaaattttataaggctgactcttactaaccaccatttcccctgtggtttgttatcagtacaattctttgttgacccacaggtaccgaactcgagtcgtatcatgtcaactt

SEQ ID NO: 733146 - DNA, 1729 bp, Homo sapiens
agcggggccatctttgatgagggcagagctcacgttgcattgaagacgaaacctcggggaggtcaggcgctgtctttccttccctccctgctcggcggctccaccacagttgcaacctgcagaggcccggagaacacaaccctcccgagaagcccaggtccagagccaaacccgtcactgaccccccagcccaggcgcccagccactccccaccgctaccatggccgaagacgcagacatgcgcaatgagctggaggagatgcagcgaagggctgaccagttggctgatgagtcgctggaaagcacccgtcgtatgctgcaactggttgaagagggtaacaaatgatgcccgagaaaatgaaatggatgaaaacctagagcaggtgagcggcatcatcgggaacctccgtcacatggccctggatatgggcaatgagatcgatacacagaatcgccagatcgacaggatcatggagaaggctgattccaacaaaaccagaattgatgaggccaaccaacgtgcaacaaagatgctgggaagtggttaagtgtgcccacccgtgttctcctccaaatgctgtcgggcaagatagctccttcatgcttttctcatggtattatctagtaggtctgcacacataacacacatcagtccacccccattgtgaatgttgtcctgtgtcatctgtcagcttcccaacaatactttgtgtcttttgttctctcttggtctctttctttccaaaggttgtacatagtggtcatttggtggctctaactccttgatgtcttgagtttcatttttcattttctctcctcggtggcatttgctgaataacaacaatttaggaatgctcaatgtgctgttgattctttcaatccacagtattgttcttgtaaaactgtgacattccacagagttactgccacggtcctttgagtgtcaggctctgaatctctcaaaatgtgccgtctttggttcctcatggctgttatctgtctttatgatttcatgattagacaatgtggaattacataacaggcattgcactaaaagtgatgtgatttatgcatttatgcatgagaactaaatagatttttagattcctacttaaacaaaaactttccatgacagtagcatactgatgagacaacacacacacacacaaaacaacagcaacaacaacagaacaacaacaaagcatgctcagtattgagacactgtcaagattaagttataccagcaaaagtgcagtagtgtcacttttttcctgtcaatatatagagacttctaaatcataatcatccttttttcaaaatatatgtttggctgaaattatgtcaaatggatgtaatatagggtttgtttgctgcttttgatggctacgttttggagagagcaatcttgctgtgaaacagtgtggatgtaaattttataaggctgactcttactaaccaccatttcccctgtggtttgttatcagtacaattctttgttgcttaatctagagctatgcacaccaaattgctgagatgtttagtagctgataaagaaaccttttaaaaaaataatataaatgaatgaaatataaactgtgagataaatatcattatagcatgtaatattaaattcctcctgtctcctctgtcagtttgtgaagtgattgacattttgtagctagtttaaaattattaaaaattatagactccagatgatctgctttaattt

SEQ ID NO: 733147 - DNA, 1976 bp, Homo sapiens
agcggggccatctttgatgagggcagagctcacgttgcattgaagacgaaacctcggggaggtcaggcgctgtctttccttccctccctgctcggcggctccaccacagttgcaacctgcagaggcccggagaacacaaccctcccgagaagcccaggtccagagccaaacccgtcactgaccccccagcccaggcgcccagccactccccaccgctaccatggccgaagagtaaagatgctggtatcaggactttggttatgttggatgaacaaggagaacaactggaacgcattgaggaagggatggaccaaatcaataaggacatgaaagaagcagaaaagaatttgacggacctaggaaaattctgcgggctttgtgtgtgtccctgtaacaagcttaaatcaagtgatgcttacaaaaaagcctggggcaataatcaggacggagtggtggccagccagcctgctcgtgtagtggacgaacgggagcagatggccatcagtggcggcttcatccgcagggtaacaaatgatgcccgagaaaatgaaatggatgaaaacctagagcaggtgagcggcatcatcgggaacctccgtcacatggccctggatatgggcaatgagatcgatacacagaatcgccagatcgacaggatcatggagaaggctgattccaacaaaaccagaattgatgaggccaaccaacgtgcaacaaagatgctgggaagtggttaagtgtgcccacccgtgttctcctccaaatgctgtcgggcaagatagctccttcatgcttttctcatggtattatctagtaggtctgcacacataacacacatcagtccacccccattgtgaatgttgtcctgtgtcatctgtcagcttcccaacaatactttgtgtcttttgttctctcttggtctctttctttccaaaggttgtacatagtggtcatttggtggctctaactccttgatgtcttgagtttcatttttcattttctctcctcggtggcatttgctgaataacaacaatttaggaatgctcaatgtgctgttgattctttcaatccacagtattgttcttgtaaaactgtgacattccacagagttactgccacggtcctttgagtgtcaggctctgaatctctcaaaatgtgccgtctttggttcctcatggctgttatctgtctttatgatttcatgattagacaatgtggaattacataacaggcattgcactaaaagtgatgtgatttatgcatttatgcatgagaactaaatagatttttagattcctacttaaacaaaaactttccatgacagtagcatactgatgagacaacacacacacacacaaaacaacagcaacaacaacagaacaacaacaaagcatgctcagtattgagacactgtcaagattaagttataccagcaaaagtgcagtagtgtcacttttttcctgtcaatatatagagacttctaaatcataatcatccttttttaaaaaaaagaattttaaaaaagatggatttgacacactcaccatttaatcatttccagcaaaatatatgtttggctgaaattatgtcaaatggatgtaatatagggtttgtttgctgcttttgatggctacgttttggagagagcaatcttgctgtgaaacagtgtggatgtaaattttataaggctgactcttactaaccaccatttcccctgtggtttgttatcagtacaattctttgttgcttaatctagagctatgcacaccaaattgctgagatgtttagtagctgataaagaaaccttttaaaaaaataatataaatgaatgaaatataaactgtgagataaatatcattatagcatgtaatattaaattcctcctgtctcctctgtcagtttgtgaagtgattgacattttgtagctagtttaaaattattaaaaattatagactccagatgatctgctttaattt

SEQ ID NO: 733148 - DNA, 1785 bp, Homo sapiens
agcggggccatctttgatgagggcagagctcacgttgcattgaagacgaaacctcggggaggtcaggcgctgtctttccttccctccctgctcggcggctccaccacagttgcaacctgcagaggcccggagaacacaaccctcccgagaagcccaggtccagagccaaacccgtcactgaccccccagcccaggcgcccagccactccccaccgctaccatggccgaagagtaaagatgctggtatcaggactttggttatgttggatgaacaaggagaacaactggaacgcattgaggaagggatggaccaaatcaataaggacatgaaagaagcagaaaagaatttgacggacctaggaaaattctgcgggctttgtgtgtgtccctgtaacaagcttaaatcaagtgatgcttacaaaaaagcctggggcaataatcaggacggagtggtggccagccagcctgctcgtgtagtggacgaacgggagcagatggccatcagtggcggcttcatccgcagggtaacaaatgatgcccgagaaaatgaaatggatgaaaacctagagcaggtgagcggcatcatcgggaacctccgtcacatggccctggatatgggcaatgagatcgatacacagaatcgccagatcgacaggatcatggagaaggctgattccaacaaaaccagaattgatgaggccaaccaacgtgcaacaaagatgctgggaagtggttaagtgtgcccacccgtgttctcctccaaatgctgtcgggcaagatagctccttcatgcttttctcatggtattatctagtaggtctgcacacataacacacatcagtccacccccattgtgaatgttgtcctgtgtcatctgtcagcttcccaacaatactttgtgtcttttgttctctcttggtctctttctttccaaaggttgtacatagtggtcatttggtggctctaactccttgatgtcttgagtttcatttttcattttctctcctcggtggcatttgctgaataacaacaatttaggaatgctcaatgtgctgttgattctttcaatccacagtattgttcttgtaaaactgtgacattccacagagttactgccacggtcctttgagtgtcaggctctgaatctctcaaaatgtgccgtctttggttcctcatggctgttatctgtctttatgatttcatgattagacaatgtggaattacataacaggcattgcactaaaagtgatgtgatttatgcatttatgcatgagaactaaatagatttttagattcctacttaaacaaaaactttccatgacagtagcatactgatgagacaacacacacacacacaaaacaacagcaacaacaacagaacaacaacaaagcatgctcagtattgagacactgtcaagattaagttataccagcaaaagtgcagtagtgtcacttttttcctgtcaatatatagagacttctaaatcataatcatccttttttaaaaaaaagaattttaaaaaagatggatttgacacactcaccatttaatcatttccagcaaaatatatgtttggctgaaattatgtcaaatggatgtaatatagggtttgtttgctgcttttgatggctacgttttggagagagcaatcttgctgtgaaacagtgtggatgtaaattttataaggctgactcttactaaccaccatttcccctgtggtttgttatcagtacaattctttgttgacccacaggtaccgaactcgagtcgtatcatgtcaactt

SEQ ID NO: 733149 - DNA, 1918 bp, Homo sapiens
agcggggccatctttgatgagggcagagctcacgttgcattgaagacgaaacctcggggaggtcaggcgctgtctttccttccctccctgctcggcggctccaccacagttgcaacctgcagaggcccggagaacacaaccctcccgagaagcccaggtccagagccaaacccgtcactgaccccccagcccaggcgcccagccactccccaccgctaccatggccgaagagtaaagatgctggtatcaggactttggttatgttggatgaacaaggagaacaactggaacgcattgaggaagggatggaccaaatcaataaggacatgaaagaagcagaaaagaatttgacggacctaggaaaattctgcgggctttgtgtgtgtccctgtaacaagcttaaatcaagtgatgcttacaaaaaagcctggggcaataatcaggacggagtggtggccagccagcctgctcgtgtagtggacgaacgggagcagatggccatcagtggcggcttcatccgcagggtaacaaatgatgcccgagaaaatgaaatggatgaaaacctagagcaggtgagcggcatcatcgggaacctccgtcacatggccctggatatgggcaatgagatcgatacacagaatcgccagatcgacaggatcatggagaaggctgattccaacaaaaccagaattgatgaggccaaccaacgtgcaacaaagatgctgggaagtggttaagtgtgcccacccgtgttctcctccaaatgctgtcgggcaagatagctccttcatgcttttctcatggtattatctagtaggtctgcacacataacacacatcagtccacccccattgtgaatgttgtcctgtgtcatctgtcagcttcccaacaatactttgtgtcttttgttctctcttggtctctttctttccaaaggttgtacatagtggtcatttggtggctctaactccttgatgtcttgagtttcatttttcattttctctcctcggtggcatttgctgaataacaacaatttaggaatgctcaatgtgctgttgattctttcaatccacagtattgttcttgtaaaactgtgacattccacagagttactgccacggtcctttgagtgtcaggctctgaatctctcaaaatgtgccgtctttggttcctcatggctgttatctgtctttatgatttcatgattagacaatgtggaattacataacaggcattgcactaaaagtgatgtgatttatgcatttatgcatgagaactaaatagatttttagattcctacttaaacaaaaactttccatgacagtagcatactgatgagacaacacacacacacacaaaacaacagcaacaacaacagaacaacaacaaagcatgctcagtattgagacactgtcaagattaagttataccagcaaaagtgcagtagtgtcacttttttcctgtcaatatatagagacttctaaatcataatcatccttttttcaaaatatatgtttggctgaaattatgtcaaatggatgtaatatagggtttgtttgctgcttttgatggctacgttttggagagagcaatcttgctgtgaaacagtgtggatgtaaattttataaggctgactcttactaaccaccatttcccctgtggtttgttatcagtacaattctttgttgcttaatctagagctatgcacaccaaattgctgagatgtttagtagctgataaagaaaccttttaaaaaaataatataaatgaatgaaatataaactgtgagataaatatcattatagcatgtaatattaaattcctcctgtctcctctgtcagtttgtgaagtgattgacattttgtagctagtttaaaattattaaaaattatagactccagatgatctgctttaattt

SEQ ID NO: 733150 - DNA, 1822 bp, Homo sapiens
agcggggccatctttgatgagggcagagctcacgttgcattgaagacgaaacctcggggaggtcaggcgctgtctttccttccctccctgctcggcggctccaccacagttgcaacctgcagaggcccggagaacacaaccctcccgagaagcccaggtccagagccaaacccgtcactgaccccccagcccaggcgcccagccactccccaccgctaccatggccgaagagtaaagatgctggtatcaggactttggttatgttggatgaacaaggagaacaactggaacgcattgaggaagggatggaccaaatcaataaggacatgaaagaagcagaaaagaatttgacggacctaggaaaattctgcgggctttgtgtgtgtccctgtaacaagcttaaatcaagtgatgcttacaaaaaagcctggggcaataatcaggacggagtggtggccagccagcctgctcgtgtagtggacgaacgggagcagatggccatcagtggcggcttcatccgcagggtaacaaatgatgcccgagaaaatgaaatggatgaaaacctagagcaggtgagcggcatcatcgggaacctccgtcacatggccctggatatgggcaatgagatcgatacacagaatcgccagatcgacaggatcatggagaaggctgattccaacaaaaccagaattgatgaggccaaccaacgtgcaacaaagatgctgggaagtggttaagtgtgcccacccgtgttctcctccaaatgctgtcgggcaagatagctccttcatgcttttctcatggtattatctagtaggtctgcacacataacacacatcagtccacccccattgtgaatgttgtcctgtgtcatctgtcagcttcccaacaatactttgtgtcttttgttctctcttggtctctttctttccaaaggttgtacatagtggtcatttggtggctctaactccttgattgtcaggctctgaatctctcaaaatgtgccgtctttggttcctcatggctgttatctgtctttatgatttcatgattagacaatgtggaattacataacaggcattgcactaaaagtgatgtgatttatgcatttatgcatgagaactaaatagatttttagattcctacttaaacaaaaactttccatgacagtagcatactgatgagacaacacacacacacacaaaacaacagcaacaacaacagaacaacaacaaagcatgctcagtattgagacactgtcaagattaagttataccagcaaaagtgcagtagtgtcacttttttcctgtcaatatatagagacttctaaatcataatcatccttttttaaaaaaaagaattttaaaaaagatggatttgacacactcaccatttaatcatttccagcaaaatatatgtttggctgaaattatgtcaaatggatgtaatatagggtttgtttgctgcttttgatggctacgttttggagagagcaatcttgctgtgaaacagtgtggatgtaaattttataaggctgactcttactaaccaccatttcccctgtggtttgttatcagtacaattctttgttgcttaatctagagctatgcacaccaaattgctgagatgtttagtagctgataaagaaaccttttaaaaaaataatataaatgaatgaaatataaactgtgagataaatatcattatagcatgtaatattaaattcctcctgtctcctctgtcagtttgtgaagtgattgacattttgtagctagtttaaaattattaaaaattatagactccagatgatctgctttaattt

SEQ ID NO: 733151 - DNA, 1631 bp, Homo sapiens
agcggggccatctttgatgagggcagagctcacgttgcattgaagacgaaacctcggggaggtcaggcgctgtctttccttccctccctgctcggcggctccaccacagttgcaacctgcagaggcccggagaacacaaccctcccgagaagcccaggtccagagccaaacccgtcactgaccccccagcccaggcgcccagccactccccaccgctaccatggccgaagagtaaagatgctggtatcaggactttggttatgttggatgaacaaggagaacaactggaacgcattgaggaagggatggaccaaatcaataaggacatgaaagaagcagaaaagaatttgacggacctaggaaaattctgcgggctttgtgtgtgtccctgtaacaagcttaaatcaagtgatgcttacaaaaaagcctggggcaataatcaggacggagtggtggccagccagcctgctcgtgtagtggacgaacgggagcagatggccatcagtggcggcttcatccgcagggtaacaaatgatgcccgagaaaatgaaatggatgaaaacctagagcaggtgagcggcatcatcgggaacctccgtcacatggccctggatatgggcaatgagatcgatacacagaatcgccagatcgacaggatcatggagaaggctgattccaacaaaaccagaattgatgaggccaaccaacgtgcaacaaagatgctgggaagtggttaagtgtgcccacccgtgttctcctccaaatgctgtcgggcaagatagctccttcatgcttttctcatggtattatctagtaggtctgcacacataacacacatcagtccacccccattgtgaatgttgtcctgtgtcatctgtcagcttcccaacaatactttgtgtcttttgttctctcttggtctctttctttccaaaggttgtacatagtggtcatttggtggctctaactccttgattgtcaggctctgaatctctcaaaatgtgccgtctttggttcctcatggctgttatctgtctttatgatttcatgattagacaatgtggaattacataacaggcattgcactaaaagtgatgtgatttatgcatttatgcatgagaactaaatagatttttagattcctacttaaacaaaaactttccatgacagtagcatactgatgagacaacacacacacacacaaaacaacagcaacaacaacagaacaacaacaaagcatgctcagtattgagacactgtcaagattaagttataccagcaaaagtgcagtagtgtcacttttttcctgtcaatatatagagacttctaaatcataatcatccttttttaaaaaaaagaattttaaaaaagatggatttgacacactcaccatttaatcatttccagcaaaatatatgtttggctgaaattatgtcaaatggatgtaatatagggtttgtttgctgcttttgatggctacgttttggagagagcaatcttgctgtgaaacagtgtggatgtaaattttataaggctgactcttactaaccaccatttcccctgtggtttgttatcagtacaattctttgttgacccacaggtaccgaactcgagtcgtatcatgtcaactt

SEQ ID NO: 733152 - DNA, 1764 bp, Homo sapiens
agcggggccatctttgatgagggcagagctcacgttgcattgaagacgaaacctcggggaggtcaggcgctgtctttccttccctccctgctcggcggctccaccacagttgcaacctgcagaggcccggagaacacaaccctcccgagaagcccaggtccagagccaaacccgtcactgaccccccagcccaggcgcccagccactccccaccgctaccatggccgaagagtaaagatgctggtatcaggactttggttatgttggatgaacaaggagaacaactggaacgcattgaggaagggatggaccaaatcaataaggacatgaaagaagcagaaaagaatttgacggacctaggaaaattctgcgggctttgtgtgtgtccctgtaacaagcttaaatcaagtgatgcttacaaaaaagcctggggcaataatcaggacggagtggtggccagccagcctgctcgtgtagtggacgaacgggagcagatggccatcagtggcggcttcatccgcagggtaacaaatgatgcccgagaaaatgaaatggatgaaaacctagagcaggtgagcggcatcatcgggaacctccgtcacatggccctggatatgggcaatgagatcgatacacagaatcgccagatcgacaggatcatggagaaggctgattccaacaaaaccagaattgatgaggccaaccaacgtgcaacaaagatgctgggaagtggttaagtgtgcccacccgtgttctcctccaaatgctgtcgggcaagatagctccttcatgcttttctcatggtattatctagtaggtctgcacacataacacacatcagtccacccccattgtgaatgttgtcctgtgtcatctgtcagcttcccaacaatactttgtgtcttttgttctctcttggtctctttctttccaaaggttgtacatagtggtcatttggtggctctaactccttgattgtcaggctctgaatctctcaaaatgtgccgtctttggttcctcatggctgttatctgtctttatgatttcatgattagacaatgtggaattacataacaggcattgcactaaaagtgatgtgatttatgcatttatgcatgagaactaaatagatttttagattcctacttaaacaaaaactttccatgacagtagcatactgatgagacaacacacacacacacaaaacaacagcaacaacaacagaacaacaacaaagcatgctcagtattgagacactgtcaagattaagttataccagcaaaagtgcagtagtgtcacttttttcctgtcaatatatagagacttctaaatcataatcatccttttttcaaaatatatgtttggctgaaattatgtcaaatggatgtaatatagggtttgtttgctgcttttgatggctacgttttggagagagcaatcttgctgtgaaacagtgtggatgtaaattttataaggctgactcttactaaccaccatttcccctgtggtttgttatcagtacaattctttgttgcttaatctagagctatgcacaccaaattgctgagatgtttagtagctgataaagaaaccttttaaaaaaataatataaatgaatgaaatataaactgtgagataaatatcattatagcatgtaatattaaattcctcctgtctcctctgtcagtttgtgaagtgattgacattttgtagctagtttaaaattattaaaaattatagactccagatgatctgctttaattt

SEQ ID NO: 733153 - DNA, 1621 bp, Homo sapiens
  misc_feature (11)..(11): n is a, c, g, or t
atcagctcggnccaagttagtgggacgcaataaggacatgaaagaagcagaaaagaatttgacggacctaggaaaattctgcgggctttgtgtgtgtccctgtaacaagcttaaatcaagtgatgcttacaaaaaagcctggggcaataatcaggacggagtggtggccagccagcctgctcgtgtagtggacgaacgggagcagatggccatcagtggcggcttcatccgcagggtaacaaatgatgcccgagaaaatgaaatggatgaaaacctagagcaggtgagcggcatcatcgggaacctccgtcacatggccctggatatgggcaatgagatcgatacacagaatcgccagatcgacaggatcatggagaagtaagtgtgcccacccgtgttctcctccaaatgctgtcgggcaagatagctccttcatgcttttctcatggtattatctagtaggtctgcacacataacacacatcagtccacccccattgtgaatgttgtcctgtgtcatctgtcagcttcccaacaatactttgtgtcttttgttctctcttggtctctttctttccaaaggttgtacatagtggtcatttggtggctctaactccttgatgtcttgagtttcatttttcattttctctcctcggtggcatttgctgaataacaacaatttaggaatgctcaatgtgctgttgattctttcaatccacagtattgttcttgtaaaactgtgacattccacagagttactgccacggtcctttgagtgtcaggctctgaatctctcaaaatgtgccgtctttggttcctcatggctgttatctgtctttatgatttcatgattagacaatgtggaattacataacaggcattgcactaaaagtgatgtgatttatgcatttatgcatgagaactaaatagatttttagattcctacttaaacaaaaactttccatgacagtagcatactgatgagacaacacacacacacacaaaacaacagcaacaacaacagaacaacaacaaagcatgctcagtattgagacactgtcaagattaagttataccagcaaaagtgcagtagtgtcacttttttcctgtcaatatatagagacttctaaatcataatcatccttttttaaaaaaaagaattttaaaaaagatggatttgacacactcaccatttaatcatttccagcaaaatatatgtttggctgaaattatgtcaaatggatgtaatatagggtttgtttgctgcttttgatggctacgttttggagagagcaatcttgctgtgaaacagtgtggatgtaaattttataaggctgactcttactaaccaccatttcccctgtggtttgttatcagtacaattctttgttgcttaatctagagctatgcacaccaaattgctgagatgtttagtagctgataaagaaaccttttaaaaaaataatataaatgaatgaaatataaactgtgagataaatatcattatagcatgtaatattaaattcctcctgtctcctctgtcagtttgtgaagtgattgacattttgtagctagtttaaaattattaaaaattatagactccagatgatctgctttaattt

SEQ ID NO: 733154 - DNA, 1430 bp, Homo sapiens
  misc_feature (11)..(11): n is a, c, g, or t
atcagctcggnccaagttagtgggacgcaataaggacatgaaagaagcagaaaagaatttgacggacctaggaaaattctgcgggctttgtgtgtgtccctgtaacaagcttaaatcaagtgatgcttacaaaaaagcctggggcaataatcaggacggagtggtggccagccagcctgctcgtgtagtggacgaacgggagcagatggccatcagtggcggcttcatccgcagggtaacaaatgatgcccgagaaaatgaaatggatgaaaacctagagcaggtgagcggcatcatcgggaacctccgtcacatggccctggatatgggcaatgagatcgatacacagaatcgccagatcgacaggatcatggagaagtaagtgtgcccacccgtgttctcctccaaatgctgtcgggcaagatagctccttcatgcttttctcatggtattatctagtaggtctgcacacataacacacatcagtccacccccattgtgaatgttgtcctgtgtcatctgtcagcttcccaacaatactttgtgtcttttgttctctcttggtctctttctttccaaaggttgtacatagtggtcatttggtggctctaactccttgatgtcttgagtttcatttttcattttctctcctcggtggcatttgctgaataacaacaatttaggaatgctcaatgtgctgttgattctttcaatccacagtattgttcttgtaaaactgtgacattccacagagttactgccacggtcctttgagtgtcaggctctgaatctctcaaaatgtgccgtctttggttcctcatggctgttatctgtctttatgatttcatgattagacaatgtggaattacataacaggcattgcactaaaagtgatgtgatttatgcatttatgcatgagaactaaatagatttttagattcctacttaaacaaaaactttccatgacagtagcatactgatgagacaacacacacacacacaaaacaacagcaacaacaacagaacaacaacaaagcatgctcagtattgagacactgtcaagattaagttataccagcaaaagtgcagtagtgtcacttttttcctgtcaatatatagagacttctaaatcataatcatccttttttaaaaaaaagaattttaaaaaagatggatttgacacactcaccatttaatcatttccagcaaaatatatgtttggctgaaattatgtcaaatggatgtaatatagggtttgtttgctgcttttgatggctacgttttggagagagcaatcttgctgtgaaacagtgtggatgtaaattttataaggctgactcttactaaccaccatttcccctgtggtttgttatcagtacaattctttgttgacccacaggtaccgaactcgagtcgtatcatgtcaactt

SEQ ID NO: 733155 - DNA, 1563 bp, Homo sapiens
  misc_feature (11)..(11): n is a, c, g, or t
atcagctcggnccaagttagtgggacgcaataaggacatgaaagaagcagaaaagaatttgacggacctaggaaaattctgcgggctttgtgtgtgtccctgtaacaagcttaaatcaagtgatgcttacaaaaaagcctggggcaataatcaggacggagtggtggccagccagcctgctcgtgtagtggacgaacgggagcagatggccatcagtggcggcttcatccgcagggtaacaaatgatgcccgagaaaatgaaatggatgaaaacctagagcaggtgagcggcatcatcgggaacctccgtcacatggccctggatatgggcaatgagatcgatacacagaatcgccagatcgacaggatcatggagaagtaagtgtgcccacccgtgttctcctccaaatgctgtcgggcaagatagctccttcatgcttttctcatggtattatctagtaggtctgcacacataacacacatcagtccacccccattgtgaatgttgtcctgtgtcatctgtcagcttcccaacaatactttgtgtcttttgttctctcttggtctctttctttccaaaggttgtacatagtggtcatttggtggctctaactccttgatgtcttgagtttcatttttcattttctctcctcggtggcatttgctgaataacaacaatttaggaatgctcaatgtgctgttgattctttcaatccacagtattgttcttgtaaaactgtgacattccacagagttactgccacggtcctttgagtgtcaggctctgaatctctcaaaatgtgccgtctttggttcctcatggctgttatctgtctttatgatttcatgattagacaatgtggaattacataacaggcattgcactaaaagtgatgtgatttatgcatttatgcatgagaactaaatagatttttagattcctacttaaacaaaaactttccatgacagtagcatactgatgagacaacacacacacacacaaaacaacagcaacaacaacagaacaacaacaaagcatgctcagtattgagacactgtcaagattaagttataccagcaaaagtgcagtagtgtcacttttttcctgtcaatatatagagacttctaaatcataatcatccttttttcaaaatatatgtttggctgaaattatgtcaaatggatgtaatatagggtttgtttgctgcttttgatggctacgttttggagagagcaatcttgctgtgaaacagtgtggatgtaaattttataaggctgactcttactaaccaccatttcccctgtggtttgttatcagtacaattctttgttgcttaatctagagctatgcacaccaaattgctgagatgtttagtagctgataaagaaaccttttaaaaaaataatataaatgaatgaaatataaactgtgagataaatatcattatagcatgtaatattaaattcctcctgtctcctctgtcagtttgtgaagtgattgacattttgtagctagtttaaaattattaaaaattatagactccagatgatctgctttaattt

SEQ ID NO: 733156 - DNA, 1467 bp, Homo sapiens
  misc_feature (11)..(11): n is a, c, g, or t
atcagctcggnccaagttagtgggacgcaataaggacatgaaagaagcagaaaagaatttgacggacctaggaaaattctgcgggctttgtgtgtgtccctgtaacaagcttaaatcaagtgatgcttacaaaaaagcctggggcaataatcaggacggagtggtggccagccagcctgctcgtgtagtggacgaacgggagcagatggccatcagtggcggcttcatccgcagggtaacaaatgatgcccgagaaaatgaaatggatgaaaacctagagcaggtgagcggcatcatcgggaacctccgtcacatggccctggatatgggcaatgagatcgatacacagaatcgccagatcgacaggatcatggagaagtaagtgtgcccacccgtgttctcctccaaatgctgtcgggcaagatagctccttcatgcttttctcatggtattatctagtaggtctgcacacataacacacatcagtccacccccattgtgaatgttgtcctgtgtcatctgtcagcttcccaacaatactttgtgtcttttgttctctcttggtctctttctttccaaaggttgtacatagtggtcatttggtggctctaactccttgattgtcaggctctgaatctctcaaaatgtgccgtctttggttcctcatggctgttatctgtctttatgatttcatgattagacaatgtggaattacataacaggcattgcactaaaagtgatgtgatttatgcatttatgcatgagaactaaatagatttttagattcctacttaaacaaaaactttccatgacagtagcatactgatgagacaacacacacacacacaaaacaacagcaacaacaacagaacaacaacaaagcatgctcagtattgagacactgtcaagattaagttataccagcaaaagtgcagtagtgtcacttttttcctgtcaatatatagagacttctaaatcataatcatccttttttaaaaaaaagaattttaaaaaagatggatttgacacactcaccatttaatcatttccagcaaaatatatgtttggctgaaattatgtcaaatggatgtaatatagggtttgtttgctgcttttgatggctacgttttggagagagcaatcttgctgtgaaacagtgtggatgtaaattttataaggctgactcttactaaccaccatttcccctgtggtttgttatcagtacaattctttgttgcttaatctagagctatgcacaccaaattgctgagatgtttagtagctgataaagaaaccttttaaaaaaataatataaatgaatgaaatataaactgtgagataaatatcattatagcatgtaatattaaattcctcctgtctcctctgtcagtttgtgaagtgattgacattttgtagctagtttaaaattattaaaaattatagactccagatgatctgctttaattt

SEQ ID NO: 733157 - DNA, 1276 bp, Homo sapiens
  misc_feature (11)..(11): n is a, c, g, or t
atcagctcggnccaagttagtgggacgcaataaggacatgaaagaagcagaaaagaatttgacggacctaggaaaattctgcgggctttgtgtgtgtccctgtaacaagcttaaatcaagtgatgcttacaaaaaagcctggggcaataatcaggacggagtggtggccagccagcctgctcgtgtagtggacgaacgggagcagatggccatcagtggcggcttcatccgcagggtaacaaatgatgcccgagaaaatgaaatggatgaaaacctagagcaggtgagcggcatcatcgggaacctccgtcacatggccctggatatgggcaatgagatcgatacacagaatcgccagatcgacaggatcatggagaagtaagtgtgcccacccgtgttctcctccaaatgctgtcgggcaagatagctccttcatgcttttctcatggtattatctagtaggtctgcacacataacacacatcagtccacccccattgtgaatgttgtcctgtgtcatctgtcagcttcccaacaatactttgtgtcttttgttctctcttggtctctttctttccaaaggttgtacatagtggtcatttggtggctctaactccttgattgtcaggctctgaatctctcaaaatgtgccgtctttggttcctcatggctgttatctgtctttatgatttcatgattagacaatgtggaattacataacaggcattgcactaaaagtgatgtgatttatgcatttatgcatgagaactaaatagatttttagattcctacttaaacaaaaactttccatgacagtagcatactgatgagacaacacacacacacacaaaacaacagcaacaacaacagaacaacaacaaagcatgctcagtattgagacactgtcaagattaagttataccagcaaaagtgcagtagtgtcacttttttcctgtcaatatatagagacttctaaatcataatcatccttttttaaaaaaaagaattttaaaaaagatggatttgacacactcaccatttaatcatttccagcaaaatatatgtttggctgaaattatgtcaaatggatgtaatatagggtttgtttgctgcttttgatggctacgttttggagagagcaatcttgctgtgaaacagtgtggatgtaaattttataaggctgactcttactaaccaccatttcccctgtggtttgttatcagtacaattctttgttgacccacaggtaccgaactcgagtcgtatcatgtcaactt

SEQ ID NO: 733158 - DNA, 1409 bp, Homo sapiens
  misc_feature (11)..(11): n is a, c, g, or t
atcagctcggnccaagttagtgggacgcaataaggacatgaaagaagcagaaaagaatttgacggacctaggaaaattctgcgggctttgtgtgtgtccctgtaacaagcttaaatcaagtgatgcttacaaaaaagcctggggcaataatcaggacggagtggtggccagccagcctgctcgtgtagtggacgaacgggagcagatggccatcagtggcggcttcatccgcagggtaacaaatgatgcccgagaaaatgaaatggatgaaaacctagagcaggtgagcggcatcatcgggaacctccgtcacatggccctggatatgggcaatgagatcgatacacagaatcgccagatcgacaggatcatggagaagtaagtgtgcccacccgtgttctcctccaaatgctgtcgggcaagatagctccttcatgcttttctcatggtattatctagtaggtctgcacacataacacacatcagtccacccccattgtgaatgttgtcctgtgtcatctgtcagcttcccaacaatactttgtgtcttttgttctctcttggtctctttctttccaaaggttgtacatagtggtcatttggtggctctaactccttgattgtcaggctctgaatctctcaaaatgtgccgtctttggttcctcatggctgttatctgtctttatgatttcatgattagacaatgtggaattacataacaggcattgcactaaaagtgatgtgatttatgcatttatgcatgagaactaaatagatttttagattcctacttaaacaaaaactttccatgacagtagcatactgatgagacaacacacacacacacaaaacaacagcaacaacaacagaacaacaacaaagcatgctcagtattgagacactgtcaagattaagttataccagcaaaagtgcagtagtgtcacttttttcctgtcaatatatagagacttctaaatcataatcatccttttttcaaaatatatgtttggctgaaattatgtcaaatggatgtaatatagggtttgtttgctgcttttgatggctacgttttggagagagcaatcttgctgtgaaacagtgtggatgtaaattttataaggctgactcttactaaccaccatttcccctgtggtttgttatcagtacaattctttgttgcttaatctagagctatgcacaccaaattgctgagatgtttagtagctgataaagaaaccttttaaaaaaataatataaatgaatgaaatataaactgtgagataaatatcattatagcatgtaatattaaattcctcctgtctcctctgtcagtttgtgaagtgattgacattttgtagctagtttaaaattattaaaaattatagactccagatgatctgctttaattt

SEQ ID NO: 733159 - DNA, 256 bp, Homo sapiens
actgatttctctttctctcttttctctctctaactccttttcaactttgctaccattattggaatgagtaaagatgctggtatcaggactttggttatgttggatgaacaaggaggtaagttcagatttcttcagtaagaacaattcctcttctgaataatgtgcattttaaaattatttgtgcatacgcagatggtcgctttgacatgtgttacacatgtacacgaatgtgagggttctagatttttcatcttgc

SEQ ID NO: 733160 - DNA, 658 bp, Homo sapiens
cctacttcgctcgtccttgctctcgccgctgctgccggagccgaagcagagaaggcagcgggtcccgtgaccgtcccgagagccccgcgctcccgaccagggggcgggggcggccccggggagggcggggcaggggcggggggaagaaagggggttttgtgctgcgccgggagggccggcgccctcttccgaatgtcctgcggccccagcctctcctcacgctcgcgcagtctccgccgcagtctcagctgcagctgcaggactgagccgtgcacccggaggagacccccggaggaggcgacaaacttcgcagtgccgcgacccaaccccagccctgggtaggtgagtgcctccgcagccccgccgcccgccgtggggtcggggacagggagaagggagtgcctgcctggtctgcgccccccgcctgtcagcccttgcctcgaggctctggggcacccaactcgtcgactcctgacaccgcagcggggtaggctgctggacagccccgagcgcctgcagctgctgctgccatctctgatctacatgcttccagctctgccagtggcagcccccctgctgctcgcagtctgatcagcaacccctcgggtcctcgcatcttccctgctgcgcgctcctgtcccagcgcggccgcgagatt

SEQ ID NO: 733161 - DNA, 1490 bp, Homo sapiens
gccctaaggccctgcttatattgtgtaggctcatgttgctcctcatgaagccgttaagggggtagcagagagcttccctcctgctatagccaaagctctggcttcttgtgcctccctgctgaccctgctgagtgctggagctcagttcctatgggacagaccttggttgccggctgatgggcattcagcatggaggtggtgggtgttgttagatgtgtgtacacacgtgcatgcctacacacacaacacacacacacagagagagagagagagagagagagagagagagagagacctggtcttaactctctgggttgggtctatgaagactgtgagggagatggacatcccgggtcagacagaaatgatgtgacaagaggaaagtttcctgaacagctcaagaaattcaaaacaagggcagagatacagacgctggagctgaaacagagagggggatgttgtggcgtcaagggaacggaccgcatgactgctgagctctcagggttagagttggagaggtgtggcctgctctggaggaagagaagaggaagtggagatgagtggtgtgtgggatagagaaggccacagaaccctggacccctgggttctgaggctggtaccggatgtggggaagtctgagtttcctcagggctcctagctgcaattgggaggctgaggcccgagactggagagacagagctctctcagaactgcacggggctaccctcttggcctcactggtcagtgactcccatttttggggtcaaggtaggttgccctccatgttccagagcagttaggtcctcattggccttaggccctcttccctcactctcccactgtcagacagaggtgaaagggtggtccagggtgttggccccaaatgactccaactatatgggtctctgggctgcccgtcagagagatgggagccaggtctgtgagcagctccagctccagcccagagagaagggagggagggcaccagaagggggccaggcccaggcctggcacagctcagatgcatggcaaacagtcttcccagcacccggtgggcactggctgctcctgcccaatggtccccactccagccccagaacagtcctcccaagcaccccaatgtctggagctggtctccgcacctctaatctggccccatcaagaacctcctccctctgaaaggtcagagagaggccctaagcatctggttgtgccactcctctcccaactctgaccctagggaatgatatccagacacagtgggggagatgggggttatgatggcagggaggtgggaggatctgggaaaagtaggaaatttcccatcatctcaggcttaggaaagtgcagggacaggtatgaaggcagatgctgagagggcagggaagatgggggataaacagtgggcctggaatgggagtgcacagccagtggaataaacctgatctctaggaagtcctgcctgtagtctaaccttcaattctcttgct

SEQ ID NO: 733162 - DNA, 729 bp, Homo sapiens
accacgcgtcgccacgcgtcgccacgcgtgcccacgcgtcggtgtcctgtgggccgccaccggagctgcccctggctcaagtgttcggccgcccacggctgcgctatgaggtggacactgtgcttcgctaccggtgccgggaaggactggcccagcgcaatctgccgctgatccgatgccaagagaacggtcgttgggaggccccccagatctcctgtgtgcccagaagacctgcccgagctctgcacccagaggaggacccagaaggacgtcaggggaggctactgggacgctggaaggcgctgttgatccccccttccagccccatgccaggtccctagggggcaaggccttgaacactgccggccacagcactgccctgtcacccaaattttccctcacaccctgcgctcccgccaccacaggaagtgacaacatgacgaggggtggtgctggagtccaggtgacagttcctgaaggggcttctgggaaatacctaggaggctccagcccagcccaggccctctccccctaccctgggcaccagatcttccatcagggccggagtaaatccctaagtgcctcaactgccctctccctggcagccatcttgtcccctctattcctctagggagcactgtgcccactctttctgggttttccaagggaatgggcttgcaggatggagtgtctgtaaaatcaacaggaaataaaactgtgtatgagccc

SEQ ID NO: 733163 - DNA, 3525 bp, Homo sapiens
cctacttcgctcgtccttgctctcgccgctgctgccggagccgaagcagagaaggcagcgggtcccgtgaccgtcccgagagccccgcgctcccgaccagggggcgggggcggccccggggagggcggggcaggggcggggggaagaaagggggttttgtgctgcgccgggagggccggcgccctcttccgaatgtcctgcggccccagcctctcctcacgctcgcgcagtctccgccgcagtctcagctgcagctgcaggactgagccgtgcacccggaggagacccccggaggaggcgacaaacttcgcagtgccgcgacccaaccccagccctgggtagcctgcagcatggcccagctgttcctgcccctgctggcagccctggtcctggcccaggctcctgcagctttagcagatgttctggaaggagacagctcagaggaccgcgcttttcgcgtgcgcatcgcgggcgacgcgccactgcagggcgtgctcggcggcgccctcaccatcccttgccacgtccactacctgcggccaccgccgagccgccgggctgtgctgggctctccgcgggtcaagtggactttcctgtcccggggccgggaggcagaggtgctggtggcgcggggagtgcgcgtcaaggtgaacgaggcctaccggttccgcgtggcactgcctgcgtacccagcgtcgctcaccgacgtctccctggcgctgagcgagctgcgccccaacgactcaggtatctatcgctgtgaggtccagcacggcatcgatgacagcagcgacgctgtggaggtcaaggtcaaaggggtcgtctttctctaccgagagggctctgcccgctatgctttctccttttctggggcccaggaggcctgtgcccgcattggagcccacatcgccaccccggagcagctctatgccgcctaccttgggggctatgagcaatgtgatgctggctggctgtcggatcagaccgtgaggtatcccatccagaccccacgagaggcctgttacggagacatggatggcttccccggggtccggaactatggtgtggtggacccggatgacctctatgatgtgtactgttatgctgaagacctaaatggagaactgttcctgggtgaccctccagagaagctgacattggaggaagcacgggcgtactgccaggagcggggtgcagagattgccaccacgggccaactgtatgcagcctgggatggtggcctggaccactgcagcccagggtggctagctgatggcagtgtgcgctaccccatcgtcacacccagccagcgctgtggtgggggcttgcctggtgtcaagactctcttcctcttccccaaccagactggcttccccaataagcacagccgcttcaacgtctactgcttccgagactcggcccagccttctgccatccctgaggcctccaacccagcctccaacccagcctctgatggactagaggctatcgtcacagtgacagagaccctggaggaactgcagctgcctcaggaagccacagagagtgaatcccgtggggccatctactccatccccatcatggaggacggaggaggtggaagctccactccagaagacccagcagaggcccctaggacgctcctagaatttgaaacacaatccatggtaccgcccacggggttctcagaagaggaaggtaaggcattggaggaagaagagaaatatgaagatgaagaagagaaagaggaggaagaagaagaggaggaggtggaggatgaggctctgtgggcatggcccagcgagctcagcagcccgggccctgaggcctctctccccactgagccagcagcccaggaggagtcactctcccaggcgccagcaagggcagtcctgcagcctggtgcatcaccacttcctgatggagagtcagaagcttccaggcctccaagggtccatggaccacctactgagactctgcccactcccagggagaggaacctagcatccccatcaccttccactctggttgaggcaagagaggtgggggaggcaactggtggtcctgagctatctggggtccctcgaggagagagcgaggagacaggaagctccgagggtgccccttccctgcttccagccacacgggcccctgagggtaccagggagctggaggccccctctgaagataattctggaagaactgccccagcagggacctcagtgcaggcccagccagtgctgcccactgacagcgccagccgaggtggagtggccgtggtccccgcatcaggtgactgtgtccccagcccctgccacaatggtgggacatgcttggaggaggaggaaggggtccgctgcctatgtctgcctggctatgggggggacctgtgcgatgttggcctccgcttctgcaaccccggctgggacgccttccagggcgcctgctacaagcacttttccacacgaaggagctgggaggaggcagagacccagtgccggatgtacggcgcgcatctggccagcatcagcacacccgaggaacaggacttcatcaacaaccggtaccgggagtaccagtggatcggactcaacgacaggaccatcgaaggcgacttcttgtggtcggatggcgtccccctgctctatgagaactggaaccctgggcagcctgacagctacttcctgtctggagagaactgcgtggtcatggtgtggcatgatcagggacaatggagtgacgtgccctgcaactaccacctgtcctacacctgcaagatggggctggtgtcctgtgggccgccaccggagctgcccctggctcaagtgttcggccgcccacggctgcgctatgaggtggacactgtgcttcgctaccggtgccgggaaggactggcccagcgcaatctgccgctgatccgatgccaagagaacggtcgttgggaggccccccagatctcctgtgtgcccagaagacctgcccgagctctgcacccagaggaggacccagaaggacgtcaggggaggctactgggacgctggaaggcgctgttgatccccccttccagccccatgccaggtccctagggggcaaggccttgaacactgccggccacagcactgccctgtcacccaaattttccctcacaccctgcgctcccgccaccacaggaagtgacaacatgacgaggggtggtgctggagtccaggtgacagttcctgaaggggcttctgggaaatacctaggaggctccagcccagcccaggccctctccccctaccctgggcaccagatcttccatcagggccggagtaaatccctaagtgcctcaactgccctctccctggcagccatcttgtcccctctattcctctagggagcactgtgcccactctttctgggttttccaagggaatgggcttgcaggatggagtgtctgtaaaatcaacaggaaataaaactgtgtatgagccccaaaaaaaacacaaaacaaaaaaaaaaaaaaaaaaaaaaaacaaaaaaaaa

SEQ ID NO: 733164 - DNA, 3474 bp, Homo sapiens
cctacttcgctcgtccttgctctcgccgctgctgccggagccgaagcagagaaggcagcgggtcccgtgaccgtcccgagagccccgcgctcccgaccagggggcgggggcggccccggggagggcggggcaggggcggggggaagaaagggggttttgtgctgcgccgggagggccggcgccctcttccgaatgtcctgcggccccagcctctcctcacgctcgcgcagtctccgccgcagtctcagctgcagctgcaggactgagccgtgcacccggaggagacccccggaggaggcgacaaacttcgcagtgccgcgacccaaccccagccctgggtagcctgcagcatggcccagctgttcctgcccctgctggcagccctggtcctggcccaggctcctgcagctttagcagatgttctggaaggagacagctcagaggaccgcgcttttcgcgtgcgcatcgcgggcgacgcgccactgcagggcgtgctcggcggcgccctcaccatcccttgccacgtccactacctgcggccaccgccgagccgccgggctgtgctgggctctccgcgggtcaagtggactttcctgtcccggggccgggaggcagaggtgctggtggcgcggggagtgcgcgtcaaggtgaacgaggcctaccggttccgcgtggcactgcctgcgtacccagcgtcgctcaccgacgtctccctggcgctgagcgagctgcgccccaacgactcaggtatctatcgctgtgaggtccagcacggcatcgatgacagcagcgacgctgtggaggtcaaggtcaaaggggtcgtctttctctaccgagagggctctgcccgctatgctttctccttttctggggcccaggaggcctgtgcccgcattggagcccacatcgccaccccggagcagctctatgccgcctaccttgggggctatgagcaatgtgatgctggctggctgtcggatcagaccgtgaggtatcccatccagaccccacgagaggcctgttacggagacatggatggcttccccggggtccggaactatggtgtggtggacccggatgacctctatgatgtgtactgttatgctgaagacctaaatggagaactgttcctgggtgaccctccagagaagctgacattggaggaagcacgggcgtactgccaggagcggggtgcagagattgccaccacgggccaactgtatgcagcctgggatggtggcctggaccactgcagcccagggtggctagctgatggcagtgtgcgctaccccatcgtcacacccagccagcgctgtggtgggggcttgcctggtgtcaagactctcttcctcttccccaaccagactggcttccccaataagcacagccgcttcaacgtctactgcttccgagactcggcccagccttctgccatccctgaggcctccaacccagcctccaacccagcctctgatggactagaggctatcgtcacagtgacagagaccctggaggaactgcagctgcctcaggaagccacagagagtgaatcccgtggggccatctactccatccccatcatggaggacggaggaggtggaagctccactccagaagacccagcagaggcccctaggacgctcctagaatttgaaacacaatccatggtaccgcccacggggttctcagaagaggaaggtaaggcattggaggaagaagagaaatatgaagatgaagaagagaaagaggaggaagaagaagaggaggaggtggaggatgaggctctgtgggcatggcccagcgagctcagcagcccgggccctgaggcctctctccccactgagccagcagcccaggaggagtcactctcccaggcgccagcaagggcagtcctgcagcctggtgcatcaccacttcctgatggagagtcagaagcttccaggcctccaagggtccatggaccacctactgagactctgcccactcccagggagaggaacctagcatccccatcaccttccactctggttgaggcaagagaggtgggggaggcaactggtggtcctgagctatctggggtccctcgaggagagagcgaggagacaggaagctccgagggtgccccttccctgcttccagccacacgggcccctgagggtaccagggagctggaggccccctctgaagataattctggaagaactgccccagcagggacctcagtgcaggcccagccagtgctgcccactgacagcgccagccgaggtggagtggccgtggtccccgcatcaggtgactgtgtccccagcccctgccacaatggtgggacatgcttggaggaggaggaaggggtccgctgcctatgtctgcctggctatgggggggacctgtgcgatgttggcctccgcttctgcaaccccggctgggacgccttccagggcgcctgctacaagcacttttccacacgaaggagctgggaggaggcagagacccagtgccggatgtacggcgcgcatctggccagcatcagcacacccgaggaacaggacttcatcaacaaccggtaccgggagtaccagtggatcggactcaacgacaggaccatcgaaggcgacttcttgtggtcggatggcgtccccctgctctatgagaactggaaccctgggcagcctgacagctacttcctgtctggagagaactgcgtggtcatggtgtggcatgatcagggacaatggagtgacgtgccctgcaactaccacctgtcctacacctgcaagatggggctggtgtcctgtgggccgccaccggagctgcccctggctcaagtgttcggccgcccacggctgcgctatgaggtggacactgtgcttcgctaccggtgccgggaaggactggcccagcgcaatctgccgctgatccgatgccaagagaacggtcgttgggaggccccccagatctcctgtgtgcccagaagacctgcccgagctctgcacccagaggaggacccagaaggacgtcaggggaggctactgggacgctggaaggcgctgttgatccccccttccagccccatgccaggtccctagggggcaaggccttgaacactgccggccacagcactgccctgtcacccaaattttccctcacaccctgcgctcccgccaccacaggaagtgacaacatgacgaggggtggtgctggagtccaggtgacagttcctgaaggggcttctgggaaatacctaggaggctccagcccagcccaggccctctccccctaccctgggcaccagatcttccatcagggccggagtaaatccctaagtgcctcaactgccctctccctggcagccatcttgtcccctctattcctctagggagcactgtgcccactctttctgggttttccaagggaatgggcttgcaggatggagtgtctgtaaaatcaacaggaaataaaactgtgtatgagccc

SEQ ID NO: 733165 - DNA, 3796 bp, Homo sapiens
  misc_feature (3501)..(3501): n is a, c, g, or t
cctacttcgctcgtccttgctctcgccgctgctgccggagccgaagcagagaaggcagcgggtcccgtgaccgtcccgagagccccgcgctcccgaccagggggcgggggcggccccggggagggcggggcaggggcggggggaagaaagggggttttgtgctgcgccgggagggccggcgccctcttccgaatgtcctgcggccccagcctctcctcacgctcgcgcagtctccgccgcagtctcagctgcagctgcaggactgagccgtgcacccggaggagacccccggaggaggcgacaaacttcgcagtgccgcgacccaaccccagccctgggtagcctgcagcatggcccagctgttcctgcccctgctggcagccctggtcctggcccaggctcctgcagctttagcagatgttctggaaggagacagctcagaggaccgcgcttttcgcgtgcgcatcgcgggcgacgcgccactgcagggcgtgctcggcggcgccctcaccatcccttgccacgtccactacctgcggccaccgccgagccgccgggctgtgctgggctctccgcgggtcaagtggactttcctgtcccggggccgggaggcagaggtgctggtggcgcggggagtgcgcgtcaaggtgaacgaggcctaccggttccgcgtggcactgcctgcgtacccagcgtcgctcaccgacgtctccctggcgctgagcgagctgcgccccaacgactcaggtatctatcgctgtgaggtccagcacggcatcgatgacagcagcgacgctgtggaggtcaaggtcaaaggggtcgtctttctctaccgagagggctctgcccgctatgctttctccttttctggggcccaggaggcctgtgcccgcattggagcccacatcgccaccccggagcagctctatgccgcctaccttgggggctatgagcaatgtgatgctggctggctgtcggatcagaccgtgaggtatcccatccagaccccacgagaggcctgttacggagacatggatggcttccccggggtccggaactatggtgtggtggacccggatgacctctatgatgtgtactgttatgctgaagacctaaatggagaactgttcctgggtgaccctccagagaagctgacattggaggaagcacgggcgtactgccaggagcggggtgcagagattgccaccacgggccaactgtatgcagcctgggatggtggcctggaccactgcagcccagggtggctagctgatggcagtgtgcgctaccccatcgtcacacccagccagcgctgtggtgggggcttgcctggtgtcaagactctcttcctcttccccaaccagactggcttccccaataagcacagccgcttcaacgtctactgcttccgagactcggcccagccttctgccatccctgaggcctccaacccagcctccaacccagcctctgatggactagaggctatcgtcacagtgacagagaccctggaggaactgcagctgcctcaggaagccacagagagtgaatcccgtggggccatctactccatccccatcatggaggacggaggaggtggaagctccactccagaagacccagcagaggcccctaggacgctcctagaatttgaaacacaatccatggtaccgcccacggggttctcagaagaggaaggtaaggcattggaggaagaagagaaatatgaagatgaagaagagaaagaggaggaagaagaagaggaggaggtggaggatgaggctctgtgggcatggcccagcgagctcagcagcccgggccctgaggcctctctccccactgagccagcagcccaggaggagtcactctcccaggcgccagcaagggcagtcctgcagcctggtgcatcaccacttcctgatggagagtcagaagcttccaggcctccaagggtccatggaccacctactgagactctgcccactcccagggagaggaacctagcatccccatcaccttccactctggttgaggcaagagaggtgggggaggcaactggtggtcctgagctatctggggtccctcgaggagagagcgaggagacaggaagctccgagggtgccccttccctgcttccagccacacgggcccctgagggtaccagggagctggaggccccctctgaagataattctggaagaactgccccagcagggacctcagtgcaggcccagccagtgctgcccactgacagcgccagccgaggtggagtggccgtggtccccgcatcaggtgactgtgtccccagcccctgccacaatggtgggacatgcttggaggaggaggaaggggtccgctgcctatgtctgcctggctatgggggggacctgtgcgatgttggcctccgcttctgcaaccccggctgggacgccttccagggcgcctgctacaagcacttttccacacgaaggagctgggaggaggcagagacccagtgccggatgtacggcgcgcatctggccagcatcagcacacccgaggaacaggacttcatcaacaaccggtaccgggagtaccagtggatcggactcaacgacaggaccatcgaaggcgacttcttgtggtcggatggcgtccccctgctctatgagaactggaaccctgggcagcctgacagctacttcctgtctggagagaactgcgtggtcatggtgtggcatgatcagggacaatggagtgacgtgccctgcaactaccacctgtcctacacctgcaagatggggctggtgtcctgtgggccgccaccggagctgcccctggctcaagtgttcggccgcccacggctgcgctatgaggtggacactgtgcttcgctaccggtgccgggaaggactggcccagcgcaatctgccgctgatccgatgccaagagaacggtcgttgggaggccccccagatctcctgtgtgcccagaagacctgcccgagctctgcacccagaggaggacccagaaggacgtcaggggaggctactgggacgctggaaggcgctgttgatccccccttccagccccatgccaggtccctagggggcaaggccttgaacactgccggccacagcactgccctgtcacccaaattttccctcacaccctgcgctcccgccaccacaggaagtgacaacatgacgaggggtggtgctggagtccaggtgacagttcctgaaggggcttctgggaaatacctaggaggctccagcccagcccaggccctctccccctaccctgggcaccagatcttccatcagggccggagtaaatccctaagtgcctcaactgccctctccctggcagccatcttgtcccctctattcctctagggagcactgtgcccactctttctgggttttccaagggaatgggcttgcaggatggagtgtctgtaaaatcaacaggaaataaaactgtgtatgagcccagaaagaaaaaaaagaaacaacaaaanaaaaccaaaaacaaaaaaagggggcgccccccaaaaaaacaccccccgggggaccccaaagtagcgacccccactttttttgcaaaggggggcccccacaagagggcagcacgattataaaagaccggcgccggccaccgaggcataaaacaccgcggtgtgtgggaacaacgcgtgccagtggaacatctgcgggaggaaccaccactgcgagggcgggaaaaatgggcacgacacacgcgaaaattagcccacgcgaacacaggggacttaacgcacacaggacagaggccgg

SEQ ID NO: 733166 - DNA, 3364 bp, Homo sapiens
ttatatcgtgaccgacgccgtcgccacgcggtcggcctgcggccccagcctctcctcacgctcgcgcagtctccgccgcagtctcagctgcagctgcaggactgagccgtgcacccggaggagacccccggaggaggcgacaaacttcgcagtgccgcgacccaaccccagccctgggtagcctgcagcatggcccagctgttcctgcccctgctggcagccctggtcctggcccaggctcctgcagctttagcagatgttctggaaggagacagctcagaggaccgcgcttttcgcgtgcgcatcgcgggcgacgcgccactgcagggcgtgctcggcggcgccctcaccatcccttgccacgtccactacctgcggccaccgccgagccgccgggctgtgctgggctctccgcgggtcaagtggactttcctgtcccggggccgggaggcagaggtgctggtggcgcggggagtgcgcgtcaaggtgaacgaggcctaccggttccgcgtggcactgcctgcgtacccagcgtcgctcaccgacgtctccctggcgctgagcgagctgcgccccaacgactcaggtatctatcgctgtgaggtccagcacggcatcgatgacagcagcgacgctgtggaggtcaaggtcaaaggggtcgtctttctctaccgagagggctctgcccgctatgctttctccttttctggggcccaggaggcctgtgcccgcattggagcccacatcgccaccccggagcagctctatgccgcctaccttgggggctatgagcaatgtgatgctggctggctgtcggatcagaccgtgaggtatcccatccagaccccacgagaggcctgttacggagacatggatggcttccccggggtccggaactatggtgtggtggacccggatgacctctatgatgtgtactgttatgctgaagacctaaatggagaactgttcctgggtgaccctccagagaagctgacattggaggaagcacgggcgtactgccaggagcggggtgcagagattgccaccacgggccaactgtatgcagcctgggatggtggcctggaccactgcagcccagggtggctagctgatggcagtgtgcgctaccccatcgtcacacccagccagcgctgtggtgggggcttgcctggtgtcaagactctcttcctcttccccaaccagactggcttccccaataagcacagccgcttcaacgtctactgcttccgagactcggcccagccttctgccatccctgaggcctccaacccagcctccaacccagcctctgatggactagaggctatcgtcacagtgacagagaccctggaggaactgcagctgcctcaggaagccacagagagtgaatcccgtggggccatctactccatccccatcatggaggacggaggaggtggaagctccactccagaagacccagcagaggcccctaggacgctcctagaatttgaaacacaatccatggtaccgcccacggggttctcagaagaggaaggtaaggcattggaggaagaagagaaatatgaagatgaagaagagaaagaggaggaagaagaagaggaggaggtggaggatgaggctctgtgggcatggcccagcgagctcagcagcccgggccctgaggcctctctccccactgagccagcagcccaggaggagtcactctcccaggcgccagcaagggcagtcctgcagcctggtgcatcaccacttcctgatggagagtcagaagcttccaggcctccaagggtccatggaccacctactgagactctgcccactcccagggagaggaacctagcatccccatcaccttccactctggttgaggcaagagaggtgggggaggcaactggtggtcctgagctatctggggtccctcgaggagagagcgaggagacaggaagctccgagggtgccccttccctgcttccagccacacgggcccctgagggtaccagggagctggaggccccctctgaagataattctggaagaactgccccagcagggacctcagtgcaggcccagccagtgctgcccactgacagcgccagccgaggtggagtggccgtggtccccgcatcaggtgactgtgtccccagcccctgccacaatggtgggacatgcttggaggaggaggaaggggtccgctgcctatgtctgcctggctatgggggggacctgtgcgatgttggcctccgcttctgcaaccccggctgggacgccttccagggcgcctgctacaagcacttttccacacgaaggagctgggaggaggcagagacccagtgccggatgtacggcgcgcatctggccagcatcagcacacccgaggaacaggacttcatcaacaaccggtaccgggagtaccagtggatcggactcaacgacaggaccatcgaaggcgacttcttgtggtcggatggcgtccccctgctctatgagaactggaaccctgggcagcctgacagctacttcctgtctggagagaactgcgtggtcatggtgtggcatgatcagggacaatggagtgacgtgccctgcaactaccacctgtcctacacctgcaagatggggctggtgtcctgtgggccgccaccggagctgcccctggctcaagtgttcggccgcccacggctgcgctatgaggtggacactgtgcttcgctaccggtgccgggaaggactggcccagcgcaatctgccgctgatccgatgccaagagaacggtcgttgggaggccccccagatctcctgtgtgcccagaagacctgcccgagctctgcacccagaggaggacccagaaggacgtcaggggaggctactgggacgctggaaggcgctgttgatccccccttccagccccatgccaggtccctagggggcaaggccttgaacactgccggccacagcactgccctgtcacccaaattttccctcacaccctgcgctcccgccaccacaggaagtgacaacatgacgaggggtggtgctggagtccaggtgacagttcctgaaggggcttctgggaaatacctaggaggctccagcccagcccaggccctctccccctaccctgggcaccagatcttccatcagggccggagtaaatccctaagtgcctcaactgccctctccctggcagccatcttgtcccctctattcctctagggagcactgtgcccactctttctgggttttccaagggaatgggcttgcaggatggagtgtctgtaaaatcaacaggaaataaaactgtgtatgagccccaaaaaaaacacaaaacaaaaaaaaaaaaaaaaaaaaaaaacaaaaaaaaa

SEQ ID NO: 733167 - DNA, 3313 bp, Homo sapiens
ttatatcgtgaccgacgccgtcgccacgcggtcggcctgcggccccagcctctcctcacgctcgcgcagtctccgccgcagtctcagctgcagctgcaggactgagccgtgcacccggaggagacccccggaggaggcgacaaacttcgcagtgccgcgacccaaccccagccctgggtagcctgcagcatggcccagctgttcctgcccctgctggcagccctggtcctggcccaggctcctgcagctttagcagatgttctggaaggagacagctcagaggaccgcgcttttcgcgtgcgcatcgcgggcgacgcgccactgcagggcgtgctcggcggcgccctcaccatcccttgccacgtccactacctgcggccaccgccgagccgccgggctgtgctgggctctccgcgggtcaagtggactttcctgtcccggggccgggaggcagaggtgctggtggcgcggggagtgcgcgtcaaggtgaacgaggcctaccggttccgcgtggcactgcctgcgtacccagcgtcgctcaccgacgtctccctggcgctgagcgagctgcgccccaacgactcaggtatctatcgctgtgaggtccagcacggcatcgatgacagcagcgacgctgtggaggtcaaggtcaaaggggtcgtctttctctaccgagagggctctgcccgctatgctttctccttttctggggcccaggaggcctgtgcccgcattggagcccacatcgccaccccggagcagctctatgccgcctaccttgggggctatgagcaatgtgatgctggctggctgtcggatcagaccgtgaggtatcccatccagaccccacgagaggcctgttacggagacatggatggcttccccggggtccggaactatggtgtggtggacccggatgacctctatgatgtgtactgttatgctgaagacctaaatggagaactgttcctgggtgaccctccagagaagctgacattggaggaagcacgggcgtactgccaggagcggggtgcagagattgccaccacgggccaactgtatgcagcctgggatggtggcctggaccactgcagcccagggtggctagctgatggcagtgtgcgctaccccatcgtcacacccagccagcgctgtggtgggggcttgcctggtgtcaagactctcttcctcttccccaaccagactggcttccccaataagcacagccgcttcaacgtctactgcttccgagactcggcccagccttctgccatccctgaggcctccaacccagcctccaacccagcctctgatggactagaggctatcgtcacagtgacagagaccctggaggaactgcagctgcctcaggaagccacagagagtgaatcccgtggggccatctactccatccccatcatggaggacggaggaggtggaagctccactccagaagacccagcagaggcccctaggacgctcctagaatttgaaacacaatccatggtaccgcccacggggttctcagaagaggaaggtaaggcattggaggaagaagagaaatatgaagatgaagaagagaaagaggaggaagaagaagaggaggaggtggaggatgaggctctgtgggcatggcccagcgagctcagcagcccgggccctgaggcctctctccccactgagccagcagcccaggaggagtcactctcccaggcgccagcaagggcagtcctgcagcctggtgcatcaccacttcctgatggagagtcagaagcttccaggcctccaagggtccatggaccacctactgagactctgcccactcccagggagaggaacctagcatccccatcaccttccactctggttgaggcaagagaggtgggggaggcaactggtggtcctgagctatctggggtccctcgaggagagagcgaggagacaggaagctccgagggtgccccttccctgcttccagccacacgggcccctgagggtaccagggagctggaggccccctctgaagataattctggaagaactgccccagcagggacctcagtgcaggcccagccagtgctgcccactgacagcgccagccgaggtggagtggccgtggtccccgcatcaggtgactgtgtccccagcccctgccacaatggtgggacatgcttggaggaggaggaaggggtccgctgcctatgtctgcctggctatgggggggacctgtgcgatgttggcctccgcttctgcaaccccggctgggacgccttccagggcgcctgctacaagcacttttccacacgaaggagctgggaggaggcagagacccagtgccggatgtacggcgcgcatctggccagcatcagcacacccgaggaacaggacttcatcaacaaccggtaccgggagtaccagtggatcggactcaacgacaggaccatcgaaggcgacttcttgtggtcggatggcgtccccctgctctatgagaactggaaccctgggcagcctgacagctacttcctgtctggagagaactgcgtggtcatggtgtggcatgatcagggacaatggagtgacgtgccctgcaactaccacctgtcctacacctgcaagatggggctggtgtcctgtgggccgccaccggagctgcccctggctcaagtgttcggccgcccacggctgcgctatgaggtggacactgtgcttcgctaccggtgccgggaaggactggcccagcgcaatctgccgctgatccgatgccaagagaacggtcgttgggaggccccccagatctcctgtgtgcccagaagacctgcccgagctctgcacccagaggaggacccagaaggacgtcaggggaggctactgggacgctggaaggcgctgttgatccccccttccagccccatgccaggtccctagggggcaaggccttgaacactgccggccacagcactgccctgtcacccaaattttccctcacaccctgcgctcccgccaccacaggaagtgacaacatgacgaggggtggtgctggagtccaggtgacagttcctgaaggggcttctgggaaatacctaggaggctccagcccagcccaggccctctccccctaccctgggcaccagatcttccatcagggccggagtaaatccctaagtgcctcaactgccctctccctggcagccatcttgtcccctctattcctctagggagcactgtgcccactctttctgggttttccaagggaatgggcttgcaggatggagtgtctgtaaaatcaacaggaaataaaactgtgtatgagccc

SEQ ID NO: 733168 - DNA, 3635 bp, Homo sapiens
  misc_feature (3340)..(3340): n is a, c, g, or t
ttatatcgtgaccgacgccgtcgccacgcggtcggcctgcggccccagcctctcctcacgctcgcgcagtctccgccgcagtctcagctgcagctgcaggactgagccgtgcacccggaggagacccccggaggaggcgacaaacttcgcagtgccgcgacccaaccccagccctgggtagcctgcagcatggcccagctgttcctgcccctgctggcagccctggtcctggcccaggctcctgcagctttagcagatgttctggaaggagacagctcagaggaccgcgcttttcgcgtgcgcatcgcgggcgacgcgccactgcagggcgtgctcggcggcgccctcaccatcccttgccacgtccactacctgcggccaccgccgagccgccgggctgtgctgggctctccgcgggtcaagtggactttcctgtcccggggccgggaggcagaggtgctggtggcgcggggagtgcgcgtcaaggtgaacgaggcctaccggttccgcgtggcactgcctgcgtacccagcgtcgctcaccgacgtctccctggcgctgagcgagctgcgccccaacgactcaggtatctatcgctgtgaggtccagcacggcatcgatgacagcagcgacgctgtggaggtcaaggtcaaaggggtcgtctttctctaccgagagggctctgcccgctatgctttctccttttctggggcccaggaggcctgtgcccgcattggagcccacatcgccaccccggagcagctctatgccgcctaccttgggggctatgagcaatgtgatgctggctggctgtcggatcagaccgtgaggtatcccatccagaccccacgagaggcctgttacggagacatggatggcttccccggggtccggaactatggtgtggtggacccggatgacctctatgatgtgtactgttatgctgaagacctaaatggagaactgttcctgggtgaccctccagagaagctgacattggaggaagcacgggcgtactgccaggagcggggtgcagagattgccaccacgggccaactgtatgcagcctgggatggtggcctggaccactgcagcccagggtggctagctgatggcagtgtgcgctaccccatcgtcacacccagccagcgctgtggtgggggcttgcctggtgtcaagactctcttcctcttccccaaccagactggcttccccaataagcacagccgcttcaacgtctactgcttccgagactcggcccagccttctgccatccctgaggcctccaacccagcctccaacccagcctctgatggactagaggctatcgtcacagtgacagagaccctggaggaactgcagctgcctcaggaagccacagagagtgaatcccgtggggccatctactccatccccatcatggaggacggaggaggtggaagctccactccagaagacccagcagaggcccctaggacgctcctagaatttgaaacacaatccatggtaccgcccacggggttctcagaagaggaaggtaaggcattggaggaagaagagaaatatgaagatgaagaagagaaagaggaggaagaagaagaggaggaggtggaggatgaggctctgtgggcatggcccagcgagctcagcagcccgggccctgaggcctctctccccactgagccagcagcccaggaggagtcactctcccaggcgccagcaagggcagtcctgcagcctggtgcatcaccacttcctgatggagagtcagaagcttccaggcctccaagggtccatggaccacctactgagactctgcccactcccagggagaggaacctagcatccccatcaccttccactctggttgaggcaagagaggtgggggaggcaactggtggtcctgagctatctggggtccctcgaggagagagcgaggagacaggaagctccgagggtgccccttccctgcttccagccacacgggcccctgagggtaccagggagctggaggccccctctgaagataattctggaagaactgccccagcagggacctcagtgcaggcccagccagtgctgcccactgacagcgccagccgaggtggagtggccgtggtccccgcatcaggtgactgtgtccccagcccctgccacaatggtgggacatgcttggaggaggaggaaggggtccgctgcctatgtctgcctggctatgggggggacctgtgcgatgttggcctccgcttctgcaaccccggctgggacgccttccagggcgcctgctacaagcacttttccacacgaaggagctgggaggaggcagagacccagtgccggatgtacggcgcgcatctggccagcatcagcacacccgaggaacaggacttcatcaacaaccggtaccgggagtaccagtggatcggactcaacgacaggaccatcgaaggcgacttcttgtggtcggatggcgtccccctgctctatgagaactggaaccctgggcagcctgacagctacttcctgtctggagagaactgcgtggtcatggtgtggcatgatcagggacaatggagtgacgtgccctgcaactaccacctgtcctacacctgcaagatggggctggtgtcctgtgggccgccaccggagctgcccctggctcaagtgttcggccgcccacggctgcgctatgaggtggacactgtgcttcgctaccggtgccgggaaggactggcccagcgcaatctgccgctgatccgatgccaagagaacggtcgttgggaggccccccagatctcctgtgtgcccagaagacctgcccgagctctgcacccagaggaggacccagaaggacgtcaggggaggctactgggacgctggaaggcgctgttgatccccccttccagccccatgccaggtccctagggggcaaggccttgaacactgccggccacagcactgccctgtcacccaaattttccctcacaccctgcgctcccgccaccacaggaagtgacaacatgacgaggggtggtgctggagtccaggtgacagttcctgaaggggcttctgggaaatacctaggaggctccagcccagcccaggccctctccccctaccctgggcaccagatcttccatcagggccggagtaaatccctaagtgcctcaactgccctctccctggcagccatcttgtcccctctattcctctagggagcactgtgcccactctttctgggttttccaagggaatgggcttgcaggatggagtgtctgtaaaatcaacaggaaataaaactgtgtatgagcccagaaagaaaaaaaagaaacaacaaaanaaaaccaaaaacaaaaaaagggggcgccccccaaaaaaacaccccccgggggaccccaaagtagcgacccccactttttttgcaaaggggggcccccacaagagggcagcacgattataaaagaccggcgccggccaccgaggcataaaacaccgcggtgtgtgggaacaacgcgtgccagtggaacatctgcgggaggaaccaccactgcgagggcgggaaaaatgggcacgacacacgcgaaaattagcccacgcgaacacaggggacttaacgcacacaggacagaggccgg

SEQ ID NO: 733169 - DNA, 2934 bp, Homo sapiens
cctacttcgctcgtccttgctctcgccgctgctgccggagccgaagcagagaaggcagcgggtcccgtgaccgtcccgagagccccgcgctcccgaccagggggcgggggcggccccggggagggcggggcaggggcggggggaagaaagggggttttgtgctgcgccgggagggccggcgccctcttccgaatgtcctgcggccccagcctctcctcacgctcgcgcagtctccgccgcagtctcagctgcagctgcaggactgagccgtgcacccggaggagacccccggaggaggcgacaaacttcgcagtgccgcgacccaaccccagccctgggtagcctgcagcatggcccagctgttcctgcccctgctggcagccctggtcctggcccaggctcctgcagctttagcagatgttctggaaggagacagctcagaggaccgcgcttttcgcgtgcgcatcgcgggcgacgcgccactgcagggcgtgctcggcggcgccctcaccatcccttgccacgtccactacctgcggccaccgccgagccgccgggctgtgctgggctctccgcgggtcaagtggactttcctgtcccggggccgggaggcagaggtgctggtggcgcggggagtgcgcgtcaaggtgaacgaggcctaccggttccgcgtggcactgcctgcgtacccagcgtcgctcaccgacgtctccctggcgctgagcgagctgcgccccaacgactcaggtatctatcgctgtgaggtccagcacggcatcgatgacagcagcgacgctgtggaggtcaaggtcaaaggggtcgtctttctctaccgagagggctctgcccgctatgctttctccttttctggggcccaggaggcctgtgcccgcattggagcccacatcgccaccccggagcagctctatgccgcctaccttgggggctatgagcaatgtgatgctggctggctgtcggatcagaccgtgaggtatcccatccagaccccacgagaggcctgttacggagacatggatggcttccccggggtccggaactatggtgtggtggacccggatgacctctatgatgtgtactgttatgctgaagacctaaatggagaactgttcctgggtgaccctccagagaagctgacattggaggaagcacgggcgtactgccaggagcggggtgcagagattgccaccacgggccaactgtatgcagcctgggatggtggcctggaccactgcagcccagggtggctagctgatggcagtgtgcgctaccccatcgtcacacccagccagcgctgtggtgggggcttgcctggtgtcaagactctcttcctcttccccaaccagactggcttccccaataagcacagccgcttcaacgtctactgcttccgagactcggcccagccttctgccatccctgaggcctccaacccagcctccaacccagcctctgatggactagaggctatcgtcacagtgacagagaccctggaggaactgcagctgcctcaggaagccacagagagtgaatcccgtggggccatctactccatccccatcatggaggacggaggaggtggaagctccactccagaagacccagcagaggcccctaggacgctcctagaatttgaaacacaatccatggtaccgcccacggggttctcagaagaggaaggtaaggcattggaggaagaagagaaatatgaagatgaagaagagaaagaggaggaagaagaagaggaggaggtggaggatgaggctctgtgggcatggcccagcgagctcagcagcccgggccctgaggcctctctccccactgagccagcagcccaggaggagtcactctcccaggcgccagcaagggcagtcctgcagcctggtgcatcaccacttcctgatggagagtcagaagcttccaggcctccaagggtccatggaccacctactgagactctgcccactcccagggagaggaacctagcatccccatcaccttccactctggttgaggcaagagaggtgggggaggcaactggtggtcctgagctatctggggtccctcgaggagagagcgaggagacaggaagctccgagggtgccccttccctgcttccagccacacgggcccctgagggtaccagggagctggaggccccctctgaagataattctggaagaactgccccagcagggacctcagtgcaggcccagccagtgctgcccactgacagcgccagccgaggtggagtggccgtggtccccgcatcaggtgactgtgtccccagcccctgccacaatggtgggacatgcttggaggaggaggaaggggtccgctgcctatgtctgcctggctatgggggggacctgtgcgatgttggcctccgcttctgcaaccccggctgggacgccttccagggcgcctgctacaagcacttttccacacgaaggagctgggaggaggcagagacccagtgccggatgtacggcgcgcatctggccagcatcagcacacccgaggaacaggacttcatcaacagtgggctgggagacagggcgggaggggcccccgccatatgctctcactctctctcactcgcctaaccgccttcctcattaacccatgcacttattccttggttttctcaagcgtgcattccctcactcattcgttcactccccttctcattctctctcccttcccaccctacgcttaggcagtggccttcgggaacggagagtggaggttcgcgcagtagagtgcgcctgtgtgggccgggccgccgtgcagggggccgcctccaatccctccaacctccctgctctccgacctccgtcggcctcctccaactccaactccaatcttgttgaaagttttgactctttttccaaaactccccttttctagcctggg

SEQ ID NO: 733170 - DNA, 2871 bp, Homo sapiens
cctacttcgctcgtccttgctctcgccgctgctgccggagccgaagcagagaaggcagcgggtcccgtgaccgtcccgagagccccgcgctcccgaccagggggcgggggcggccccggggagggcggggcaggggcggggggaagaaagggggttttgtgctgcgccgggagggccggcgccctcttccgaatgtcctgcggccccagcctctcctcacgctcgcgcagtctccgccgcagtctcagctgcagctgcaggactgagccgtgcacccggaggagacccccggaggaggcgacaaacttcgcagtgccgcgacccaaccccagccctgggtagcctgcagcatggcccagctgttcctgcccctgctggcagccctggtcctggcccaggctcctgcagctttagcagatgttctggaaggagacagctcagaggaccgcgcttttcgcgtgcgcatcgcgggcgacgcgccactgcagggcgtgctcggcggcgccctcaccatcccttgccacgtccactacctgcggccaccgccgagccgccgggctgtgctgggctctccgcgggtcaagtggactttcctgtcccggggccgggaggcagaggtgctggtggcgcggggagtgcgcgtcaaggtgaacgaggcctaccggttccgcgtggcactgcctgcgtacccagcgtcgctcaccgacgtctccctggcgctgagcgagctgcgccccaacgactcaggtatctatcgctgtgaggtccagcacggcatcgatgacagcagcgacgctgtggaggtcaaggtcaaaggggtcgtctttctctaccgagagggctctgcccgctatgctttctccttttctggggcccaggaggcctgtgcccgcattggagcccacatcgccaccccggagcagctctatgccgcctaccttgggggctatgagcaatgtgatgctggctggctgtcggatcagaccgtgaggtatcccatccagaccccacgagaggcctgttacggagacatggatggcttccccggggtccggaactatggtgtggtggacccggatgacctctatgatgtgtactgttatgctgaagacctaaatggagaactgttcctgggtgaccctccagagaagctgacattggaggaagcacgggcgtactgccaggagcggggtgcagagattgccaccacgggccaactgtatgcagcctgggatggtggcctggaccactgcagcccagggtggctagctgatggcagtgtgcgctaccccatcgtcacacccagccagcgctgtggtgggggcttgcctggtgtcaagactctcttcctcttccccaaccagactggcttccccaataagcacagccgcttcaacgtctactgcttccgagactcggcccagccttctgccatccctgaggcctccaacccagcctccaacccagcctctgatggactagaggctatcgtcacagtgacagagaccctggaggaactgcagctgcctcaggaagccacagagagtgaatcccgtggggccatctactccatccccatcatggaggacggaggaggtggaagctccactccagaagacccagcagaggcccctaggacgctcctagaatttgaaacacaatccatggtaccgcccacggggttctcagaagaggaaggtaaggcattggaggaagaagagaaatatgaagatgaagaagagaaagaggaggaagaagaagaggaggaggtggaggatgaggctctgtgggcatggcccagcgagctcagcagcccgggccctgaggcctctctccccactgagccagcagcccaggaggagtcactctcccaggcgccagcaagggcagtcctgcagcctggtgcatcaccacttcctgatggagagtcagaagcttccaggcctccaagggtccatggaccacctactgagactctgcccactcccagggagaggaacctagcatccccatcaccttccactctggttgaggcaagagaggtgggggaggcaactggtggtcctgagctatctggggtccctcgaggagagagcgaggagacaggaagctccgagggtgccccttccctgcttccagccacacgggcccctgagggtaccagggagctggaggccccctctgaagataattctggaagaactgccccagcagggacctcagtgcaggcccagccagtgctgcccactgacagcgccagccgaggtggagtggccgtggtccccgcatcaggtaattctgcccaaggctcaactgccctctctatcctactccttttcttccccctgcagctctgggtcacctgacctgtagtcctttaacccaccatcatcccaaactctcctgtcctttgccttcattctcttacccacctctacctatgggtctccaatctcggatatccaccttgtgggtatctcagctctccgcgtctttaccctgtgatcccagccccgccactgaccatctgtgacccttccctgccattgggccctccacctgtggctcacatctcgccagccccacagagcatcctcaggcctctccaagggtcctcatcacctattgcagccttcagggctcggcctattttccactactcccttcatccgcctgtgtgccgtcccctttagctgcctcctattgatctcagggaagcctgggagtcccttctcacccctcaacctccggagtccaggagaacccgtacccccacagagccttaagcaactacttctgtgaagtattttttgactgtttcatggaaaacaagccttggaaataaatctctattaaaccgctttgtaacca

SEQ ID NO: 733171 - DNA, 3361 bp, Homo sapiens
accacgcgtcgccacgcgtcgccacgcgtgcccacgcgtcgccagcctctcctcacgctcgcgcagtctccgccgcagtctcagctgcagctgcaggactgagccgtgcacccggaggagacccccggaggaggcgacaaacttcgcagtgccgcgacccaaccccagccctgggtagcctgcagcatggcccagctgttcctgcccctgctggcagccctggtcctggcccaggctcctgcagctttagcagatgttctggaaggagacagctcagaggaccgcgcttttcgcgtgcgcatcgcgggcgacgcgccactgcagggcgtgctcggcggcgccctcaccatcccttgccacgtccactacctgcggccaccgccgagccgccgggctgtgctgggctctccgcgggtcaagtggactttcctgtcccggggccgggaggcagaggtgctggtggcgcggggagtgcgcgtcaaggtgaacgaggcctaccggttccgcgtggcactgcctgcgtacccagcgtcgctcaccgacgtctccctggcgctgagcgagctgcgccccaacgactcaggtatctatcgctgtgaggtccagcacggcatcgatgacagcagcgacgctgtggaggtcaaggtcaaaggggtcgtctttctctaccgagagggctctgcccgctatgctttctccttttctggggcccaggaggcctgtgcccgcattggagcccacatcgccaccccggagcagctctatgccgcctaccttgggggctatgagcaatgtgatgctggctggctgtcggatcagaccgtgaggtatcccatccagaccccacgagaggcctgttacggagacatggatggcttccccggggtccggaactatggtgtggtggacccggatgacctctatgatgtgtactgttatgctgaagacctaaatggagaactgttcctgggtgaccctccagagaagctgacattggaggaagcacgggcgtactgccaggagcggggtgcagagattgccaccacgggccaactgtatgcagcctgggatggtggcctggaccactgcagcccagggtggctagctgatggcagtgtgcgctaccccatcgtcacacccagccagcgctgtggtgggggcttgcctggtgtcaagactctcttcctcttccccaaccagactggcttccccaataagcacagccgcttcaacgtctactgcttccgagactcggcccagccttctgccatccctgaggcctccaacccagcctccaacccagcctctgatggactagaggctatcgtcacagtgacagagaccctggaggaactgcagctgcctcaggaagccacagagagtgaatcccgtggggccatctactccatccccatcatggaggacggaggaggtggaagctccactccagaagacccagcagaggcccctaggacgctcctagaatttgaaacacaatccatggtaccgcccacggggttctcagaagaggaaggtaaggcattggaggaagaagagaaatatgaagatgaagaagagaaagaggaggaagaagaagaggaggaggtggaggatgaggctctgtgggcatggcccagcgagctcagcagcccgggccctgaggcctctctccccactgagccagcagcccaggaggagtcactctcccaggcgccagcaagggcagtcctgcagcctggtgcatcaccacttcctgatggagagtcagaagcttccaggcctccaagggtccatggaccacctactgagactctgcccactcccagggagaggaacctagcatccccatcaccttccactctggttgaggcaagagaggtgggggaggcaactggtggtcctgagctatctggggtccctcgaggagagagcgaggagacaggaagctccgagggtgccccttccctgcttccagccacacgggcccctgagggtaccagggagctggaggccccctctgaagataattctggaagaactgccccagcagggacctcagtgcaggcccagccagtgctgcccactgacagcgccagccgaggtggagtggccgtggtccccgcatcaggtgactgtgtccccagcccctgccacaatggtgggacatgcttggaggaggaggaaggggtccgctgcctatgtctgcctggctatgggggggacctgtgcgatgttggcctccgcttctgcaaccccggctgggacgccttccagggcgcctgctacaagcacttttccacacgaaggagctgggaggaggcagagacccagtgccggatgtacggcgcgcatctggccagcatcagcacacccgaggaacaggacttcatcaacaaccggtaccgggagtaccagtggatcggactcaacgacaggaccatcgaaggcgacttcttgtggtcggatggcgtccccctgctctatgagaactggaaccctgggcagcctgacagctacttcctgtctggagagaactgcgtggtcatggtgtggcatgatcagggacaatggagtgacgtgccctgcaactaccacctgtcctacacctgcaagatggggctggtgtcctgtgggccgccaccggagctgcccctggctcaagtgttcggccgcccacggctgcgctatgaggtggacactgtgcttcgctaccggtgccgggaaggactggcccagcgcaatctgccgctgatccgatgccaagagaacggtcgttgggaggccccccagatctcctgtgtgcccagaagacctgcccgagctctgcacccagaggaggacccagaaggacgtcaggggaggctactgggacgctggaaggcgctgttgatccccccttccagccccatgccaggtccctagggggcaaggccttgaacactgccggccacagcactgccctgtcacccaaattttccctcacaccctgcgctcccgccaccacaggaagtgacaacatgacgaggggtggtgctggagtccaggtgacagttcctgaaggggcttctgggaaatacctaggaggctccagcccagcccaggccctctccccctaccctgggcaccagatcttccatcagggccggagtaaatccctaagtgcctcaactgccctctccctggcagccatcttgtcccctctattcctctagggagcactgtgcccactctttctgggttttccaagggaatgggcttgcaggatggagtgtctgtaaaatcaacaggaaataaaactgtgtatgagccccaaaaaaaacacaaaacaaaaaaaaaaaaaaaaaaaaaaaacaaaaaaaaa

SEQ ID NO: 733172 - DNA, 3310 bp, Homo sapiens
accacgcgtcgccacgcgtcgccacgcgtgcccacgcgtcgccagcctctcctcacgctcgcgcagtctccgccgcagtctcagctgcagctgcaggactgagccgtgcacccggaggagacccccggaggaggcgacaaacttcgcagtgccgcgacccaaccccagccctgggtagcctgcagcatggcccagctgttcctgcccctgctggcagccctggtcctggcccaggctcctgcagctttagcagatgttctggaaggagacagctcagaggaccgcgcttttcgcgtgcgcatcgcgggcgacgcgccactgcagggcgtgctcggcggcgccctcaccatcccttgccacgtccactacctgcggccaccgccgagccgccgggctgtgctgggctctccgcgggtcaagtggactttcctgtcccggggccgggaggcagaggtgctggtggcgcggggagtgcgcgtcaaggtgaacgaggcctaccggttccgcgtggcactgcctgcgtacccagcgtcgctcaccgacgtctccctggcgctgagcgagctgcgccccaacgactcaggtatctatcgctgtgaggtccagcacggcatcgatgacagcagcgacgctgtggaggtcaaggtcaaaggggtcgtctttctctaccgagagggctctgcccgctatgctttctccttttctggggcccaggaggcctgtgcccgcattggagcccacatcgccaccccggagcagctctatgccgcctaccttgggggctatgagcaatgtgatgctggctggctgtcggatcagaccgtgaggtatcccatccagaccccacgagaggcctgttacggagacatggatggcttccccggggtccggaactatggtgtggtggacccggatgacctctatgatgtgtactgttatgctgaagacctaaatggagaactgttcctgggtgaccctccagagaagctgacattggaggaagcacgggcgtactgccaggagcggggtgcagagattgccaccacgggccaactgtatgcagcctgggatggtggcctggaccactgcagcccagggtggctagctgatggcagtgtgcgctaccccatcgtcacacccagccagcgctgtggtgggggcttgcctggtgtcaagactctcttcctcttccccaaccagactggcttccccaataagcacagccgcttcaacgtctactgcttccgagactcggcccagccttctgccatccctgaggcctccaacccagcctccaacccagcctctgatggactagaggctatcgtcacagtgacagagaccctggaggaactgcagctgcctcaggaagccacagagagtgaatcccgtggggccatctactccatccccatcatggaggacggaggaggtggaagctccactccagaagacccagcagaggcccctaggacgctcctagaatttgaaacacaatccatggtaccgcccacggggttctcagaagaggaaggtaaggcattggaggaagaagagaaatatgaagatgaagaagagaaagaggaggaagaagaagaggaggaggtggaggatgaggctctgtgggcatggcccagcgagctcagcagcccgggccctgaggcctctctccccactgagccagcagcccaggaggagtcactctcccaggcgccagcaagggcagtcctgcagcctggtgcatcaccacttcctgatggagagtcagaagcttccaggcctccaagggtccatggaccacctactgagactctgcccactcccagggagaggaacctagcatccccatcaccttccactctggttgaggcaagagaggtgggggaggcaactggtggtcctgagctatctggggtccctcgaggagagagcgaggagacaggaagctccgagggtgccccttccctgcttccagccacacgggcccctgagggtaccagggagctggaggccccctctgaagataattctggaagaactgccccagcagggacctcagtgcaggcccagccagtgctgcccactgacagcgccagccgaggtggagtggccgtggtccccgcatcaggtgactgtgtccccagcccctgccacaatggtgggacatgcttggaggaggaggaaggggtccgctgcctatgtctgcctggctatgggggggacctgtgcgatgttggcctccgcttctgcaaccccggctgggacgccttccagggcgcctgctacaagcacttttccacacgaaggagctgggaggaggcagagacccagtgccggatgtacggcgcgcatctggccagcatcagcacacccgaggaacaggacttcatcaacaaccggtaccgggagtaccagtggatcggactcaacgacaggaccatcgaaggcgacttcttgtggtcggatggcgtccccctgctctatgagaactggaaccctgggcagcctgacagctacttcctgtctggagagaactgcgtggtcatggtgtggcatgatcagggacaatggagtgacgtgccctgcaactaccacctgtcctacacctgcaagatggggctggtgtcctgtgggccgccaccggagctgcccctggctcaagtgttcggccgcccacggctgcgctatgaggtggacactgtgcttcgctaccggtgccgggaaggactggcccagcgcaatctgccgctgatccgatgccaagagaacggtcgttgggaggccccccagatctcctgtgtgcccagaagacctgcccgagctctgcacccagaggaggacccagaaggacgtcaggggaggctactgggacgctggaaggcgctgttgatccccccttccagccccatgccaggtccctagggggcaaggccttgaacactgccggccacagcactgccctgtcacccaaattttccctcacaccctgcgctcccgccaccacaggaagtgacaacatgacgaggggtggtgctggagtccaggtgacagttcctgaaggggcttctgggaaatacctaggaggctccagcccagcccaggccctctccccctaccctgggcaccagatcttccatcagggccggagtaaatccctaagtgcctcaactgccctctccctggcagccatcttgtcccctctattcctctagggagcactgtgcccactctttctgggttttccaagggaatgggcttgcaggatggagtgtctgtaaaatcaacaggaaataaaactgtgtatgagccc

SEQ ID NO: 733173 - DNA, 3632 bp, Homo sapiens
  misc_feature (3337)..(3337): n is a, c, g, or t
accacgcgtcgccacgcgtcgccacgcgtgcccacgcgtcgccagcctctcctcacgctcgcgcagtctccgccgcagtctcagctgcagctgcaggactgagccgtgcacccggaggagacccccggaggaggcgacaaacttcgcagtgccgcgacccaaccccagccctgggtagcctgcagcatggcccagctgttcctgcccctgctggcagccctggtcctggcccaggctcctgcagctttagcagatgttctggaaggagacagctcagaggaccgcgcttttcgcgtgcgcatcgcgggcgacgcgccactgcagggcgtgctcggcggcgccctcaccatcccttgccacgtccactacctgcggccaccgccgagccgccgggctgtgctgggctctccgcgggtcaagtggactttcctgtcccggggccgggaggcagaggtgctggtggcgcggggagtgcgcgtcaaggtgaacgaggcctaccggttccgcgtggcactgcctgcgtacccagcgtcgctcaccgacgtctccctggcgctgagcgagctgcgccccaacgactcaggtatctatcgctgtgaggtccagcacggcatcgatgacagcagcgacgctgtggaggtcaaggtcaaaggggtcgtctttctctaccgagagggctctgcccgctatgctttctccttttctggggcccaggaggcctgtgcccgcattggagcccacatcgccaccccggagcagctctatgccgcctaccttgggggctatgagcaatgtgatgctggctggctgtcggatcagaccgtgaggtatcccatccagaccccacgagaggcctgttacggagacatggatggcttccccggggtccggaactatggtgtggtggacccggatgacctctatgatgtgtactgttatgctgaagacctaaatggagaactgttcctgggtgaccctccagagaagctgacattggaggaagcacgggcgtactgccaggagcggggtgcagagattgccaccacgggccaactgtatgcagcctgggatggtggcctggaccactgcagcccagggtggctagctgatggcagtgtgcgctaccccatcgtcacacccagccagcgctgtggtgggggcttgcctggtgtcaagactctcttcctcttccccaaccagactggcttccccaataagcacagccgcttcaacgtctactgcttccgagactcggcccagccttctgccatccctgaggcctccaacccagcctccaacccagcctctgatggactagaggctatcgtcacagtgacagagaccctggaggaactgcagctgcctcaggaagccacagagagtgaatcccgtggggccatctactccatccccatcatggaggacggaggaggtggaagctccactccagaagacccagcagaggcccctaggacgctcctagaatttgaaacacaatccatggtaccgcccacggggttctcagaagaggaaggtaaggcattggaggaagaagagaaatatgaagatgaagaagagaaagaggaggaagaagaagaggaggaggtggaggatgaggctctgtgggcatggcccagcgagctcagcagcccgggccctgaggcctctctccccactgagccagcagcccaggaggagtcactctcccaggcgccagcaagggcagtcctgcagcctggtgcatcaccacttcctgatggagagtcagaagcttccaggcctccaagggtccatggaccacctactgagactctgcccactcccagggagaggaacctagcatccccatcaccttccactctggttgaggcaagagaggtgggggaggcaactggtggtcctgagctatctggggtccctcgaggagagagcgaggagacaggaagctccgagggtgccccttccctgcttccagccacacgggcccctgagggtaccagggagctggaggccccctctgaagataattctggaagaactgccccagcagggacctcagtgcaggcccagccagtgctgcccactgacagcgccagccgaggtggagtggccgtggtccccgcatcaggtgactgtgtccccagcccctgccacaatggtgggacatgcttggaggaggaggaaggggtccgctgcctatgtctgcctggctatgggggggacctgtgcgatgttggcctccgcttctgcaaccccggctgggacgccttccagggcgcctgctacaagcacttttccacacgaaggagctgggaggaggcagagacccagtgccggatgtacggcgcgcatctggccagcatcagcacacccgaggaacaggacttcatcaacaaccggtaccgggagtaccagtggatcggactcaacgacaggaccatcgaaggcgacttcttgtggtcggatggcgtccccctgctctatgagaactggaaccctgggcagcctgacagctacttcctgtctggagagaactgcgtggtcatggtgtggcatgatcagggacaatggagtgacgtgccctgcaactaccacctgtcctacacctgcaagatggggctggtgtcctgtgggccgccaccggagctgcccctggctcaagtgttcggccgcccacggctgcgctatgaggtggacactgtgcttcgctaccggtgccgggaaggactggcccagcgcaatctgccgctgatccgatgccaagagaacggtcgttgggaggccccccagatctcctgtgtgcccagaagacctgcccgagctctgcacccagaggaggacccagaaggacgtcaggggaggctactgggacgctggaaggcgctgttgatccccccttccagccccatgccaggtccctagggggcaaggccttgaacactgccggccacagcactgccctgtcacccaaattttccctcacaccctgcgctcccgccaccacaggaagtgacaacatgacgaggggtggtgctggagtccaggtgacagttcctgaaggggcttctgggaaatacctaggaggctccagcccagcccaggccctctccccctaccctgggcaccagatcttccatcagggccggagtaaatccctaagtgcctcaactgccctctccctggcagccatcttgtcccctctattcctctagggagcactgtgcccactctttctgggttttccaagggaatgggcttgcaggatggagtgtctgtaaaatcaacaggaaataaaactgtgtatgagcccagaaagaaaaaaaagaaacaacaaaanaaaaccaaaaacaaaaaaagggggcgccccccaaaaaaacaccccccgggggaccccaaagtagcgacccccactttttttgcaaaggggggcccccacaagagggcagcacgattataaaagaccggcgccggccaccgaggcataaaacaccgcggtgtgtgggaacaacgcgtgccagtggaacatctgcgggaggaaccaccactgcgagggcgggaaaaatgggcacgacacacgcgaaaattagcccacgcgaacacaggggacttaacgcacacaggacagaggccgg

SEQ ID NO: 733174 - DNA, 2770 bp, Homo sapiens
accacgcgtcgccacgcgtcgccacgcgtgcccacgcgtcgccagcctctcctcacgctcgcgcagtctccgccgcagtctcagctgcagctgcaggactgagccgtgcacccggaggagacccccggaggaggcgacaaacttcgcagtgccgcgacccaaccccagccctgggtagcctgcagcatggcccagctgttcctgcccctgctggcagccctggtcctggcccaggctcctgcagctttagcagatgttctggaaggagacagctcagaggaccgcgcttttcgcgtgcgcatcgcgggcgacgcgccactgcagggcgtgctcggcggcgccctcaccatcccttgccacgtccactacctgcggccaccgccgagccgccgggctgtgctgggctctccgcgggtcaagtggactttcctgtcccggggccgggaggcagaggtgctggtggcgcggggagtgcgcgtcaaggtgaacgaggcctaccggttccgcgtggcactgcctgcgtacccagcgtcgctcaccgacgtctccctggcgctgagcgagctgcgccccaacgactcaggtatctatcgctgtgaggtccagcacggcatcgatgacagcagcgacgctgtggaggtcaaggtcaaaggggtcgtctttctctaccgagagggctctgcccgctatgctttctccttttctggggcccaggaggcctgtgcccgcattggagcccacatcgccaccccggagcagctctatgccgcctaccttgggggctatgagcaatgtgatgctggctggctgtcggatcagaccgtgaggtatcccatccagaccccacgagaggcctgttacggagacatggatggcttccccggggtccggaactatggtgtggtggacccggatgacctctatgatgtgtactgttatgctgaagacctaaatggagaactgttcctgggtgaccctccagagaagctgacattggaggaagcacgggcgtactgccaggagcggggtgcagagattgccaccacgggccaactgtatgcagcctgggatggtggcctggaccactgcagcccagggtggctagctgatggcagtgtgcgctaccccatcgtcacacccagccagcgctgtggtgggggcttgcctggtgtcaagactctcttcctcttccccaaccagactggcttccccaataagcacagccgcttcaacgtctactgcttccgagactcggcccagccttctgccatccctgaggcctccaacccagcctccaacccagcctctgatggactagaggctatcgtcacagtgacagagaccctggaggaactgcagctgcctcaggaagccacagagagtgaatcccgtggggccatctactccatccccatcatggaggacggaggaggtggaagctccactccagaagacccagcagaggcccctaggacgctcctagaatttgaaacacaatccatggtaccgcccacggggttctcagaagaggaaggtaaggcattggaggaagaagagaaatatgaagatgaagaagagaaagaggaggaagaagaagaggaggaggtggaggatgaggctctgtgggcatggcccagcgagctcagcagcccgggccctgaggcctctctccccactgagccagcagcccaggaggagtcactctcccaggcgccagcaagggcagtcctgcagcctggtgcatcaccacttcctgatggagagtcagaagcttccaggcctccaagggtccatggaccacctactgagactctgcccactcccagggagaggaacctagcatccccatcaccttccactctggttgaggcaagagaggtgggggaggcaactggtggtcctgagctatctggggtccctcgaggagagagcgaggagacaggaagctccgagggtgccccttccctgcttccagccacacgggcccctgagggtaccagggagctggaggccccctctgaagataattctggaagaactgccccagcagggacctcagtgcaggcccagccagtgctgcccactgacagcgccagccgaggtggagtggccgtggtccccgcatcaggtgactgtgtccccagcccctgccacaatggtgggacatgcttggaggaggaggaaggggtccgctgcctatgtctgcctggctatgggggggacctgtgcgatgttggcctccgcttctgcaaccccggctgggacgccttccagggcgcctgctacaagcacttttccacacgaaggagctgggaggaggcagagacccagtgccggatgtacggcgcgcatctggccagcatcagcacacccgaggaacaggacttcatcaacagtgggctgggagacagggcgggaggggcccccgccatatgctctcactctctctcactcgcctaaccgccttcctcattaacccatgcacttattccttggttttctcaagcgtgcattccctcactcattcgttcactccccttctcattctctctcccttcccaccctacgcttaggcagtggccttcgggaacggagagtggaggttcgcgcagtagagtgcgcctgtgtgggccgggccgccgtgcagggggccgcctccaatccctccaacctccctgctctccgacctccgtcggcctcctccaactccaactccaatcttgttgaaagttttgactctttttccaaaactccccttttctagcctggg

SEQ ID NO: 733175 - DNA, 2707 bp, Homo sapiens
accacgcgtcgccacgcgtcgccacgcgtgcccacgcgtcgccagcctctcctcacgctcgcgcagtctccgccgcagtctcagctgcagctgcaggactgagccgtgcacccggaggagacccccggaggaggcgacaaacttcgcagtgccgcgacccaaccccagccctgggtagcctgcagcatggcccagctgttcctgcccctgctggcagccctggtcctggcccaggctcctgcagctttagcagatgttctggaaggagacagctcagaggaccgcgcttttcgcgtgcgcatcgcgggcgacgcgccactgcagggcgtgctcggcggcgccctcaccatcccttgccacgtccactacctgcggccaccgccgagccgccgggctgtgctgggctctccgcgggtcaagtggactttcctgtcccggggccgggaggcagaggtgctggtggcgcggggagtgcgcgtcaaggtgaacgaggcctaccggttccgcgtggcactgcctgcgtacccagcgtcgctcaccgacgtctccctggcgctgagcgagctgcgccccaacgactcaggtatctatcgctgtgaggtccagcacggcatcgatgacagcagcgacgctgtggaggtcaaggtcaaaggggtcgtctttctctaccgagagggctctgcccgctatgctttctccttttctggggcccaggaggcctgtgcccgcattggagcccacatcgccaccccggagcagctctatgccgcctaccttgggggctatgagcaatgtgatgctggctggctgtcggatcagaccgtgaggtatcccatccagaccccacgagaggcctgttacggagacatggatggcttccccggggtccggaactatggtgtggtggacccggatgacctctatgatgtgtactgttatgctgaagacctaaatggagaactgttcctgggtgaccctccagagaagctgacattggaggaagcacgggcgtactgccaggagcggggtgcagagattgccaccacgggccaactgtatgcagcctgggatggtggcctggaccactgcagcccagggtggctagctgatggcagtgtgcgctaccccatcgtcacacccagccagcgctgtggtgggggcttgcctggtgtcaagactctcttcctcttccccaaccagactggcttccccaataagcacagccgcttcaacgtctactgcttccgagactcggcccagccttctgccatccctgaggcctccaacccagcctccaacccagcctctgatggactagaggctatcgtcacagtgacagagaccctggaggaactgcagctgcctcaggaagccacagagagtgaatcccgtggggccatctactccatccccatcatggaggacggaggaggtggaagctccactccagaagacccagcagaggcccctaggacgctcctagaatttgaaacacaatccatggtaccgcccacggggttctcagaagaggaaggtaaggcattggaggaagaagagaaatatgaagatgaagaagagaaagaggaggaagaagaagaggaggaggtggaggatgaggctctgtgggcatggcccagcgagctcagcagcccgggccctgaggcctctctccccactgagccagcagcccaggaggagtcactctcccaggcgccagcaagggcagtcctgcagcctggtgcatcaccacttcctgatggagagtcagaagcttccaggcctccaagggtccatggaccacctactgagactctgcccactcccagggagaggaacctagcatccccatcaccttccactctggttgaggcaagagaggtgggggaggcaactggtggtcctgagctatctggggtccctcgaggagagagcgaggagacaggaagctccgagggtgccccttccctgcttccagccacacgggcccctgagggtaccagggagctggaggccccctctgaagataattctggaagaactgccccagcagggacctcagtgcaggcccagccagtgctgcccactgacagcgccagccgaggtggagtggccgtggtccccgcatcaggtaattctgcccaaggctcaactgccctctctatcctactccttttcttccccctgcagctctgggtcacctgacctgtagtcctttaacccaccatcatcccaaactctcctgtcctttgccttcattctcttacccacctctacctatgggtctccaatctcggatatccaccttgtgggtatctcagctctccgcgtctttaccctgtgatcccagccccgccactgaccatctgtgacccttccctgccattgggccctccacctgtggctcacatctcgccagccccacagagcatcctcaggcctctccaagggtcctcatcacctattgcagccttcagggctcggcctattttccactactcccttcatccgcctgtgtgccgtcccctttagctgcctcctattgatctcagggaagcctgggagtcccttctcacccctcaacctccggagtccaggagaacccgtacccccacagagccttaagcaactacttctgtgaagtattttttgactgtttcatggaaaacaagccttggaaataaatctctattaaaccgctttgtaacca

SEQ ID NO: 733176 - DNA, 2773 bp, Homo sapiens
ttatatcgtgaccgacgccgtcgccacgcggtcggcctgcggccccagcctctcctcacgctcgcgcagtctccgccgcagtctcagctgcagctgcaggactgagccgtgcacccggaggagacccccggaggaggcgacaaacttcgcagtgccgcgacccaaccccagccctgggtagcctgcagcatggcccagctgttcctgcccctgctggcagccctggtcctggcccaggctcctgcagctttagcagatgttctggaaggagacagctcagaggaccgcgcttttcgcgtgcgcatcgcgggcgacgcgccactgcagggcgtgctcggcggcgccctcaccatcccttgccacgtccactacctgcggccaccgccgagccgccgggctgtgctgggctctccgcgggtcaagtggactttcctgtcccggggccgggaggcagaggtgctggtggcgcggggagtgcgcgtcaaggtgaacgaggcctaccggttccgcgtggcactgcctgcgtacccagcgtcgctcaccgacgtctccctggcgctgagcgagctgcgccccaacgactcaggtatctatcgctgtgaggtccagcacggcatcgatgacagcagcgacgctgtggaggtcaaggtcaaaggggtcgtctttctctaccgagagggctctgcccgctatgctttctccttttctggggcccaggaggcctgtgcccgcattggagcccacatcgccaccccggagcagctctatgccgcctaccttgggggctatgagcaatgtgatgctggctggctgtcggatcagaccgtgaggtatcccatccagaccccacgagaggcctgttacggagacatggatggcttccccggggtccggaactatggtgtggtggacccggatgacctctatgatgtgtactgttatgctgaagacctaaatggagaactgttcctgggtgaccctccagagaagctgacattggaggaagcacgggcgtactgccaggagcggggtgcagagattgccaccacgggccaactgtatgcagcctgggatggtggcctggaccactgcagcccagggtggctagctgatggcagtgtgcgctaccccatcgtcacacccagccagcgctgtggtgggggcttgcctggtgtcaagactctcttcctcttccccaaccagactggcttccccaataagcacagccgcttcaacgtctactgcttccgagactcggcccagccttctgccatccctgaggcctccaacccagcctccaacccagcctctgatggactagaggctatcgtcacagtgacagagaccctggaggaactgcagctgcctcaggaagccacagagagtgaatcccgtggggccatctactccatccccatcatggaggacggaggaggtggaagctccactccagaagacccagcagaggcccctaggacgctcctagaatttgaaacacaatccatggtaccgcccacggggttctcagaagaggaaggtaaggcattggaggaagaagagaaatatgaagatgaagaagagaaagaggaggaagaagaagaggaggaggtggaggatgaggctctgtgggcatggcccagcgagctcagcagcccgggccctgaggcctctctccccactgagccagcagcccaggaggagtcactctcccaggcgccagcaagggcagtcctgcagcctggtgcatcaccacttcctgatggagagtcagaagcttccaggcctccaagggtccatggaccacctactgagactctgcccactcccagggagaggaacctagcatccccatcaccttccactctggttgaggcaagagaggtgggggaggcaactggtggtcctgagctatctggggtccctcgaggagagagcgaggagacaggaagctccgagggtgccccttccctgcttccagccacacgggcccctgagggtaccagggagctggaggccccctctgaagataattctggaagaactgccccagcagggacctcagtgcaggcccagccagtgctgcccactgacagcgccagccgaggtggagtggccgtggtccccgcatcaggtgactgtgtccccagcccctgccacaatggtgggacatgcttggaggaggaggaaggggtccgctgcctatgtctgcctggctatgggggggacctgtgcgatgttggcctccgcttctgcaaccccggctgggacgccttccagggcgcctgctacaagcacttttccacacgaaggagctgggaggaggcagagacccagtgccggatgtacggcgcgcatctggccagcatcagcacacccgaggaacaggacttcatcaacagtgggctgggagacagggcgggaggggcccccgccatatgctctcactctctctcactcgcctaaccgccttcctcattaacccatgcacttattccttggttttctcaagcgtgcattccctcactcattcgttcactccccttctcattctctctcccttcccaccctacgcttaggcagtggccttcgggaacggagagtggaggttcgcgcagtagagtgcgcctgtgtgggccgggccgccgtgcagggggccgcctccaatccctccaacctccctgctctccgacctccgtcggcctcctccaactccaactccaatcttgttgaaagttttgactctttttccaaaactccccttttctagcctggg

SEQ ID NO: 733177 - DNA, 2710 bp, Homo sapiens
ttatatcgtgaccgacgccgtcgccacgcggtcggcctgcggccccagcctctcctcacgctcgcgcagtctccgccgcagtctcagctgcagctgcaggactgagccgtgcacccggaggagacccccggaggaggcgacaaacttcgcagtgccgcgacccaaccccagccctgggtagcctgcagcatggcccagctgttcctgcccctgctggcagccctggtcctggcccaggctcctgcagctttagcagatgttctggaaggagacagctcagaggaccgcgcttttcgcgtgcgcatcgcgggcgacgcgccactgcagggcgtgctcggcggcgccctcaccatcccttgccacgtccactacctgcggccaccgccgagccgccgggctgtgctgggctctccgcgggtcaagtggactttcctgtcccggggccgggaggcagaggtgctggtggcgcggggagtgcgcgtcaaggtgaacgaggcctaccggttccgcgtggcactgcctgcgtacccagcgtcgctcaccgacgtctccctggcgctgagcgagctgcgccccaacgactcaggtatctatcgctgtgaggtccagcacggcatcgatgacagcagcgacgctgtggaggtcaaggtcaaaggggtcgtctttctctaccgagagggctctgcccgctatgctttctccttttctggggcccaggaggcctgtgcccgcattggagcccacatcgccaccccggagcagctctatgccgcctaccttgggggctatgagcaatgtgatgctggctggctgtcggatcagaccgtgaggtatcccatccagaccccacgagaggcctgttacggagacatggatggcttccccggggtccggaactatggtgtggtggacccggatgacctctatgatgtgtactgttatgctgaagacctaaatggagaactgttcctgggtgaccctccagagaagctgacattggaggaagcacgggcgtactgccaggagcggggtgcagagattgccaccacgggccaactgtatgcagcctgggatggtggcctggaccactgcagcccagggtggctagctgatggcagtgtgcgctaccccatcgtcacacccagccagcgctgtggtgggggcttgcctggtgtcaagactctcttcctcttccccaaccagactggcttccccaataagcacagccgcttcaacgtctactgcttccgagactcggcccagccttctgccatccctgaggcctccaacccagcctccaacccagcctctgatggactagaggctatcgtcacagtgacagagaccctggaggaactgcagctgcctcaggaagccacagagagtgaatcccgtggggccatctactccatccccatcatggaggacggaggaggtggaagctccactccagaagacccagcagaggcccctaggacgctcctagaatttgaaacacaatccatggtaccgcccacggggttctcagaagaggaaggtaaggcattggaggaagaagagaaatatgaagatgaagaagagaaagaggaggaagaagaagaggaggaggtggaggatgaggctctgtgggcatggcccagcgagctcagcagcccgggccctgaggcctctctccccactgagccagcagcccaggaggagtcactctcccaggcgccagcaagggcagtcctgcagcctggtgcatcaccacttcctgatggagagtcagaagcttccaggcctccaagggtccatggaccacctactgagactctgcccactcccagggagaggaacctagcatccccatcaccttccactctggttgaggcaagagaggtgggggaggcaactggtggtcctgagctatctggggtccctcgaggagagagcgaggagacaggaagctccgagggtgccccttccctgcttccagccacacgggcccctgagggtaccagggagctggaggccccctctgaagataattctggaagaactgccccagcagggacctcagtgcaggcccagccagtgctgcccactgacagcgccagccgaggtggagtggccgtggtccccgcatcaggtaattctgcccaaggctcaactgccctctctatcctactccttttcttccccctgcagctctgggtcacctgacctgtagtcctttaacccaccatcatcccaaactctcctgtcctttgccttcattctcttacccacctctacctatgggtctccaatctcggatatccaccttgtgggtatctcagctctccgcgtctttaccctgtgatcccagccccgccactgaccatctgtgacccttccctgccattgggccctccacctgtggctcacatctcgccagccccacagagcatcctcaggcctctccaagggtcctcatcacctattgcagccttcagggctcggcctattttccactactcccttcatccgcctgtgtgccgtcccctttagctgcctcctattgatctcagggaagcctgggagtcccttctcacccctcaacctccggagtccaggagaacccgtacccccacagagccttaagcaactacttctgtgaagtattttttgactgtttcatggaaaacaagccttggaaataaatctctattaaaccgctttgtaacca

SEQ ID NO: 733178 - DNA, 880 bp, Homo sapiens
ctctagagatccccccccgactagcccgacagctacttcctgtctggagagaactgcgtggtcatggtgtggcatgatcagggacaatggagtgacgtgccctgcaactaccacctgtcctacacctgcaagatggggctggtgtcctgtgggccgccaccggagctgcccctggctcaagtgttcggccgcccacggctgcgctatgaggtggacactgtgcttcgctaccggtgccgggaaggactggcccagcgcaatctgccgctgatccgatgccaagagaacggtcgttgggaggccccccagatctcctgtgtgcccagaagacctgcccgagctctgcacccagaggaggacccagaaggacgtcaggggaggctactgggacgctggaaggcgctgttgatccccccttccagccccatgccaggtccctagggggcaaggccttgaacactgccggccacagcactgccctgtcacccaaattttccctcacaccctgcgctcccgccaccacaggaagtgacaacatgacgaggggtggtgctggagtccaggtgacagttcctgaaggggcttctgggaaatacctaggaggctccagcccagcccaggccctctccccctaccctgggcaccagatcttccatcagggccggagtaaatccctaagtgcctcaactgccctctccctggcagccatcttgtcccctctattcctctagggagcactgtgcccactctttctgggttttccaagggaatgggcttgcaggatggagtgtctgtaaaatcaacaggaaataaaactgtgtatgagccccaaaaaaaacacaaaacaaaaaaaaaaaaaaaaaaaaaaaacaaaaaaaaa

SEQ ID NO: 733179 - DNA, 829 bp, Homo sapiens
ctctagagatccccccccgactagcccgacagctacttcctgtctggagagaactgcgtggtcatggtgtggcatgatcagggacaatggagtgacgtgccctgcaactaccacctgtcctacacctgcaagatggggctggtgtcctgtgggccgccaccggagctgcccctggctcaagtgttcggccgcccacggctgcgctatgaggtggacactgtgcttcgctaccggtgccgggaaggactggcccagcgcaatctgccgctgatccgatgccaagagaacggtcgttgggaggccccccagatctcctgtgtgcccagaagacctgcccgagctctgcacccagaggaggacccagaaggacgtcaggggaggctactgggacgctggaaggcgctgttgatccccccttccagccccatgccaggtccctagggggcaaggccttgaacactgccggccacagcactgccctgtcacccaaattttccctcacaccctgcgctcccgccaccacaggaagtgacaacatgacgaggggtggtgctggagtccaggtgacagttcctgaaggggcttctgggaaatacctaggaggctccagcccagcccaggccctctccccctaccctgggcaccagatcttccatcagggccggagtaaatccctaagtgcctcaactgccctctccctggcagccatcttgtcccctctattcctctagggagcactgtgcccactctttctgggttttccaagggaatgggcttgcaggatggagtgtctgtaaaatcaacaggaaataaaactgtgtatgagccc

SEQ ID NO: 733180 - DNA, 1151 bp, Homo sapiens
  misc_feature (856)..(856): n is a, c, g, or t
ctctagagatccccccccgactagcccgacagctacttcctgtctggagagaactgcgtggtcatggtgtggcatgatcagggacaatggagtgacgtgccctgcaactaccacctgtcctacacctgcaagatggggctggtgtcctgtgggccgccaccggagctgcccctggctcaagtgttcggccgcccacggctgcgctatgaggtggacactgtgcttcgctaccggtgccgggaaggactggcccagcgcaatctgccgctgatccgatgccaagagaacggtcgttgggaggccccccagatctcctgtgtgcccagaagacctgcccgagctctgcacccagaggaggacccagaaggacgtcaggggaggctactgggacgctggaaggcgctgttgatccccccttccagccccatgccaggtccctagggggcaaggccttgaacactgccggccacagcactgccctgtcacccaaattttccctcacaccctgcgctcccgccaccacaggaagtgacaacatgacgaggggtggtgctggagtccaggtgacagttcctgaaggggcttctgggaaatacctaggaggctccagcccagcccaggccctctccccctaccctgggcaccagatcttccatcagggccggagtaaatccctaagtgcctcaactgccctctccctggcagccatcttgtcccctctattcctctagggagcactgtgcccactctttctgggttttccaagggaatgggcttgcaggatggagtgtctgtaaaatcaacaggaaataaaactgtgtatgagcccagaaagaaaaaaaagaaacaacaaaanaaaaccaaaaacaaaaaaagggggcgccccccaaaaaaacaccccccgggggaccccaaagtagcgacccccactttttttgcaaaggggggcccccacaagagggcagcacgattataaaagaccggcgccggccaccgaggcataaaacaccgcggtgtgtgggaacaacgcgtgccagtggaacatctgcgggaggaaccaccactgcgagggcgggaaaaatgggcacgacacacgcgaaaattagcccacgcgaacacaggggacttaacgcacacaggacagaggccgg

SEQ ID NO: 733181 - DNA, 4651 bp, Homo sapiens
cctacttcgctcgtccttgctctcgccgctgctgccggagccgaagcagagaaggcagcgggtcccgtgaccgtcccgagagccccgcgctcccgaccagggggcgggggcggccccggggagggcggggcaggggcggggggaagaaagggggttttgtgctgcgccgggagggccggcgccctcttccgaatgtcctgcggccccagcctctcctcacgctcgcgcagtctccgccgcagtctcagctgcagctgcaggactgagccgtgcacccggaggagacccccggaggaggcgacaaacttcgcagtgccgcgacccaaccccagccctgggtagcctgcagcatggcccagctgttcctgcccctgctggcagccctggtcctggcccaggctcctgcagctttagcagatgttctggaaggagacagctcagaggaccgcgcttttcgcgtgcgcatcgcgggcgacgcgccactgcagggcgtgctcggcggcgccctcaccatcccttgccacgtccactacctgcggccaccgccgagccgccgggctgtgctgggctctccgcgggtcaagtggactttcctgtcccggggccgggaggcagaggtgctggtggcgcggggagtgcgcgtcaaggtgaacgaggcctaccggttccgcgtggcactgcctgcgtacccagcgtcgctcaccgacgtctccctggcgctgagcgagctgcgccccaacgactcaggtatctatcgctgtgaggtccagcacggcatcgatgacagcagcgacgctgtggaggtcaaggtcaaaggggtcgtctttctctaccgagagggctctgcccgctatgctttctccttttctggggcccaggaggcctgtgcccgcattggagcccacatcgccaccccggagcagctctatgccgcctaccttgggggctatgagcaatgtgatgctggctggctgtcggatcagaccgtgaggtatcccatccagaccccacgagaggcctgttacggagacatggatggcttccccggggtccggaactatggtgtggtggacccggatgacctctatgatgtgtactgttatgctgaagacctaaatggagaactgttcctgggtgaccctccagagaagctgacattggaggaagcacgggcgtactgccaggagcggggtgcagagattgccaccacgggccaactgtatgcagcctgggatggtggcctggaccactgcagcccagggtggctagctgatggcagtgtgcgctaccccatcgtcacacccagccagcgctgtggtgggggcttgcctggtgtcaagactctcttcctcttccccaaccagactggcttccccaataagcacagccgcttcaacgtctactgcttccgagactcggcccagccttctgccatccctgaggcctccaacccagcctccaacccagcctctgatggactagaggctatcgtcacagtgacagagaccctggaggaactgcagctgcctcaggaagccacagagagtgaatcccgtggggccatctactccatccccatcatggaggacggaggaggtggaagctccactccagaagacccagcagaggcccctaggacgctcctagaatttgaaacacaatccatggtaccgcccacggggttctcagaagaggaaggtaaggcattggaggaagaagagaaatatgaagatgaagaagagaaagaggaggaagaagaagaggaggaggtggaggatgaggctctgtgggcatggcccagcgagctcagcagcccgggccctgaggcctctctccccactgagccagcagcccaggaggagtcactctcccaggcgccagcaagggcagtcctgcagcctggtgcatcaccacttcctgatggagagtcagaagcttccaggcctccaagggtccatggaccacctactgagactctgcccactcccagggagaggaacctagcatccccatcaccttccactctggttgaggcaagagaggtgggggaggcaactggtggtcctgagctatctggggtccctcgaggagagagcgaggagacaggaagctccgagggtgccccttccctgcttccagccacacgggcccctgagggtaccagggagctggaggccccctctgaagataattctggaagaactgccccagcagggacctcagtgcaggcccagccagtgctgcccactgacagcgccagccgaggtggagtggccgtggtccccgcatcaggtgactgtgtccccagcccctgccacaatggtgggacatgcttggaggaggaggaaggggtccgctgcctatgtctgcctggctatgggggggacctgtgcgatgttggtgagtgttgagggacggggggcaggtttgaagcctggaccctgccacaacgtgctacttctggaggggggagggagaacattggttttggccttgtcattaatgagtccctgttttaggcaagttgcataacttctttgagtcctaccctcaattttcttatctaagtgaaaccacaatgcctctcatagggggtccatttgagaccagtgcaaagcatactcctggcatttaatcggtggtcaatacatgacaggctccattctcctggagaggagagccactgctcgttaggatggagacccaggccggaactccatccctcaccctggttcctgtctcttagaaaaggcaccagcgcccctgcccaagagcccctccaggctcctgctaccccctcattctctactagctcttttgcaccgccctcctgtcccccttagtcccgcccctctcggcctgcggtagtggaaggagaccagccccttccaggggacctggccctctgggttttggggccctaagatgcccgcccttatgtgccgcaggcctccgcttctgcaaccccggctgggacgccttccagggcgcctgctacaagcacttttccacacgaaggagctgggaggaggcagagacccagtgccggatgtacggcgcgcatctggccagcatcagcacacccgaggaacaggacttcatcaacagtgggctgggagacagggcgggaggggcccccgccatatgctctcactctctctcactcgcctaaccgccttcctcattaacccatgcacttattccttggttttctcaagcgtgcattccctcactcattcgttcactccccttctcattctctctcccttcccaccctacgcttaggcagtggccttcgggaacggagagtggaggttcgcgcagtagagtgcgcctgtgtgggccgggccgccgtgcagggggccgcctccaatccctccaacctccctgctctccgacctccgtcggcctcctccaactccaactccaatcttgttgaaagttttgactctttttccaaaactccccttttctagcctgggttgatatcttccttattctcccacccccattcccctgctttccatctggcccttgagcagaggctggggtagaagaacccgacaagggcgggtgctggatcgcggggaagggtttccaaggcagtcaccgcagaccgcccgggagcggggaacggccgccatctgctggcggctgcgctcactgcacgccttcgtctccctagaccggtaccgggagtaccagtggatcggactcaacgacaggaccatcgaaggcgacttcttgtggtcggatggcgtccccctgctctatgagaactggaaccctgggcagcctgacagctacttcctgtctggagagaactgcgtggtcatggtgtggcatgatcagggacaatggagtgacgtgccctgcaactaccacctgtcctacacctgcaagatggggctggtgtcctgtgggccgccaccggagctgcccctggctcaagtgttcggccgcccacggctgcgctatgaggtggacactgtgcttcgctaccggtgccgggaaggactggcccagcgcaatctgccgctgatccgatgccaagagaacggtcgttgggaggccccccagatctcctgtgtgcccagaagacctgcccgagctctgcacccagaggaggacccagaaggacgtcaggggaggctactgggacgctggaaggcgctgttgatccccccttccagccccatgccaggtccctagggggcaaggccttgaacactgccggccacagcactgccctgtcacccaaattttccctcacaccctgcgctcccgccaccacaggaagtgacaacatgacgaggggtggtgctggagtccaggtgacagttcctgaaggggcttctgggaaatacctaggaggctccagcccagcccaggccctctccccctaccctgggcaccagatcttccatcagggccggagtaaatccctaagtgcctcaactgccctctccctggcagccatcttgtcccctctattcctctagggagcactgtgcccactctttctgggttttccaagggaatgggcttgcaggatggagtgtctgtaaaatcaacaggaaataaaactgtgtatgagccccaaaaaaaacacaaaacaaaaaaaaaaaaaaaaaaaaaaaacaaaaaaaaa

SEQ ID NO: 733182 - DNA, 4600 bp, Homo sapiens
cctacttcgctcgtccttgctctcgccgctgctgccggagccgaagcagagaaggcagcgggtcccgtgaccgtcccgagagccccgcgctcccgaccagggggcgggggcggccccggggagggcggggcaggggcggggggaagaaagggggttttgtgctgcgccgggagggccggcgccctcttccgaatgtcctgcggccccagcctctcctcacgctcgcgcagtctccgccgcagtctcagctgcagctgcaggactgagccgtgcacccggaggagacccccggaggaggcgacaaacttcgcagtgccgcgacccaaccccagccctgggtagcctgcagcatggcccagctgttcctgcccctgctggcagccctggtcctggcccaggctcctgcagctttagcagatgttctggaaggagacagctcagaggaccgcgcttttcgcgtgcgcatcgcgggcgacgcgccactgcagggcgtgctcggcggcgccctcaccatcccttgccacgtccactacctgcggccaccgccgagccgccgggctgtgctgggctctccgcgggtcaagtggactttcctgtcccggggccgggaggcagaggtgctggtggcgcggggagtgcgcgtcaaggtgaacgaggcctaccggttccgcgtggcactgcctgcgtacccagcgtcgctcaccgacgtctccctggcgctgagcgagctgcgccccaacgactcaggtatctatcgctgtgaggtccagcacggcatcgatgacagcagcgacgctgtggaggtcaaggtcaaaggggtcgtctttctctaccgagagggctctgcccgctatgctttctccttttctggggcccaggaggcctgtgcccgcattggagcccacatcgccaccccggagcagctctatgccgcctaccttgggggctatgagcaatgtgatgctggctggctgtcggatcagaccgtgaggtatcccatccagaccccacgagaggcctgttacggagacatggatggcttccccggggtccggaactatggtgtggtggacccggatgacctctatgatgtgtactgttatgctgaagacctaaatggagaactgttcctgggtgaccctccagagaagctgacattggaggaagcacgggcgtactgccaggagcggggtgcagagattgccaccacgggccaactgtatgcagcctgggatggtggcctggaccactgcagcccagggtggctagctgatggcagtgtgcgctaccccatcgtcacacccagccagcgctgtggtgggggcttgcctggtgtcaagactctcttcctcttccccaaccagactggcttccccaataagcacagccgcttcaacgtctactgcttccgagactcggcccagccttctgccatccctgaggcctccaacccagcctccaacccagcctctgatggactagaggctatcgtcacagtgacagagaccctggaggaactgcagctgcctcaggaagccacagagagtgaatcccgtggggccatctactccatccccatcatggaggacggaggaggtggaagctccactccagaagacccagcagaggcccctaggacgctcctagaatttgaaacacaatccatggtaccgcccacggggttctcagaagaggaaggtaaggcattggaggaagaagagaaatatgaagatgaagaagagaaagaggaggaagaagaagaggaggaggtggaggatgaggctctgtgggcatggcccagcgagctcagcagcccgggccctgaggcctctctccccactgagccagcagcccaggaggagtcactctcccaggcgccagcaagggcagtcctgcagcctggtgcatcaccacttcctgatggagagtcagaagcttccaggcctccaagggtccatggaccacctactgagactctgcccactcccagggagaggaacctagcatccccatcaccttccactctggttgaggcaagagaggtgggggaggcaactggtggtcctgagctatctggggtccctcgaggagagagcgaggagacaggaagctccgagggtgccccttccctgcttccagccacacgggcccctgagggtaccagggagctggaggccccctctgaagataattctggaagaactgccccagcagggacctcagtgcaggcccagccagtgctgcccactgacagcgccagccgaggtggagtggccgtggtccccgcatcaggtgactgtgtccccagcccctgccacaatggtgggacatgcttggaggaggaggaaggggtccgctgcctatgtctgcctggctatgggggggacctgtgcgatgttggtgagtgttgagggacggggggcaggtttgaagcctggaccctgccacaacgtgctacttctggaggggggagggagaacattggttttggccttgtcattaatgagtccctgttttaggcaagttgcataacttctttgagtcctaccctcaattttcttatctaagtgaaaccacaatgcctctcatagggggtccatttgagaccagtgcaaagcatactcctggcatttaatcggtggtcaatacatgacaggctccattctcctggagaggagagccactgctcgttaggatggagacccaggccggaactccatccctcaccctggttcctgtctcttagaaaaggcaccagcgcccctgcccaagagcccctccaggctcctgctaccccctcattctctactagctcttttgcaccgccctcctgtcccccttagtcccgcccctctcggcctgcggtagtggaaggagaccagccccttccaggggacctggccctctgggttttggggccctaagatgcccgcccttatgtgccgcaggcctccgcttctgcaaccccggctgggacgccttccagggcgcctgctacaagcacttttccacacgaaggagctgggaggaggcagagacccagtgccggatgtacggcgcgcatctggccagcatcagcacacccgaggaacaggacttcatcaacagtgggctgggagacagggcgggaggggcccccgccatatgctctcactctctctcactcgcctaaccgccttcctcattaacccatgcacttattccttggttttctcaagcgtgcattccctcactcattcgttcactccccttctcattctctctcccttcccaccctacgcttaggcagtggccttcgggaacggagagtggaggttcgcgcagtagagtgcgcctgtgtgggccgggccgccgtgcagggggccgcctccaatccctccaacctccctgctctccgacctccgtcggcctcctccaactccaactccaatcttgttgaaagttttgactctttttccaaaactccccttttctagcctgggttgatatcttccttattctcccacccccattcccctgctttccatctggcccttgagcagaggctggggtagaagaacccgacaagggcgggtgctggatcgcggggaagggtttccaaggcagtcaccgcagaccgcccgggagcggggaacggccgccatctgctggcggctgcgctcactgcacgccttcgtctccctagaccggtaccgggagtaccagtggatcggactcaacgacaggaccatcgaaggcgacttcttgtggtcggatggcgtccccctgctctatgagaactggaaccctgggcagcctgacagctacttcctgtctggagagaactgcgtggtcatggtgtggcatgatcagggacaatggagtgacgtgccctgcaactaccacctgtcctacacctgcaagatggggctggtgtcctgtgggccgccaccggagctgcccctggctcaagtgttcggccgcccacggctgcgctatgaggtggacactgtgcttcgctaccggtgccgggaaggactggcccagcgcaatctgccgctgatccgatgccaagagaacggtcgttgggaggccccccagatctcctgtgtgcccagaagacctgcccgagctctgcacccagaggaggacccagaaggacgtcaggggaggctactgggacgctggaaggcgctgttgatccccccttccagccccatgccaggtccctagggggcaaggccttgaacactgccggccacagcactgccctgtcacccaaattttccctcacaccctgcgctcccgccaccacaggaagtgacaacatgacgaggggtggtgctggagtccaggtgacagttcctgaaggggcttctgggaaatacctaggaggctccagcccagcccaggccctctccccctaccctgggcaccagatcttccatcagggccggagtaaatccctaagtgcctcaactgccctctccctggcagccatcttgtcccctctattcctctagggagcactgtgcccactctttctgggttttccaagggaatgggcttgcaggatggagtgtctgtaaaatcaacaggaaataaaactgtgtatgagccc

SEQ ID NO: 733183 - DNA, 4922 bp, Homo sapiens
  misc_feature (4627)..(4627): n is a, c, g, or t
cctacttcgctcgtccttgctctcgccgctgctgccggagccgaagcagagaaggcagcgggtcccgtgaccgtcccgagagccccgcgctcccgaccagggggcgggggcggccccggggagggcggggcaggggcggggggaagaaagggggttttgtgctgcgccgggagggccggcgccctcttccgaatgtcctgcggccccagcctctcctcacgctcgcgcagtctccgccgcagtctcagctgcagctgcaggactgagccgtgcacccggaggagacccccggaggaggcgacaaacttcgcagtgccgcgacccaaccccagccctgggtagcctgcagcatggcccagctgttcctgcccctgctggcagccctggtcctggcccaggctcctgcagctttagcagatgttctggaaggagacagctcagaggaccgcgcttttcgcgtgcgcatcgcgggcgacgcgccactgcagggcgtgctcggcggcgccctcaccatcccttgccacgtccactacctgcggccaccgccgagccgccgggctgtgctgggctctccgcgggtcaagtggactttcctgtcccggggccgggaggcagaggtgctggtggcgcggggagtgcgcgtcaaggtgaacgaggcctaccggttccgcgtggcactgcctgcgtacccagcgtcgctcaccgacgtctccctggcgctgagcgagctgcgccccaacgactcaggtatctatcgctgtgaggtccagcacggcatcgatgacagcagcgacgctgtggaggtcaaggtcaaaggggtcgtctttctctaccgagagggctctgcccgctatgctttctccttttctggggcccaggaggcctgtgcccgcattggagcccacatcgccaccccggagcagctctatgccgcctaccttgggggctatgagcaatgtgatgctggctggctgtcggatcagaccgtgaggtatcccatccagaccccacgagaggcctgttacggagacatggatggcttccccggggtccggaactatggtgtggtggacccggatgacctctatgatgtgtactgttatgctgaagacctaaatggagaactgttcctgggtgaccctccagagaagctgacattggaggaagcacgggcgtactgccaggagcggggtgcagagattgccaccacgggccaactgtatgcagcctgggatggtggcctggaccactgcagcccagggtggctagctgatggcagtgtgcgctaccccatcgtcacacccagccagcgctgtggtgggggcttgcctggtgtcaagactctcttcctcttccccaaccagactggcttccccaataagcacagccgcttcaacgtctactgcttccgagactcggcccagccttctgccatccctgaggcctccaacccagcctccaacccagcctctgatggactagaggctatcgtcacagtgacagagaccctggaggaactgcagctgcctcaggaagccacagagagtgaatcccgtggggccatctactccatccccatcatggaggacggaggaggtggaagctccactccagaagacccagcagaggcccctaggacgctcctagaatttgaaacacaatccatggtaccgcccacggggttctcagaagaggaaggtaaggcattggaggaagaagagaaatatgaagatgaagaagagaaagaggaggaagaagaagaggaggaggtggaggatgaggctctgtgggcatggcccagcgagctcagcagcccgggccctgaggcctctctccccactgagccagcagcccaggaggagtcactctcccaggcgccagcaagggcagtcctgcagcctggtgcatcaccacttcctgatggagagtcagaagcttccaggcctccaagggtccatggaccacctactgagactctgcccactcccagggagaggaacctagcatccccatcaccttccactctggttgaggcaagagaggtgggggaggcaactggtggtcctgagctatctggggtccctcgaggagagagcgaggagacaggaagctccgagggtgccccttccctgcttccagccacacgggcccctgagggtaccagggagctggaggccccctctgaagataattctggaagaactgccccagcagggacctcagtgcaggcccagccagtgctgcccactgacagcgccagccgaggtggagtggccgtggtccccgcatcaggtgactgtgtccccagcccctgccacaatggtgggacatgcttggaggaggaggaaggggtccgctgcctatgtctgcctggctatgggggggacctgtgcgatgttggtgagtgttgagggacggggggcaggtttgaagcctggaccctgccacaacgtgctacttctggaggggggagggagaacattggttttggccttgtcattaatgagtccctgttttaggcaagttgcataacttctttgagtcctaccctcaattttcttatctaagtgaaaccacaatgcctctcatagggggtccatttgagaccagtgcaaagcatactcctggcatttaatcggtggtcaatacatgacaggctccattctcctggagaggagagccactgctcgttaggatggagacccaggccggaactccatccctcaccctggttcctgtctcttagaaaaggcaccagcgcccctgcccaagagcccctccaggctcctgctaccccctcattctctactagctcttttgcaccgccctcctgtcccccttagtcccgcccctctcggcctgcggtagtggaaggagaccagccccttccaggggacctggccctctgggttttggggccctaagatgcccgcccttatgtgccgcaggcctccgcttctgcaaccccggctgggacgccttccagggcgcctgctacaagcacttttccacacgaaggagctgggaggaggcagagacccagtgccggatgtacggcgcgcatctggccagcatcagcacacccgaggaacaggacttcatcaacagtgggctgggagacagggcgggaggggcccccgccatatgctctcactctctctcactcgcctaaccgccttcctcattaacccatgcacttattccttggttttctcaagcgtgcattccctcactcattcgttcactccccttctcattctctctcccttcccaccctacgcttaggcagtggccttcgggaacggagagtggaggttcgcgcagtagagtgcgcctgtgtgggccgggccgccgtgcagggggccgcctccaatccctccaacctccctgctctccgacctccgtcggcctcctccaactccaactccaatcttgttgaaagttttgactctttttccaaaactccccttttctagcctgggttgatatcttccttattctcccacccccattcccctgctttccatctggcccttgagcagaggctggggtagaagaacccgacaagggcgggtgctggatcgcggggaagggtttccaaggcagtcaccgcagaccgcccgggagcggggaacggccgccatctgctggcggctgcgctcactgcacgccttcgtctccctagaccggtaccgggagtaccagtggatcggactcaacgacaggaccatcgaaggcgacttcttgtggtcggatggcgtccccctgctctatgagaactggaaccctgggcagcctgacagctacttcctgtctggagagaactgcgtggtcatggtgtggcatgatcagggacaatggagtgacgtgccctgcaactaccacctgtcctacacctgcaagatggggctggtgtcctgtgggccgccaccggagctgcccctggctcaagtgttcggccgcccacggctgcgctatgaggtggacactgtgcttcgctaccggtgccgggaaggactggcccagcgcaatctgccgctgatccgatgccaagagaacggtcgttgggaggccccccagatctcctgtgtgcccagaagacctgcccgagctctgcacccagaggaggacccagaaggacgtcaggggaggctactgggacgctggaaggcgctgttgatccccccttccagccccatgccaggtccctagggggcaaggccttgaacactgccggccacagcactgccctgtcacccaaattttccctcacaccctgcgctcccgccaccacaggaagtgacaacatgacgaggggtggtgctggagtccaggtgacagttcctgaaggggcttctgggaaatacctaggaggctccagcccagcccaggccctctccccctaccctgggcaccagatcttccatcagggccggagtaaatccctaagtgcctcaactgccctctccctggcagccatcttgtcccctctattcctctagggagcactgtgcccactctttctgggttttccaagggaatgggcttgcaggatggagtgtctgtaaaatcaacaggaaataaaactgtgtatgagcccagaaagaaaaaaaagaaacaacaaaanaaaaccaaaaacaaaaaaagggggcgccccccaaaaaaacaccccccgggggaccccaaagtagcgacccccactttttttgcaaaggggggcccccacaagagggcagcacgattataaaagaccggcgccggccaccgaggcataaaacaccgcggtgtgtgggaacaacgcgtgccagtggaacatctgcgggaggaaccaccactgcgagggcgggaaaaatgggcacgacacacgcgaaaattagcccacgcgaacacaggggacttaacgcacacaggacagaggccgg

SEQ ID NO: 733184 - DNA, 4487 bp, Homo sapiens
accacgcgtcgccacgcgtcgccacgcgtgcccacgcgtcgccagcctctcctcacgctcgcgcagtctccgccgcagtctcagctgcagctgcaggactgagccgtgcacccggaggagacccccggaggaggcgacaaacttcgcagtgccgcgacccaaccccagccctgggtagcctgcagcatggcccagctgttcctgcccctgctggcagccctggtcctggcccaggctcctgcagctttagcagatgttctggaaggagacagctcagaggaccgcgcttttcgcgtgcgcatcgcgggcgacgcgccactgcagggcgtgctcggcggcgccctcaccatcccttgccacgtccactacctgcggccaccgccgagccgccgggctgtgctgggctctccgcgggtcaagtggactttcctgtcccggggccgggaggcagaggtgctggtggcgcggggagtgcgcgtcaaggtgaacgaggcctaccggttccgcgtggcactgcctgcgtacccagcgtcgctcaccgacgtctccctggcgctgagcgagctgcgccccaacgactcaggtatctatcgctgtgaggtccagcacggcatcgatgacagcagcgacgctgtggaggtcaaggtcaaaggggtcgtctttctctaccgagagggctctgcccgctatgctttctccttttctggggcccaggaggcctgtgcccgcattggagcccacatcgccaccccggagcagctctatgccgcctaccttgggggctatgagcaatgtgatgctggctggctgtcggatcagaccgtgaggtatcccatccagaccccacgagaggcctgttacggagacatggatggcttccccggggtccggaactatggtgtggtggacccggatgacctctatgatgtgtactgttatgctgaagacctaaatggagaactgttcctgggtgaccctccagagaagctgacattggaggaagcacgggcgtactgccaggagcggggtgcagagattgccaccacgggccaactgtatgcagcctgggatggtggcctggaccactgcagcccagggtggctagctgatggcagtgtgcgctaccccatcgtcacacccagccagcgctgtggtgggggcttgcctggtgtcaagactctcttcctcttccccaaccagactggcttccccaataagcacagccgcttcaacgtctactgcttccgagactcggcccagccttctgccatccctgaggcctccaacccagcctccaacccagcctctgatggactagaggctatcgtcacagtgacagagaccctggaggaactgcagctgcctcaggaagccacagagagtgaatcccgtggggccatctactccatccccatcatggaggacggaggaggtggaagctccactccagaagacccagcagaggcccctaggacgctcctagaatttgaaacacaatccatggtaccgcccacggggttctcagaagaggaaggtaaggcattggaggaagaagagaaatatgaagatgaagaagagaaagaggaggaagaagaagaggaggaggtggaggatgaggctctgtgggcatggcccagcgagctcagcagcccgggccctgaggcctctctccccactgagccagcagcccaggaggagtcactctcccaggcgccagcaagggcagtcctgcagcctggtgcatcaccacttcctgatggagagtcagaagcttccaggcctccaagggtccatggaccacctactgagactctgcccactcccagggagaggaacctagcatccccatcaccttccactctggttgaggcaagagaggtgggggaggcaactggtggtcctgagctatctggggtccctcgaggagagagcgaggagacaggaagctccgagggtgccccttccctgcttccagccacacgggcccctgagggtaccagggagctggaggccccctctgaagataattctggaagaactgccccagcagggacctcagtgcaggcccagccagtgctgcccactgacagcgccagccgaggtggagtggccgtggtccccgcatcaggtgactgtgtccccagcccctgccacaatggtgggacatgcttggaggaggaggaaggggtccgctgcctatgtctgcctggctatgggggggacctgtgcgatgttggtgagtgttgagggacggggggcaggtttgaagcctggaccctgccacaacgtgctacttctggaggggggagggagaacattggttttggccttgtcattaatgagtccctgttttaggcaagttgcataacttctttgagtcctaccctcaattttcttatctaagtgaaaccacaatgcctctcatagggggtccatttgagaccagtgcaaagcatactcctggcatttaatcggtggtcaatacatgacaggctccattctcctggagaggagagccactgctcgttaggatggagacccaggccggaactccatccctcaccctggttcctgtctcttagaaaaggcaccagcgcccctgcccaagagcccctccaggctcctgctaccccctcattctctactagctcttttgcaccgccctcctgtcccccttagtcccgcccctctcggcctgcggtagtggaaggagaccagccccttccaggggacctggccctctgggttttggggccctaagatgcccgcccttatgtgccgcaggcctccgcttctgcaaccccggctgggacgccttccagggcgcctgctacaagcacttttccacacgaaggagctgggaggaggcagagacccagtgccggatgtacggcgcgcatctggccagcatcagcacacccgaggaacaggacttcatcaacagtgggctgggagacagggcgggaggggcccccgccatatgctctcactctctctcactcgcctaaccgccttcctcattaacccatgcacttattccttggttttctcaagcgtgcattccctcactcattcgttcactccccttctcattctctctcccttcccaccctacgcttaggcagtggccttcgggaacggagagtggaggttcgcgcagtagagtgcgcctgtgtgggccgggccgccgtgcagggggccgcctccaatccctccaacctccctgctctccgacctccgtcggcctcctccaactccaactccaatcttgttgaaagttttgactctttttccaaaactccccttttctagcctgggttgatatcttccttattctcccacccccattcccctgctttccatctggcccttgagcagaggctggggtagaagaacccgacaagggcgggtgctggatcgcggggaagggtttccaaggcagtcaccgcagaccgcccgggagcggggaacggccgccatctgctggcggctgcgctcactgcacgccttcgtctccctagaccggtaccgggagtaccagtggatcggactcaacgacaggaccatcgaaggcgacttcttgtggtcggatggcgtccccctgctctatgagaactggaaccctgggcagcctgacagctacttcctgtctggagagaactgcgtggtcatggtgtggcatgatcagggacaatggagtgacgtgccctgcaactaccacctgtcctacacctgcaagatggggctggtgtcctgtgggccgccaccggagctgcccctggctcaagtgttcggccgcccacggctgcgctatgaggtggacactgtgcttcgctaccggtgccgggaaggactggcccagcgcaatctgccgctgatccgatgccaagagaacggtcgttgggaggccccccagatctcctgtgtgcccagaagacctgcccgagctctgcacccagaggaggacccagaaggacgtcaggggaggctactgggacgctggaaggcgctgttgatccccccttccagccccatgccaggtccctagggggcaaggccttgaacactgccggccacagcactgccctgtcacccaaattttccctcacaccctgcgctcccgccaccacaggaagtgacaacatgacgaggggtggtgctggagtccaggtgacagttcctgaaggggcttctgggaaatacctaggaggctccagcccagcccaggccctctccccctaccctgggcaccagatcttccatcagggccggagtaaatccctaagtgcctcaactgccctctccctggcagccatcttgtcccctctattcctctagggagcactgtgcccactctttctgggttttccaagggaatgggcttgcaggatggagtgtctgtaaaatcaacaggaaataaaactgtgtatgagccccaaaaaaaacacaaaacaaaaaaaaaaaaaaaaaaaaaaaacaaaaaaaaa

SEQ ID NO: 733185 - DNA, 4436 bp, Homo sapiens
accacgcgtcgccacgcgtcgccacgcgtgcccacgcgtcgccagcctctcctcacgctcgcgcagtctccgccgcagtctcagctgcagctgcaggactgagccgtgcacccggaggagacccccggaggaggcgacaaacttcgcagtgccgcgacccaaccccagccctgggtagcctgcagcatggcccagctgttcctgcccctgctggcagccctggtcctggcccaggctcctgcagctttagcagatgttctggaaggagacagctcagaggaccgcgcttttcgcgtgcgcatcgcgggcgacgcgccactgcagggcgtgctcggcggcgccctcaccatcccttgccacgtccactacctgcggccaccgccgagccgccgggctgtgctgggctctccgcgggtcaagtggactttcctgtcccggggccgggaggcagaggtgctggtggcgcggggagtgcgcgtcaaggtgaacgaggcctaccggttccgcgtggcactgcctgcgtacccagcgtcgctcaccgacgtctccctggcgctgagcgagctgcgccccaacgactcaggtatctatcgctgtgaggtccagcacggcatcgatgacagcagcgacgctgtggaggtcaaggtcaaaggggtcgtctttctctaccgagagggctctgcccgctatgctttctccttttctggggcccaggaggcctgtgcccgcattggagcccacatcgccaccccggagcagctctatgccgcctaccttgggggctatgagcaatgtgatgctggctggctgtcggatcagaccgtgaggtatcccatccagaccccacgagaggcctgttacggagacatggatggcttccccggggtccggaactatggtgtggtggacccggatgacctctatgatgtgtactgttatgctgaagacctaaatggagaactgttcctgggtgaccctccagagaagctgacattggaggaagcacgggcgtactgccaggagcggggtgcagagattgccaccacgggccaactgtatgcagcctgggatggtggcctggaccactgcagcccagggtggctagctgatggcagtgtgcgctaccccatcgtcacacccagccagcgctgtggtgggggcttgcctggtgtcaagactctcttcctcttccccaaccagactggcttccccaataagcacagccgcttcaacgtctactgcttccgagactcggcccagccttctgccatccctgaggcctccaacccagcctccaacccagcctctgatggactagaggctatcgtcacagtgacagagaccctggaggaactgcagctgcctcaggaagccacagagagtgaatcccgtggggccatctactccatccccatcatggaggacggaggaggtggaagctccactccagaagacccagcagaggcccctaggacgctcctagaatttgaaacacaatccatggtaccgcccacggggttctcagaagaggaaggtaaggcattggaggaagaagagaaatatgaagatgaagaagagaaagaggaggaagaagaagaggaggaggtggaggatgaggctctgtgggcatggcccagcgagctcagcagcccgggccctgaggcctctctccccactgagccagcagcccaggaggagtcactctcccaggcgccagcaagggcagtcctgcagcctggtgcatcaccacttcctgatggagagtcagaagcttccaggcctccaagggtccatggaccacctactgagactctgcccactcccagggagaggaacctagcatccccatcaccttccactctggttgaggcaagagaggtgggggaggcaactggtggtcctgagctatctggggtccctcgaggagagagcgaggagacaggaagctccgagggtgccccttccctgcttccagccacacgggcccctgagggtaccagggagctggaggccccctctgaagataattctggaagaactgccccagcagggacctcagtgcaggcccagccagtgctgcccactgacagcgccagccgaggtggagtggccgtggtccccgcatcaggtgactgtgtccccagcccctgccacaatggtgggacatgcttggaggaggaggaaggggtccgctgcctatgtctgcctggctatgggggggacctgtgcgatgttggtgagtgttgagggacggggggcaggtttgaagcctggaccctgccacaacgtgctacttctggaggggggagggagaacattggttttggccttgtcattaatgagtccctgttttaggcaagttgcataacttctttgagtcctaccctcaattttcttatctaagtgaaaccacaatgcctctcatagggggtccatttgagaccagtgcaaagcatactcctggcatttaatcggtggtcaatacatgacaggctccattctcctggagaggagagccactgctcgttaggatggagacccaggccggaactccatccctcaccctggttcctgtctcttagaaaaggcaccagcgcccctgcccaagagcccctccaggctcctgctaccccctcattctctactagctcttttgcaccgccctcctgtcccccttagtcccgcccctctcggcctgcggtagtggaaggagaccagccccttccaggggacctggccctctgggttttggggccctaagatgcccgcccttatgtgccgcaggcctccgcttctgcaaccccggctgggacgccttccagggcgcctgctacaagcacttttccacacgaaggagctgggaggaggcagagacccagtgccggatgtacggcgcgcatctggccagcatcagcacacccgaggaacaggacttcatcaacagtgggctgggagacagggcgggaggggcccccgccatatgctctcactctctctcactcgcctaaccgccttcctcattaacccatgcacttattccttggttttctcaagcgtgcattccctcactcattcgttcactccccttctcattctctctcccttcccaccctacgcttaggcagtggccttcgggaacggagagtggaggttcgcgcagtagagtgcgcctgtgtgggccgggccgccgtgcagggggccgcctccaatccctccaacctccctgctctccgacctccgtcggcctcctccaactccaactccaatcttgttgaaagttttgactctttttccaaaactccccttttctagcctgggttgatatcttccttattctcccacccccattcccctgctttccatctggcccttgagcagaggctggggtagaagaacccgacaagggcgggtgctggatcgcggggaagggtttccaaggcagtcaccgcagaccgcccgggagcggggaacggccgccatctgctggcggctgcgctcactgcacgccttcgtctccctagaccggtaccgggagtaccagtggatcggactcaacgacaggaccatcgaaggcgacttcttgtggtcggatggcgtccccctgctctatgagaactggaaccctgggcagcctgacagctacttcctgtctggagagaactgcgtggtcatggtgtggcatgatcagggacaatggagtgacgtgccctgcaactaccacctgtcctacacctgcaagatggggctggtgtcctgtgggccgccaccggagctgcccctggctcaagtgttcggccgcccacggctgcgctatgaggtggacactgtgcttcgctaccggtgccgggaaggactggcccagcgcaatctgccgctgatccgatgccaagagaacggtcgttgggaggccccccagatctcctgtgtgcccagaagacctgcccgagctctgcacccagaggaggacccagaaggacgtcaggggaggctactgggacgctggaaggcgctgttgatccccccttccagccccatgccaggtccctagggggcaaggccttgaacactgccggccacagcactgccctgtcacccaaattttccctcacaccctgcgctcccgccaccacaggaagtgacaacatgacgaggggtggtgctggagtccaggtgacagttcctgaaggggcttctgggaaatacctaggaggctccagcccagcccaggccctctccccctaccctgggcaccagatcttccatcagggccggagtaaatccctaagtgcctcaactgccctctccctggcagccatcttgtcccctctattcctctagggagcactgtgcccactctttctgggttttccaagggaatgggcttgcaggatggagtgtctgtaaaatcaacaggaaataaaactgtgtatgagccc

SEQ ID NO: 733186 - DNA, 4758 bp, Homo sapiens
  misc_feature (4463)..(4463): n is a, c, g, or t
accacgcgtcgccacgcgtcgccacgcgtgcccacgcgtcgccagcctctcctcacgctcgcgcagtctccgccgcagtctcagctgcagctgcaggactgagccgtgcacccggaggagacccccggaggaggcgacaaacttcgcagtgccgcgacccaaccccagccctgggtagcctgcagcatggcccagctgttcctgcccctgctggcagccctggtcctggcccaggctcctgcagctttagcagatgttctggaaggagacagctcagaggaccgcgcttttcgcgtgcgcatcgcgggcgacgcgccactgcagggcgtgctcggcggcgccctcaccatcccttgccacgtccactacctgcggccaccgccgagccgccgggctgtgctgggctctccgcgggtcaagtggactttcctgtcccggggccgggaggcagaggtgctggtggcgcggggagtgcgcgtcaaggtgaacgaggcctaccggttccgcgtggcactgcctgcgtacccagcgtcgctcaccgacgtctccctggcgctgagcgagctgcgccccaacgactcaggtatctatcgctgtgaggtccagcacggcatcgatgacagcagcgacgctgtggaggtcaaggtcaaaggggtcgtctttctctaccgagagggctctgcccgctatgctttctccttttctggggcccaggaggcctgtgcccgcattggagcccacatcgccaccccggagcagctctatgccgcctaccttgggggctatgagcaatgtgatgctggctggctgtcggatcagaccgtgaggtatcccatccagaccccacgagaggcctgttacggagacatggatggcttccccggggtccggaactatggtgtggtggacccggatgacctctatgatgtgtactgttatgctgaagacctaaatggagaactgttcctgggtgaccctccagagaagctgacattggaggaagcacgggcgtactgccaggagcggggtgcagagattgccaccacgggccaactgtatgcagcctgggatggtggcctggaccactgcagcccagggtggctagctgatggcagtgtgcgctaccccatcgtcacacccagccagcgctgtggtgggggcttgcctggtgtcaagactctcttcctcttccccaaccagactggcttccccaataagcacagccgcttcaacgtctactgcttccgagactcggcccagccttctgccatccctgaggcctccaacccagcctccaacccagcctctgatggactagaggctatcgtcacagtgacagagaccctggaggaactgcagctgcctcaggaagccacagagagtgaatcccgtggggccatctactccatccccatcatggaggacggaggaggtggaagctccactccagaagacccagcagaggcccctaggacgctcctagaatttgaaacacaatccatggtaccgcccacggggttctcagaagaggaaggtaaggcattggaggaagaagagaaatatgaagatgaagaagagaaagaggaggaagaagaagaggaggaggtggaggatgaggctctgtgggcatggcccagcgagctcagcagcccgggccctgaggcctctctccccactgagccagcagcccaggaggagtcactctcccaggcgccagcaagggcagtcctgcagcctggtgcatcaccacttcctgatggagagtcagaagcttccaggcctccaagggtccatggaccacctactgagactctgcccactcccagggagaggaacctagcatccccatcaccttccactctggttgaggcaagagaggtgggggaggcaactggtggtcctgagctatctggggtccctcgaggagagagcgaggagacaggaagctccgagggtgccccttccctgcttccagccacacgggcccctgagggtaccagggagctggaggccccctctgaagataattctggaagaactgccccagcagggacctcagtgcaggcccagccagtgctgcccactgacagcgccagccgaggtggagtggccgtggtccccgcatcaggtgactgtgtccccagcccctgccacaatggtgggacatgcttggaggaggaggaaggggtccgctgcctatgtctgcctggctatgggggggacctgtgcgatgttggtgagtgttgagggacggggggcaggtttgaagcctggaccctgccacaacgtgctacttctggaggggggagggagaacattggttttggccttgtcattaatgagtccctgttttaggcaagttgcataacttctttgagtcctaccctcaattttcttatctaagtgaaaccacaatgcctctcatagggggtccatttgagaccagtgcaaagcatactcctggcatttaatcggtggtcaatacatgacaggctccattctcctggagaggagagccactgctcgttaggatggagacccaggccggaactccatccctcaccctggttcctgtctcttagaaaaggcaccagcgcccctgcccaagagcccctccaggctcctgctaccccctcattctctactagctcttttgcaccgccctcctgtcccccttagtcccgcccctctcggcctgcggtagtggaaggagaccagccccttccaggggacctggccctctgggttttggggccctaagatgcccgcccttatgtgccgcaggcctccgcttctgcaaccccggctgggacgccttccagggcgcctgctacaagcacttttccacacgaaggagctgggaggaggcagagacccagtgccggatgtacggcgcgcatctggccagcatcagcacacccgaggaacaggacttcatcaacagtgggctgggagacagggcgggaggggcccccgccatatgctctcactctctctcactcgcctaaccgccttcctcattaacccatgcacttattccttggttttctcaagcgtgcattccctcactcattcgttcactccccttctcattctctctcccttcccaccctacgcttaggcagtggccttcgggaacggagagtggaggttcgcgcagtagagtgcgcctgtgtgggccgggccgccgtgcagggggccgcctccaatccctccaacctccctgctctccgacctccgtcggcctcctccaactccaactccaatcttgttgaaagttttgactctttttccaaaactccccttttctagcctgggttgatatcttccttattctcccacccccattcccctgctttccatctggcccttgagcagaggctggggtagaagaacccgacaagggcgggtgctggatcgcggggaagggtttccaaggcagtcaccgcagaccgcccgggagcggggaacggccgccatctgctggcggctgcgctcactgcacgccttcgtctccctagaccggtaccgggagtaccagtggatcggactcaacgacaggaccatcgaaggcgacttcttgtggtcggatggcgtccccctgctctatgagaactggaaccctgggcagcctgacagctacttcctgtctggagagaactgcgtggtcatggtgtggcatgatcagggacaatggagtgacgtgccctgcaactaccacctgtcctacacctgcaagatggggctggtgtcctgtgggccgccaccggagctgcccctggctcaagtgttcggccgcccacggctgcgctatgaggtggacactgtgcttcgctaccggtgccgggaaggactggcccagcgcaatctgccgctgatccgatgccaagagaacggtcgttgggaggccccccagatctcctgtgtgcccagaagacctgcccgagctctgcacccagaggaggacccagaaggacgtcaggggaggctactgggacgctggaaggcgctgttgatccccccttccagccccatgccaggtccctagggggcaaggccttgaacactgccggccacagcactgccctgtcacccaaattttccctcacaccctgcgctcccgccaccacaggaagtgacaacatgacgaggggtggtgctggagtccaggtgacagttcctgaaggggcttctgggaaatacctaggaggctccagcccagcccaggccctctccccctaccctgggcaccagatcttccatcagggccggagtaaatccctaagtgcctcaactgccctctccctggcagccatcttgtcccctctattcctctagggagcactgtgcccactctttctgggttttccaagggaatgggcttgcaggatggagtgtctgtaaaatcaacaggaaataaaactgtgtatgagcccagaaagaaaaaaaagaaacaacaaaanaaaaccaaaaacaaaaaaagggggcgccccccaaaaaaacaccccccgggggaccccaaagtagcgacccccactttttttgcaaaggggggcccccacaagagggcagcacgattataaaagaccggcgccggccaccgaggcataaaacaccgcggtgtgtgggaacaacgcgtgccagtggaacatctgcgggaggaaccaccactgcgagggcgggaaaaatgggcacgacacacgcgaaaattagcccacgcgaacacaggggacttaacgcacacaggacagaggccgg

SEQ ID NO: 733187 - DNA, 1499 bp, Homo sapiens
ctccattgtggggctgggttctcaggctctcctagcctcttctccccagccccttttgggctgggctcacactggtggccataacaatggaaggctgagccaatgctgaagtcgggagcgggaagaggaaagaaacccagaactcagggctgggttgtgaccagagacaggctctagggagaacttttagggtgctgttatagcttccaggacagagagaccagggctgggggaccctctgcaccctctcctggagggctcaggctgcagagtgcggctgcctcgctccccccgcctcacttctttccccctctcaggtgactgtgtccccagcccctgccacaatggtgggacatgcttggaggaggaggaaggggtccgctgcctatgtctgcctggctatgggggggacctgtgcgatgttggcctccgcttctgcaaccccggctgggacgccttccagggcgcctgctacaagcacttttccacacgaaggagctgggaggaggcagagacccagtgccggatgtacggcgcgcatctggccagcatcagcacacccgaggaacaggacttcatcaacaaccggtaccgggagtaccagtggatcggactcaacgacaggaccatcgaaggcgacttcttgtggtcggatggcgtccccctgctctatgagaactggaaccctgggcagcctgacagctacttcctgtctggagagaactgcgtggtcatggtgtggcatgatcagggacaatggagtgacgtgccctgcaactaccacctgtcctacacctgcaagatggggctggtgtcctgtgggccgccaccggagctgcccctggctcaagtgttcggccgcccacggctgcgctatgaggtggacactgtgcttcgctaccggtgccgggaaggactggcccagcgcaatctgccgctgatccgatgccaagagaacggtcgttgggaggccccccagatctcctgtgtgcccagaagacctgcccgagctctgcacccagaggaggacccagaaggacgtcaggggaggctactgggacgctggaaggcgctgttgatccccccttccagccccatgccaggtccctagggggcaaggccttgaacactgccggccacagcactgccctgtcacccaaattttccctcacaccctgcgctcccgccaccacaggaagtgacaacatgacgaggggtggtgctggagtccaggtgacagttcctgaaggggcttctgggaaatacctaggaggctccagcccagcccaggccctctccccctaccctgggcaccagatcttccatcagggccggagtaaatccctaagtgcctcaactgccctctccctggcagccatcttgtcccctctattcctctagggagcactgtgcccactctttctgggttttccaagggaatgggcttgcaggatggagtgtctgtaaaatcaacaggaaataaaactgtgtatgagccc

SEQ ID NO: 733188 - DNA, 1550 bp, Homo sapiens
ctccattgtggggctgggttctcaggctctcctagcctcttctccccagccccttttgggctgggctcacactggtggccataacaatggaaggctgagccaatgctgaagtcgggagcgggaagaggaaagaaacccagaactcagggctgggttgtgaccagagacaggctctagggagaacttttagggtgctgttatagcttccaggacagagagaccagggctgggggaccctctgcaccctctcctggagggctcaggctgcagagtgcggctgcctcgctccccccgcctcacttctttccccctctcaggtgactgtgtccccagcccctgccacaatggtgggacatgcttggaggaggaggaaggggtccgctgcctatgtctgcctggctatgggggggacctgtgcgatgttggcctccgcttctgcaaccccggctgggacgccttccagggcgcctgctacaagcacttttccacacgaaggagctgggaggaggcagagacccagtgccggatgtacggcgcgcatctggccagcatcagcacacccgaggaacaggacttcatcaacaaccggtaccgggagtaccagtggatcggactcaacgacaggaccatcgaaggcgacttcttgtggtcggatggcgtccccctgctctatgagaactggaaccctgggcagcctgacagctacttcctgtctggagagaactgcgtggtcatggtgtggcatgatcagggacaatggagtgacgtgccctgcaactaccacctgtcctacacctgcaagatggggctggtgtcctgtgggccgccaccggagctgcccctggctcaagtgttcggccgcccacggctgcgctatgaggtggacactgtgcttcgctaccggtgccgggaaggactggcccagcgcaatctgccgctgatccgatgccaagagaacggtcgttgggaggccccccagatctcctgtgtgcccagaagacctgcccgagctctgcacccagaggaggacccagaaggacgtcaggggaggctactgggacgctggaaggcgctgttgatccccccttccagccccatgccaggtccctagggggcaaggccttgaacactgccggccacagcactgccctgtcacccaaattttccctcacaccctgcgctcccgccaccacaggaagtgacaacatgacgaggggtggtgctggagtccaggtgacagttcctgaaggggcttctgggaaatacctaggaggctccagcccagcccaggccctctccccctaccctgggcaccagatcttccatcagggccggagtaaatccctaagtgcctcaactgccctctccctggcagccatcttgtcccctctattcctctagggagcactgtgcccactctttctgggttttccaagggaatgggcttgcaggatggagtgtctgtaaaatcaacaggaaataaaactgtgtatgagccccaaaaaaaacacaaaacaaaaaaaaaaaaaaaaaaaaaaaacaaaaaaaaa

SEQ ID NO: 733189 - DNA, 1821 bp, Homo sapiens
  misc_feature (1526)..(1526): n is a, c, g, or t
ctccattgtggggctgggttctcaggctctcctagcctcttctccccagccccttttgggctgggctcacactggtggccataacaatggaaggctgagccaatgctgaagtcgggagcgggaagaggaaagaaacccagaactcagggctgggttgtgaccagagacaggctctagggagaacttttagggtgctgttatagcttccaggacagagagaccagggctgggggaccctctgcaccctctcctggagggctcaggctgcagagtgcggctgcctcgctccccccgcctcacttctttccccctctcaggtgactgtgtccccagcccctgccacaatggtgggacatgcttggaggaggaggaaggggtccgctgcctatgtctgcctggctatgggggggacctgtgcgatgttggcctccgcttctgcaaccccggctgggacgccttccagggcgcctgctacaagcacttttccacacgaaggagctgggaggaggcagagacccagtgccggatgtacggcgcgcatctggccagcatcagcacacccgaggaacaggacttcatcaacaaccggtaccgggagtaccagtggatcggactcaacgacaggaccatcgaaggcgacttcttgtggtcggatggcgtccccctgctctatgagaactggaaccctgggcagcctgacagctacttcctgtctggagagaactgcgtggtcatggtgtggcatgatcagggacaatggagtgacgtgccctgcaactaccacctgtcctacacctgcaagatggggctggtgtcctgtgggccgccaccggagctgcccctggctcaagtgttcggccgcccacggctgcgctatgaggtggacactgtgcttcgctaccggtgccgggaaggactggcccagcgcaatctgccgctgatccgatgccaagagaacggtcgttgggaggccccccagatctcctgtgtgcccagaagacctgcccgagctctgcacccagaggaggacccagaaggacgtcaggggaggctactgggacgctggaaggcgctgttgatccccccttccagccccatgccaggtccctagggggcaaggccttgaacactgccggccacagcactgccctgtcacccaaattttccctcacaccctgcgctcccgccaccacaggaagtgacaacatgacgaggggtggtgctggagtccaggtgacagttcctgaaggggcttctgggaaatacctaggaggctccagcccagcccaggccctctccccctaccctgggcaccagatcttccatcagggccggagtaaatccctaagtgcctcaactgccctctccctggcagccatcttgtcccctctattcctctagggagcactgtgcccactctttctgggttttccaagggaatgggcttgcaggatggagtgtctgtaaaatcaacaggaaataaaactgtgtatgagcccagaaagaaaaaaaagaaacaacaaaanaaaaccaaaaacaaaaaaagggggcgccccccaaaaaaacaccccccgggggaccccaaagtagcgacccccactttttttgcaaaggggggcccccacaagagggcagcacgattataaaagaccggcgccggccaccgaggcataaaacaccgcggtgtgtgggaacaacgcgtgccagtggaacatctgcgggaggaaccaccactgcgagggcgggaaaaatgggcacgacacacgcgaaaattagcccacgcgaacacaggggacttaacgcacacaggacagaggccgg

SEQ ID NO: 733190 - DNA, 4490 bp, Homo sapiens
ttatatcgtgaccgacgccgtcgccacgcggtcggcctgcggccccagcctctcctcacgctcgcgcagtctccgccgcagtctcagctgcagctgcaggactgagccgtgcacccggaggagacccccggaggaggcgacaaacttcgcagtgccgcgacccaaccccagccctgggtagcctgcagcatggcccagctgttcctgcccctgctggcagccctggtcctggcccaggctcctgcagctttagcagatgttctggaaggagacagctcagaggaccgcgcttttcgcgtgcgcatcgcgggcgacgcgccactgcagggcgtgctcggcggcgccctcaccatcccttgccacgtccactacctgcggccaccgccgagccgccgggctgtgctgggctctccgcgggtcaagtggactttcctgtcccggggccgggaggcagaggtgctggtggcgcggggagtgcgcgtcaaggtgaacgaggcctaccggttccgcgtggcactgcctgcgtacccagcgtcgctcaccgacgtctccctggcgctgagcgagctgcgccccaacgactcaggtatctatcgctgtgaggtccagcacggcatcgatgacagcagcgacgctgtggaggtcaaggtcaaaggggtcgtctttctctaccgagagggctctgcccgctatgctttctccttttctggggcccaggaggcctgtgcccgcattggagcccacatcgccaccccggagcagctctatgccgcctaccttgggggctatgagcaatgtgatgctggctggctgtcggatcagaccgtgaggtatcccatccagaccccacgagaggcctgttacggagacatggatggcttccccggggtccggaactatggtgtggtggacccggatgacctctatgatgtgtactgttatgctgaagacctaaatggagaactgttcctgggtgaccctccagagaagctgacattggaggaagcacgggcgtactgccaggagcggggtgcagagattgccaccacgggccaactgtatgcagcctgggatggtggcctggaccactgcagcccagggtggctagctgatggcagtgtgcgctaccccatcgtcacacccagccagcgctgtggtgggggcttgcctggtgtcaagactctcttcctcttccccaaccagactggcttccccaataagcacagccgcttcaacgtctactgcttccgagactcggcccagccttctgccatccctgaggcctccaacccagcctccaacccagcctctgatggactagaggctatcgtcacagtgacagagaccctggaggaactgcagctgcctcaggaagccacagagagtgaatcccgtggggccatctactccatccccatcatggaggacggaggaggtggaagctccactccagaagacccagcagaggcccctaggacgctcctagaatttgaaacacaatccatggtaccgcccacggggttctcagaagaggaaggtaaggcattggaggaagaagagaaatatgaagatgaagaagagaaagaggaggaagaagaagaggaggaggtggaggatgaggctctgtgggcatggcccagcgagctcagcagcccgggccctgaggcctctctccccactgagccagcagcccaggaggagtcactctcccaggcgccagcaagggcagtcctgcagcctggtgcatcaccacttcctgatggagagtcagaagcttccaggcctccaagggtccatggaccacctactgagactctgcccactcccagggagaggaacctagcatccccatcaccttccactctggttgaggcaagagaggtgggggaggcaactggtggtcctgagctatctggggtccctcgaggagagagcgaggagacaggaagctccgagggtgccccttccctgcttccagccacacgggcccctgagggtaccagggagctggaggccccctctgaagataattctggaagaactgccccagcagggacctcagtgcaggcccagccagtgctgcccactgacagcgccagccgaggtggagtggccgtggtccccgcatcaggtgactgtgtccccagcccctgccacaatggtgggacatgcttggaggaggaggaaggggtccgctgcctatgtctgcctggctatgggggggacctgtgcgatgttggtgagtgttgagggacggggggcaggtttgaagcctggaccctgccacaacgtgctacttctggaggggggagggagaacattggttttggccttgtcattaatgagtccctgttttaggcaagttgcataacttctttgagtcctaccctcaattttcttatctaagtgaaaccacaatgcctctcatagggggtccatttgagaccagtgcaaagcatactcctggcatttaatcggtggtcaatacatgacaggctccattctcctggagaggagagccactgctcgttaggatggagacccaggccggaactccatccctcaccctggttcctgtctcttagaaaaggcaccagcgcccctgcccaagagcccctccaggctcctgctaccccctcattctctactagctcttttgcaccgccctcctgtcccccttagtcccgcccctctcggcctgcggtagtggaaggagaccagccccttccaggggacctggccctctgggttttggggccctaagatgcccgcccttatgtgccgcaggcctccgcttctgcaaccccggctgggacgccttccagggcgcctgctacaagcacttttccacacgaaggagctgggaggaggcagagacccagtgccggatgtacggcgcgcatctggccagcatcagcacacccgaggaacaggacttcatcaacagtgggctgggagacagggcgggaggggcccccgccatatgctctcactctctctcactcgcctaaccgccttcctcattaacccatgcacttattccttggttttctcaagcgtgcattccctcactcattcgttcactccccttctcattctctctcccttcccaccctacgcttaggcagtggccttcgggaacggagagtggaggttcgcgcagtagagtgcgcctgtgtgggccgggccgccgtgcagggggccgcctccaatccctccaacctccctgctctccgacctccgtcggcctcctccaactccaactccaatcttgttgaaagttttgactctttttccaaaactccccttttctagcctgggttgatatcttccttattctcccacccccattcccctgctttccatctggcccttgagcagaggctggggtagaagaacccgacaagggcgggtgctggatcgcggggaagggtttccaaggcagtcaccgcagaccgcccgggagcggggaacggccgccatctgctggcggctgcgctcactgcacgccttcgtctccctagaccggtaccgggagtaccagtggatcggactcaacgacaggaccatcgaaggcgacttcttgtggtcggatggcgtccccctgctctatgagaactggaaccctgggcagcctgacagctacttcctgtctggagagaactgcgtggtcatggtgtggcatgatcagggacaatggagtgacgtgccctgcaactaccacctgtcctacacctgcaagatggggctggtgtcctgtgggccgccaccggagctgcccctggctcaagtgttcggccgcccacggctgcgctatgaggtggacactgtgcttcgctaccggtgccgggaaggactggcccagcgcaatctgccgctgatccgatgccaagagaacggtcgttgggaggccccccagatctcctgtgtgcccagaagacctgcccgagctctgcacccagaggaggacccagaaggacgtcaggggaggctactgggacgctggaaggcgctgttgatccccccttccagccccatgccaggtccctagggggcaaggccttgaacactgccggccacagcactgccctgtcacccaaattttccctcacaccctgcgctcccgccaccacaggaagtgacaacatgacgaggggtggtgctggagtccaggtgacagttcctgaaggggcttctgggaaatacctaggaggctccagcccagcccaggccctctccccctaccctgggcaccagatcttccatcagggccggagtaaatccctaagtgcctcaactgccctctccctggcagccatcttgtcccctctattcctctagggagcactgtgcccactctttctgggttttccaagggaatgggcttgcaggatggagtgtctgtaaaatcaacaggaaataaaactgtgtatgagccccaaaaaaaacacaaaacaaaaaaaaaaaaaaaaaaaaaaaacaaaaaaaaa

SEQ ID NO: 733191 - DNA, 4439 bp, Homo sapiens
ttatatcgtgaccgacgccgtcgccacgcggtcggcctgcggccccagcctctcctcacgctcgcgcagtctccgccgcagtctcagctgcagctgcaggactgagccgtgcacccggaggagacccccggaggaggcgacaaacttcgcagtgccgcgacccaaccccagccctgggtagcctgcagcatggcccagctgttcctgcccctgctggcagccctggtcctggcccaggctcctgcagctttagcagatgttctggaaggagacagctcagaggaccgcgcttttcgcgtgcgcatcgcgggcgacgcgccactgcagggcgtgctcggcggcgccctcaccatcccttgccacgtccactacctgcggccaccgccgagccgccgggctgtgctgggctctccgcgggtcaagtggactttcctgtcccggggccgggaggcagaggtgctggtggcgcggggagtgcgcgtcaaggtgaacgaggcctaccggttccgcgtggcactgcctgcgtacccagcgtcgctcaccgacgtctccctggcgctgagcgagctgcgccccaacgactcaggtatctatcgctgtgaggtccagcacggcatcgatgacagcagcgacgctgtggaggtcaaggtcaaaggggtcgtctttctctaccgagagggctctgcccgctatgctttctccttttctggggcccaggaggcctgtgcccgcattggagcccacatcgccaccccggagcagctctatgccgcctaccttgggggctatgagcaatgtgatgctggctggctgtcggatcagaccgtgaggtatcccatccagaccccacgagaggcctgttacggagacatggatggcttccccggggtccggaactatggtgtggtggacccggatgacctctatgatgtgtactgttatgctgaagacctaaatggagaactgttcctgggtgaccctccagagaagctgacattggaggaagcacgggcgtactgccaggagcggggtgcagagattgccaccacgggccaactgtatgcagcctgggatggtggcctggaccactgcagcccagggtggctagctgatggcagtgtgcgctaccccatcgtcacacccagccagcgctgtggtgggggcttgcctggtgtcaagactctcttcctcttccccaaccagactggcttccccaataagcacagccgcttcaacgtctactgcttccgagactcggcccagccttctgccatccctgaggcctccaacccagcctccaacccagcctctgatggactagaggctatcgtcacagtgacagagaccctggaggaactgcagctgcctcaggaagccacagagagtgaatcccgtggggccatctactccatccccatcatggaggacggaggaggtggaagctccactccagaagacccagcagaggcccctaggacgctcctagaatttgaaacacaatccatggtaccgcccacggggttctcagaagaggaaggtaaggcattggaggaagaagagaaatatgaagatgaagaagagaaagaggaggaagaagaagaggaggaggtggaggatgaggctctgtgggcatggcccagcgagctcagcagcccgggccctgaggcctctctccccactgagccagcagcccaggaggagtcactctcccaggcgccagcaagggcagtcctgcagcctggtgcatcaccacttcctgatggagagtcagaagcttccaggcctccaagggtccatggaccacctactgagactctgcccactcccagggagaggaacctagcatccccatcaccttccactctggttgaggcaagagaggtgggggaggcaactggtggtcctgagctatctggggtccctcgaggagagagcgaggagacaggaagctccgagggtgccccttccctgcttccagccacacgggcccctgagggtaccagggagctggaggccccctctgaagataattctggaagaactgccccagcagggacctcagtgcaggcccagccagtgctgcccactgacagcgccagccgaggtggagtggccgtggtccccgcatcaggtgactgtgtccccagcccctgccacaatggtgggacatgcttggaggaggaggaaggggtccgctgcctatgtctgcctggctatgggggggacctgtgcgatgttggtgagtgttgagggacggggggcaggtttgaagcctggaccctgccacaacgtgctacttctggaggggggagggagaacattggttttggccttgtcattaatgagtccctgttttaggcaagttgcataacttctttgagtcctaccctcaattttcttatctaagtgaaaccacaatgcctctcatagggggtccatttgagaccagtgcaaagcatactcctggcatttaatcggtggtcaatacatgacaggctccattctcctggagaggagagccactgctcgttaggatggagacccaggccggaactccatccctcaccctggttcctgtctcttagaaaaggcaccagcgcccctgcccaagagcccctccaggctcctgctaccccctcattctctactagctcttttgcaccgccctcctgtcccccttagtcccgcccctctcggcctgcggtagtggaaggagaccagccccttccaggggacctggccctctgggttttggggccctaagatgcccgcccttatgtgccgcaggcctccgcttctgcaaccccggctgggacgccttccagggcgcctgctacaagcacttttccacacgaaggagctgggaggaggcagagacccagtgccggatgtacggcgcgcatctggccagcatcagcacacccgaggaacaggacttcatcaacagtgggctgggagacagggcgggaggggcccccgccatatgctctcactctctctcactcgcctaaccgccttcctcattaacccatgcacttattccttggttttctcaagcgtgcattccctcactcattcgttcactccccttctcattctctctcccttcccaccctacgcttaggcagtggccttcgggaacggagagtggaggttcgcgcagtagagtgcgcctgtgtgggccgggccgccgtgcagggggccgcctccaatccctccaacctccctgctctccgacctccgtcggcctcctccaactccaactccaatcttgttgaaagttttgactctttttccaaaactccccttttctagcctgggttgatatcttccttattctcccacccccattcccctgctttccatctggcccttgagcagaggctggggtagaagaacccgacaagggcgggtgctggatcgcggggaagggtttccaaggcagtcaccgcagaccgcccgggagcggggaacggccgccatctgctggcggctgcgctcactgcacgccttcgtctccctagaccggtaccgggagtaccagtggatcggactcaacgacaggaccatcgaaggcgacttcttgtggtcggatggcgtccccctgctctatgagaactggaaccctgggcagcctgacagctacttcctgtctggagagaactgcgtggtcatggtgtggcatgatcagggacaatggagtgacgtgccctgcaactaccacctgtcctacacctgcaagatggggctggtgtcctgtgggccgccaccggagctgcccctggctcaagtgttcggccgcccacggctgcgctatgaggtggacactgtgcttcgctaccggtgccgggaaggactggcccagcgcaatctgccgctgatccgatgccaagagaacggtcgttgggaggccccccagatctcctgtgtgcccagaagacctgcccgagctctgcacccagaggaggacccagaaggacgtcaggggaggctactgggacgctggaaggcgctgttgatccccccttccagccccatgccaggtccctagggggcaaggccttgaacactgccggccacagcactgccctgtcacccaaattttccctcacaccctgcgctcccgccaccacaggaagtgacaacatgacgaggggtggtgctggagtccaggtgacagttcctgaaggggcttctgggaaatacctaggaggctccagcccagcccaggccctctccccctaccctgggcaccagatcttccatcagggccggagtaaatccctaagtgcctcaactgccctctccctggcagccatcttgtcccctctattcctctagggagcactgtgcccactctttctgggttttccaagggaatgggcttgcaggatggagtgtctgtaaaatcaacaggaaataaaactgtgtatgagccc

SEQ ID NO: 733192 - DNA, 4761 bp, Homo sapiens
  misc_feature (4466)..(4466): n is a, c, g, or t
ttatatcgtgaccgacgccgtcgccacgcggtcggcctgcggccccagcctctcctcacgctcgcgcagtctccgccgcagtctcagctgcagctgcaggactgagccgtgcacccggaggagacccccggaggaggcgacaaacttcgcagtgccgcgacccaaccccagccctgggtagcctgcagcatggcccagctgttcctgcccctgctggcagccctggtcctggcccaggctcctgcagctttagcagatgttctggaaggagacagctcagaggaccgcgcttttcgcgtgcgcatcgcgggcgacgcgccactgcagggcgtgctcggcggcgccctcaccatcccttgccacgtccactacctgcggccaccgccgagccgccgggctgtgctgggctctccgcgggtcaagtggactttcctgtcccggggccgggaggcagaggtgctggtggcgcggggagtgcgcgtcaaggtgaacgaggcctaccggttccgcgtggcactgcctgcgtacccagcgtcgctcaccgacgtctccctggcgctgagcgagctgcgccccaacgactcaggtatctatcgctgtgaggtccagcacggcatcgatgacagcagcgacgctgtggaggtcaaggtcaaaggggtcgtctttctctaccgagagggctctgcccgctatgctttctccttttctggggcccaggaggcctgtgcccgcattggagcccacatcgccaccccggagcagctctatgccgcctaccttgggggctatgagcaatgtgatgctggctggctgtcggatcagaccgtgaggtatcccatccagaccccacgagaggcctgttacggagacatggatggcttccccggggtccggaactatggtgtggtggacccggatgacctctatgatgtgtactgttatgctgaagacctaaatggagaactgttcctgggtgaccctccagagaagctgacattggaggaagcacgggcgtactgccaggagcggggtgcagagattgccaccacgggccaactgtatgcagcctgggatggtggcctggaccactgcagcccagggtggctagctgatggcagtgtgcgctaccccatcgtcacacccagccagcgctgtggtgggggcttgcctggtgtcaagactctcttcctcttccccaaccagactggcttccccaataagcacagccgcttcaacgtctactgcttccgagactcggcccagccttctgccatccctgaggcctccaacccagcctccaacccagcctctgatggactagaggctatcgtcacagtgacagagaccctggaggaactgcagctgcctcaggaagccacagagagtgaatcccgtggggccatctactccatccccatcatggaggacggaggaggtggaagctccactccagaagacccagcagaggcccctaggacgctcctagaatttgaaacacaatccatggtaccgcccacggggttctcagaagaggaaggtaaggcattggaggaagaagagaaatatgaagatgaagaagagaaagaggaggaagaagaagaggaggaggtggaggatgaggctctgtgggcatggcccagcgagctcagcagcccgggccctgaggcctctctccccactgagccagcagcccaggaggagtcactctcccaggcgccagcaagggcagtcctgcagcctggtgcatcaccacttcctgatggagagtcagaagcttccaggcctccaagggtccatggaccacctactgagactctgcccactcccagggagaggaacctagcatccccatcaccttccactctggttgaggcaagagaggtgggggaggcaactggtggtcctgagctatctggggtccctcgaggagagagcgaggagacaggaagctccgagggtgccccttccctgcttccagccacacgggcccctgagggtaccagggagctggaggccccctctgaagataattctggaagaactgccccagcagggacctcagtgcaggcccagccagtgctgcccactgacagcgccagccgaggtggagtggccgtggtccccgcatcaggtgactgtgtccccagcccctgccacaatggtgggacatgcttggaggaggaggaaggggtccgctgcctatgtctgcctggctatgggggggacctgtgcgatgttggtgagtgttgagggacggggggcaggtttgaagcctggaccctgccacaacgtgctacttctggaggggggagggagaacattggttttggccttgtcattaatgagtccctgttttaggcaagttgcataacttctttgagtcctaccctcaattttcttatctaagtgaaaccacaatgcctctcatagggggtccatttgagaccagtgcaaagcatactcctggcatttaatcggtggtcaatacatgacaggctccattctcctggagaggagagccactgctcgttaggatggagacccaggccggaactccatccctcaccctggttcctgtctcttagaaaaggcaccagcgcccctgcccaagagcccctccaggctcctgctaccccctcattctctactagctcttttgcaccgccctcctgtcccccttagtcccgcccctctcggcctgcggtagtggaaggagaccagccccttccaggggacctggccctctgggttttggggccctaagatgcccgcccttatgtgccgcaggcctccgcttctgcaaccccggctgggacgccttccagggcgcctgctacaagcacttttccacacgaaggagctgggaggaggcagagacccagtgccggatgtacggcgcgcatctggccagcatcagcacacccgaggaacaggacttcatcaacagtgggctgggagacagggcgggaggggcccccgccatatgctctcactctctctcactcgcctaaccgccttcctcattaacccatgcacttattccttggttttctcaagcgtgcattccctcactcattcgttcactccccttctcattctctctcccttcccaccctacgcttaggcagtggccttcgggaacggagagtggaggttcgcgcagtagagtgcgcctgtgtgggccgggccgccgtgcagggggccgcctccaatccctccaacctccctgctctccgacctccgtcggcctcctccaactccaactccaatcttgttgaaagttttgactctttttccaaaactccccttttctagcctgggttgatatcttccttattctcccacccccattcccctgctttccatctggcccttgagcagaggctggggtagaagaacccgacaagggcgggtgctggatcgcggggaagggtttccaaggcagtcaccgcagaccgcccgggagcggggaacggccgccatctgctggcggctgcgctcactgcacgccttcgtctccctagaccggtaccgggagtaccagtggatcggactcaacgacaggaccatcgaaggcgacttcttgtggtcggatggcgtccccctgctctatgagaactggaaccctgggcagcctgacagctacttcctgtctggagagaactgcgtggtcatggtgtggcatgatcagggacaatggagtgacgtgccctgcaactaccacctgtcctacacctgcaagatggggctggtgtcctgtgggccgccaccggagctgcccctggctcaagtgttcggccgcccacggctgcgctatgaggtggacactgtgcttcgctaccggtgccgggaaggactggcccagcgcaatctgccgctgatccgatgccaagagaacggtcgttgggaggccccccagatctcctgtgtgcccagaagacctgcccgagctctgcacccagaggaggacccagaaggacgtcaggggaggctactgggacgctggaaggcgctgttgatccccccttccagccccatgccaggtccctagggggcaaggccttgaacactgccggccacagcactgccctgtcacccaaattttccctcacaccctgcgctcccgccaccacaggaagtgacaacatgacgaggggtggtgctggagtccaggtgacagttcctgaaggggcttctgggaaatacctaggaggctccagcccagcccaggccctctccccctaccctgggcaccagatcttccatcagggccggagtaaatccctaagtgcctcaactgccctctccctggcagccatcttgtcccctctattcctctagggagcactgtgcccactctttctgggttttccaagggaatgggcttgcaggatggagtgtctgtaaaatcaacaggaaataaaactgtgtatgagcccagaaagaaaaaaaagaaacaacaaaanaaaaccaaaaacaaaaaaagggggcgccccccaaaaaaacaccccccgggggaccccaaagtagcgacccccactttttttgcaaaggggggcccccacaagagggcagcacgattataaaagaccggcgccggccaccgaggcataaaacaccgcggtgtgtgggaacaacgcgtgccagtggaacatctgcgggaggaaccaccactgcgagggcgggaaaaatgggcacgacacacgcgaaaattagcccacgcgaacacaggggacttaacgcacacaggacagaggccgg

SEQ ID NO: 733193 - DNA, 597 bp, Homo sapiens
gagaggagaaggaagagccagggtggagggtgagtgtgtgtcttccccaggcccgagctctgcacccagaggaggacccagaaggacgtcaggggaggctactgggacgctggaaggcgctgttgatccccccttccagccccatgccaggtccctagggggcaaggccttgaacactgccggccacagcactgccctgtcacccaaattttccctcacaccctgcgctcccgccaccacaggaagtgacaacatgacgaggggtggtgctggagtccaggtgacagttcctgaaggggcttctgggaaatacctaggaggctccagcccagcccaggccctctccccctaccctgggcaccagatcttccatcagggccggagtaaatccctaagtgcctcaactgccctctccctggcagccatcttgtcccctctattcctctagggagcactgtgcccactctttctgggttttccaagggaatgggcttgcaggatggagtgtctgtaaaatcaacaggaaataaaactgtgtatgagccccaaaaaaaacacaaaacaaaaaaaaaaaaaaaaaaaaaaaacaaaaaaaaa

SEQ ID NO: 733194 - DNA, 3361 bp, Homo sapiens
  misc_feature (32)..(33): n is a, c, g, or t
ctgtcggccggaagtattggattgtcgacccnncgtcgcgtccagcctctcctcacgctcgcgcagtctccgccgcagtctcagctgcagctgcaggactgagccgtgcacccggaggagacccccggaggaggcgacaaacttcgcagtgccgcgacccaaccccagccctgggtagcctgcagcatggcccagctgttcctgcccctgctggcagccctggtcctggcccaggctcctgcagctttagcagatgttctggaaggagacagctcagaggaccgcgcttttcgcgtgcgcatcgcgggcgacgcgccactgcagggcgtgctcggcggcgccctcaccatcccttgccacgtccactacctgcggccaccgccgagccgccgggctgtgctgggctctccgcgggtcaagtggactttcctgtcccggggccgggaggcagaggtgctggtggcgcggggagtgcgcgtcaaggtgaacgaggcctaccggttccgcgtggcactgcctgcgtacccagcgtcgctcaccgacgtctccctggcgctgagcgagctgcgccccaacgactcaggtatctatcgctgtgaggtccagcacggcatcgatgacagcagcgacgctgtggaggtcaaggtcaaaggggtcgtctttctctaccgagagggctctgcccgctatgctttctccttttctggggcccaggaggcctgtgcccgcattggagcccacatcgccaccccggagcagctctatgccgcctaccttgggggctatgagcaatgtgatgctggctggctgtcggatcagaccgtgaggtatcccatccagaccccacgagaggcctgttacggagacatggatggcttccccggggtccggaactatggtgtggtggacccggatgacctctatgatgtgtactgttatgctgaagacctaaatggagaactgttcctgggtgaccctccagagaagctgacattggaggaagcacgggcgtactgccaggagcggggtgcagagattgccaccacgggccaactgtatgcagcctgggatggtggcctggaccactgcagcccagggtggctagctgatggcagtgtgcgctaccccatcgtcacacccagccagcgctgtggtgggggcttgcctggtgtcaagactctcttcctcttccccaaccagactggcttccccaataagcacagccgcttcaacgtctactgcttccgagactcggcccagccttctgccatccctgaggcctccaacccagcctccaacccagcctctgatggactagaggctatcgtcacagtgacagagaccctggaggaactgcagctgcctcaggaagccacagagagtgaatcccgtggggccatctactccatccccatcatggaggacggaggaggtggaagctccactccagaagacccagcagaggcccctaggacgctcctagaatttgaaacacaatccatggtaccgcccacggggttctcagaagaggaaggtaaggcattggaggaagaagagaaatatgaagatgaagaagagaaagaggaggaagaagaagaggaggaggtggaggatgaggctctgtgggcatggcccagcgagctcagcagcccgggccctgaggcctctctccccactgagccagcagcccaggaggagtcactctcccaggcgccagcaagggcagtcctgcagcctggtgcatcaccacttcctgatggagagtcagaagcttccaggcctccaagggtccatggaccacctactgagactctgcccactcccagggagaggaacctagcatccccatcaccttccactctggttgaggcaagagaggtgggggaggcaactggtggtcctgagctatctggggtccctcgaggagagagcgaggagacaggaagctccgagggtgccccttccctgcttccagccacacgggcccctgagggtaccagggagctggaggccccctctgaagataattctggaagaactgccccagcagggacctcagtgcaggcccagccagtgctgcccactgacagcgccagccgaggtggagtggccgtggtccccgcatcaggtgactgtgtccccagcccctgccacaatggtgggacatgcttggaggaggaggaaggggtccgctgcctatgtctgcctggctatgggggggacctgtgcgatgttggcctccgcttctgcaaccccggctgggacgccttccagggcgcctgctacaagcacttttccacacgaaggagctgggaggaggcagagacccagtgccggatgtacggcgcgcatctggccagcatcagcacacccgaggaacaggacttcatcaacaaccggtaccgggagtaccagtggatcggactcaacgacaggaccatcgaaggcgacttcttgtggtcggatggcgtccccctgctctatgagaactggaaccctgggcagcctgacagctacttcctgtctggagagaactgcgtggtcatggtgtggcatgatcagggacaatggagtgacgtgccctgcaactaccacctgtcctacacctgcaagatggggctggtgtcctgtgggccgccaccggagctgcccctggctcaagtgttcggccgcccacggctgcgctatgaggtggacactgtgcttcgctaccggtgccgggaaggactggcccagcgcaatctgccgctgatccgatgccaagagaacggtcgttgggaggccccccagatctcctgtgtgcccagaagacctgcccgagctctgcacccagaggaggacccagaaggacgtcaggggaggctactgggacgctggaaggcgctgttgatccccccttccagccccatgccaggtccctagggggcaaggccttgaacactgccggccacagcactgccctgtcacccaaattttccctcacaccctgcgctcccgccaccacaggaagtgacaacatgacgaggggtggtgctggagtccaggtgacagttcctgaaggggcttctgggaaatacctaggaggctccagcccagcccaggccctctccccctaccctgggcaccagatcttccatcagggccggagtaaatccctaagtgcctcaactgccctctccctggcagccatcttgtcccctctattcctctagggagcactgtgcccactctttctgggttttccaagggaatgggcttgcaggatggagtgtctgtaaaatcaacaggaaataaaactgtgtatgagccccaaaaaaaacacaaaacaaaaaaaaaaaaaaaaaaaaaaaacaaaaaaaaa

SEQ ID NO: 733195 - DNA, 3310 bp, Homo sapiens
  misc_feature (32)..(33): n is a, c, g, or t
ctgtcggccggaagtattggattgtcgacccnncgtcgcgtccagcctctcctcacgctcgcgcagtctccgccgcagtctcagctgcagctgcaggactgagccgtgcacccggaggagacccccggaggaggcgacaaacttcgcagtgccgcgacccaaccccagccctgggtagcctgcagcatggcccagctgttcctgcccctgctggcagccctggtcctggcccaggctcctgcagctttagcagatgttctggaaggagacagctcagaggaccgcgcttttcgcgtgcgcatcgcgggcgacgcgccactgcagggcgtgctcggcggcgccctcaccatcccttgccacgtccactacctgcggccaccgccgagccgccgggctgtgctgggctctccgcgggtcaagtggactttcctgtcccggggccgggaggcagaggtgctggtggcgcggggagtgcgcgtcaaggtgaacgaggcctaccggttccgcgtggcactgcctgcgtacccagcgtcgctcaccgacgtctccctggcgctgagcgagctgcgccccaacgactcaggtatctatcgctgtgaggtccagcacggcatcgatgacagcagcgacgctgtggaggtcaaggtcaaaggggtcgtctttctctaccgagagggctctgcccgctatgctttctccttttctggggcccaggaggcctgtgcccgcattggagcccacatcgccaccccggagcagctctatgccgcctaccttgggggctatgagcaatgtgatgctggctggctgtcggatcagaccgtgaggtatcccatccagaccccacgagaggcctgttacggagacatggatggcttccccggggtccggaactatggtgtggtggacccggatgacctctatgatgtgtactgttatgctgaagacctaaatggagaactgttcctgggtgaccctccagagaagctgacattggaggaagcacgggcgtactgccaggagcggggtgcagagattgccaccacgggccaactgtatgcagcctgggatggtggcctggaccactgcagcccagggtggctagctgatggcagtgtgcgctaccccatcgtcacacccagccagcgctgtggtgggggcttgcctggtgtcaagactctcttcctcttccccaaccagactggcttccccaataagcacagccgcttcaacgtctactgcttccgagactcggcccagccttctgccatccctgaggcctccaacccagcctccaacccagcctctgatggactagaggctatcgtcacagtgacagagaccctggaggaactgcagctgcctcaggaagccacagagagtgaatcccgtggggccatctactccatccccatcatggaggacggaggaggtggaagctccactccagaagacccagcagaggcccctaggacgctcctagaatttgaaacacaatccatggtaccgcccacggggttctcagaagaggaaggtaaggcattggaggaagaagagaaatatgaagatgaagaagagaaagaggaggaagaagaagaggaggaggtggaggatgaggctctgtgggcatggcccagcgagctcagcagcccgggccctgaggcctctctccccactgagccagcagcccaggaggagtcactctcccaggcgccagcaagggcagtcctgcagcctggtgcatcaccacttcctgatggagagtcagaagcttccaggcctccaagggtccatggaccacctactgagactctgcccactcccagggagaggaacctagcatccccatcaccttccactctggttgaggcaagagaggtgggggaggcaactggtggtcctgagctatctggggtccctcgaggagagagcgaggagacaggaagctccgagggtgccccttccctgcttccagccacacgggcccctgagggtaccagggagctggaggccccctctgaagataattctggaagaactgccccagcagggacctcagtgcaggcccagccagtgctgcccactgacagcgccagccgaggtggagtggccgtggtccccgcatcaggtgactgtgtccccagcccctgccacaatggtgggacatgcttggaggaggaggaaggggtccgctgcctatgtctgcctggctatgggggggacctgtgcgatgttggcctccgcttctgcaaccccggctgggacgccttccagggcgcctgctacaagcacttttccacacgaaggagctgggaggaggcagagacccagtgccggatgtacggcgcgcatctggccagcatcagcacacccgaggaacaggacttcatcaacaaccggtaccgggagtaccagtggatcggactcaacgacaggaccatcgaaggcgacttcttgtggtcggatggcgtccccctgctctatgagaactggaaccctgggcagcctgacagctacttcctgtctggagagaactgcgtggtcatggtgtggcatgatcagggacaatggagtgacgtgccctgcaactaccacctgtcctacacctgcaagatggggctggtgtcctgtgggccgccaccggagctgcccctggctcaagtgttcggccgcccacggctgcgctatgaggtggacactgtgcttcgctaccggtgccgggaaggactggcccagcgcaatctgccgctgatccgatgccaagagaacggtcgttgggaggccccccagatctcctgtgtgcccagaagacctgcccgagctctgcacccagaggaggacccagaaggacgtcaggggaggctactgggacgctggaaggcgctgttgatccccccttccagccccatgccaggtccctagggggcaaggccttgaacactgccggccacagcactgccctgtcacccaaattttccctcacaccctgcgctcccgccaccacaggaagtgacaacatgacgaggggtggtgctggagtccaggtgacagttcctgaaggggcttctgggaaatacctaggaggctccagcccagcccaggccctctccccctaccctgggcaccagatcttccatcagggccggagtaaatccctaagtgcctcaactgccctctccctggcagccatcttgtcccctctattcctctagggagcactgtgcccactctttctgggttttccaagggaatgggcttgcaggatggagtgtctgtaaaatcaacaggaaataaaactgtgtatgagccc

SEQ ID NO: 733196 - DNA, 3632 bp, Homo sapiens
  misc_feature (32)..(33): n is a, c, g, or t
  misc_feature (3337)..(3337): n is a, c, g, or t
ctgtcggccggaagtattggattgtcgacccnncgtcgcgtccagcctctcctcacgctcgcgcagtctccgccgcagtctcagctgcagctgcaggactgagccgtgcacccggaggagacccccggaggaggcgacaaacttcgcagtgccgcgacccaaccccagccctgggtagcctgcagcatggcccagctgttcctgcccctgctggcagccctggtcctggcccaggctcctgcagctttagcagatgttctggaaggagacagctcagaggaccgcgcttttcgcgtgcgcatcgcgggcgacgcgccactgcagggcgtgctcggcggcgccctcaccatcccttgccacgtccactacctgcggccaccgccgagccgccgggctgtgctgggctctccgcgggtcaagtggactttcctgtcccggggccgggaggcagaggtgctggtggcgcggggagtgcgcgtcaaggtgaacgaggcctaccggttccgcgtggcactgcctgcgtacccagcgtcgctcaccgacgtctccctggcgctgagcgagctgcgccccaacgactcaggtatctatcgctgtgaggtccagcacggcatcgatgacagcagcgacgctgtggaggtcaaggtcaaaggggtcgtctttctctaccgagagggctctgcccgctatgctttctccttttctggggcccaggaggcctgtgcccgcattggagcccacatcgccaccccggagcagctctatgccgcctaccttgggggctatgagcaatgtgatgctggctggctgtcggatcagaccgtgaggtatcccatccagaccccacgagaggcctgttacggagacatggatggcttccccggggtccggaactatggtgtggtggacccggatgacctctatgatgtgtactgttatgctgaagacctaaatggagaactgttcctgggtgaccctccagagaagctgacattggaggaagcacgggcgtactgccaggagcggggtgcagagattgccaccacgggccaactgtatgcagcctgggatggtggcctggaccactgcagcccagggtggctagctgatggcagtgtgcgctaccccatcgtcacacccagccagcgctgtggtgggggcttgcctggtgtcaagactctcttcctcttccccaaccagactggcttccccaataagcacagccgcttcaacgtctactgcttccgagactcggcccagccttctgccatccctgaggcctccaacccagcctccaacccagcctctgatggactagaggctatcgtcacagtgacagagaccctggaggaactgcagctgcctcaggaagccacagagagtgaatcccgtggggccatctactccatccccatcatggaggacggaggaggtggaagctccactccagaagacccagcagaggcccctaggacgctcctagaatttgaaacacaatccatggtaccgcccacggggttctcagaagaggaaggtaaggcattggaggaagaagagaaatatgaagatgaagaagagaaagaggaggaagaagaagaggaggaggtggaggatgaggctctgtgggcatggcccagcgagctcagcagcccgggccctgaggcctctctccccactgagccagcagcccaggaggagtcactctcccaggcgccagcaagggcagtcctgcagcctggtgcatcaccacttcctgatggagagtcagaagcttccaggcctccaagggtccatggaccacctactgagactctgcccactcccagggagaggaacctagcatccccatcaccttccactctggttgaggcaagagaggtgggggaggcaactggtggtcctgagctatctggggtccctcgaggagagagcgaggagacaggaagctccgagggtgccccttccctgcttccagccacacgggcccctgagggtaccagggagctggaggccccctctgaagataattctggaagaactgccccagcagggacctcagtgcaggcccagccagtgctgcccactgacagcgccagccgaggtggagtggccgtggtccccgcatcaggtgactgtgtccccagcccctgccacaatggtgggacatgcttggaggaggaggaaggggtccgctgcctatgtctgcctggctatgggggggacctgtgcgatgttggcctccgcttctgcaaccccggctgggacgccttccagggcgcctgctacaagcacttttccacacgaaggagctgggaggaggcagagacccagtgccggatgtacggcgcgcatctggccagcatcagcacacccgaggaacaggacttcatcaacaaccggtaccgggagtaccagtggatcggactcaacgacaggaccatcgaaggcgacttcttgtggtcggatggcgtccccctgctctatgagaactggaaccctgggcagcctgacagctacttcctgtctggagagaactgcgtggtcatggtgtggcatgatcagggacaatggagtgacgtgccctgcaactaccacctgtcctacacctgcaagatggggctggtgtcctgtgggccgccaccggagctgcccctggctcaagtgttcggccgcccacggctgcgctatgaggtggacactgtgcttcgctaccggtgccgggaaggactggcccagcgcaatctgccgctgatccgatgccaagagaacggtcgttgggaggccccccagatctcctgtgtgcccagaagacctgcccgagctctgcacccagaggaggacccagaaggacgtcaggggaggctactgggacgctggaaggcgctgttgatccccccttccagccccatgccaggtccctagggggcaaggccttgaacactgccggccacagcactgccctgtcacccaaattttccctcacaccctgcgctcccgccaccacaggaagtgacaacatgacgaggggtggtgctggagtccaggtgacagttcctgaaggggcttctgggaaatacctaggaggctccagcccagcccaggccctctccccctaccctgggcaccagatcttccatcagggccggagtaaatccctaagtgcctcaactgccctctccctggcagccatcttgtcccctctattcctctagggagcactgtgcccactctttctgggttttccaagggaatgggcttgcaggatggagtgtctgtaaaatcaacaggaaataaaactgtgtatgagcccagaaagaaaaaaaagaaacaacaaaanaaaaccaaaaacaaaaaaagggggcgccccccaaaaaaacaccccccgggggaccccaaagtagcgacccccactttttttgcaaaggggggcccccacaagagggcagcacgattataaaagaccggcgccggccaccgaggcataaaacaccgcggtgtgtgggaacaacgcgtgccagtggaacatctgcgggaggaaccaccactgcgagggcgggaaaaatgggcacgacacacgcgaaaattagcccacgcgaacacaggggacttaacgcacacaggacagaggccgg

SEQ ID NO: 733197 - DNA, 2770 bp, Homo sapiens
  misc_feature (32)..(33): n is a, c, g, or t
ctgtcggccggaagtattggattgtcgacccnncgtcgcgtccagcctctcctcacgctcgcgcagtctccgccgcagtctcagctgcagctgcaggactgagccgtgcacccggaggagacccccggaggaggcgacaaacttcgcagtgccgcgacccaaccccagccctgggtagcctgcagcatggcccagctgttcctgcccctgctggcagccctggtcctggcccaggctcctgcagctttagcagatgttctggaaggagacagctcagaggaccgcgcttttcgcgtgcgcatcgcgggcgacgcgccactgcagggcgtgctcggcggcgccctcaccatcccttgccacgtccactacctgcggccaccgccgagccgccgggctgtgctgggctctccgcgggtcaagtggactttcctgtcccggggccgggaggcagaggtgctggtggcgcggggagtgcgcgtcaaggtgaacgaggcctaccggttccgcgtggcactgcctgcgtacccagcgtcgctcaccgacgtctccctggcgctgagcgagctgcgccccaacgactcaggtatctatcgctgtgaggtccagcacggcatcgatgacagcagcgacgctgtggaggtcaaggtcaaaggggtcgtctttctctaccgagagggctctgcccgctatgctttctccttttctggggcccaggaggcctgtgcccgcattggagcccacatcgccaccccggagcagctctatgccgcctaccttgggggctatgagcaatgtgatgctggctggctgtcggatcagaccgtgaggtatcccatccagaccccacgagaggcctgttacggagacatggatggcttccccggggtccggaactatggtgtggtggacccggatgacctctatgatgtgtactgttatgctgaagacctaaatggagaactgttcctgggtgaccctccagagaagctgacattggaggaagcacgggcgtactgccaggagcggggtgcagagattgccaccacgggccaactgtatgcagcctgggatggtggcctggaccactgcagcccagggtggctagctgatggcagtgtgcgctaccccatcgtcacacccagccagcgctgtggtgggggcttgcctggtgtcaagactctcttcctcttccccaaccagactggcttccccaataagcacagccgcttcaacgtctactgcttccgagactcggcccagccttctgccatccctgaggcctccaacccagcctccaacccagcctctgatggactagaggctatcgtcacagtgacagagaccctggaggaactgcagctgcctcaggaagccacagagagtgaatcccgtggggccatctactccatccccatcatggaggacggaggaggtggaagctccactccagaagacccagcagaggcccctaggacgctcctagaatttgaaacacaatccatggtaccgcccacggggttctcagaagaggaaggtaaggcattggaggaagaagagaaatatgaagatgaagaagagaaagaggaggaagaagaagaggaggaggtggaggatgaggctctgtgggcatggcccagcgagctcagcagcccgggccctgaggcctctctccccactgagccagcagcccaggaggagtcactctcccaggcgccagcaagggcagtcctgcagcctggtgcatcaccacttcctgatggagagtcagaagcttccaggcctccaagggtccatggaccacctactgagactctgcccactcccagggagaggaacctagcatccccatcaccttccactctggttgaggcaagagaggtgggggaggcaactggtggtcctgagctatctggggtccctcgaggagagagcgaggagacaggaagctccgagggtgccccttccctgcttccagccacacgggcccctgagggtaccagggagctggaggccccctctgaagataattctggaagaactgccccagcagggacctcagtgcaggcccagccagtgctgcccactgacagcgccagccgaggtggagtggccgtggtccccgcatcaggtgactgtgtccccagcccctgccacaatggtgggacatgcttggaggaggaggaaggggtccgctgcctatgtctgcctggctatgggggggacctgtgcgatgttggcctccgcttctgcaaccccggctgggacgccttccagggcgcctgctacaagcacttttccacacgaaggagctgggaggaggcagagacccagtgccggatgtacggcgcgcatctggccagcatcagcacacccgaggaacaggacttcatcaacagtgggctgggagacagggcgggaggggcccccgccatatgctctcactctctctcactcgcctaaccgccttcctcattaacccatgcacttattccttggttttctcaagcgtgcattccctcactcattcgttcactccccttctcattctctctcccttcccaccctacgcttaggcagtggccttcgggaacggagagtggaggttcgcgcagtagagtgcgcctgtgtgggccgggccgccgtgcagggggccgcctccaatccctccaacctccctgctctccgacctccgtcggcctcctccaactccaactccaatcttgttgaaagttttgactctttttccaaaactccccttttctagcctggg

SEQ ID NO: 733198 - DNA, 4487 bp, Homo sapiens
  misc_feature (32)..(33): n is a, c, g, or t
ctgtcggccggaagtattggattgtcgacccnncgtcgcgtccagcctctcctcacgctcgcgcagtctccgccgcagtctcagctgcagctgcaggactgagccgtgcacccggaggagacccccggaggaggcgacaaacttcgcagtgccgcgacccaaccccagccctgggtagcctgcagcatggcccagctgttcctgcccctgctggcagccctggtcctggcccaggctcctgcagctttagcagatgttctggaaggagacagctcagaggaccgcgcttttcgcgtgcgcatcgcgggcgacgcgccactgcagggcgtgctcggcggcgccctcaccatcccttgccacgtccactacctgcggccaccgccgagccgccgggctgtgctgggctctccgcgggtcaagtggactttcctgtcccggggccgggaggcagaggtgctggtggcgcggggagtgcgcgtcaaggtgaacgaggcctaccggttccgcgtggcactgcctgcgtacccagcgtcgctcaccgacgtctccctggcgctgagcgagctgcgccccaacgactcaggtatctatcgctgtgaggtccagcacggcatcgatgacagcagcgacgctgtggaggtcaaggtcaaaggggtcgtctttctctaccgagagggctctgcccgctatgctttctccttttctggggcccaggaggcctgtgcccgcattggagcccacatcgccaccccggagcagctctatgccgcctaccttgggggctatgagcaatgtgatgctggctggctgtcggatcagaccgtgaggtatcccatccagaccccacgagaggcctgttacggagacatggatggcttccccggggtccggaactatggtgtggtggacccggatgacctctatgatgtgtactgttatgctgaagacctaaatggagaactgttcctgggtgaccctccagagaagctgacattggaggaagcacgggcgtactgccaggagcggggtgcagagattgccaccacgggccaactgtatgcagcctgggatggtggcctggaccactgcagcccagggtggctagctgatggcagtgtgcgctaccccatcgtcacacccagccagcgctgtggtgggggcttgcctggtgtcaagactctcttcctcttccccaaccagactggcttccccaataagcacagccgcttcaacgtctactgcttccgagactcggcccagccttctgccatccctgaggcctccaacccagcctccaacccagcctctgatggactagaggctatcgtcacagtgacagagaccctggaggaactgcagctgcctcaggaagccacagagagtgaatcccgtggggccatctactccatccccatcatggaggacggaggaggtggaagctccactccagaagacccagcagaggcccctaggacgctcctagaatttgaaacacaatccatggtaccgcccacggggttctcagaagaggaaggtaaggcattggaggaagaagagaaatatgaagatgaagaagagaaagaggaggaagaagaagaggaggaggtggaggatgaggctctgtgggcatggcccagcgagctcagcagcccgggccctgaggcctctctccccactgagccagcagcccaggaggagtcactctcccaggcgccagcaagggcagtcctgcagcctggtgcatcaccacttcctgatggagagtcagaagcttccaggcctccaagggtccatggaccacctactgagactctgcccactcccagggagaggaacctagcatccccatcaccttccactctggttgaggcaagagaggtgggggaggcaactggtggtcctgagctatctggggtccctcgaggagagagcgaggagacaggaagctccgagggtgccccttccctgcttccagccacacgggcccctgagggtaccagggagctggaggccccctctgaagataattctggaagaactgccccagcagggacctcagtgcaggcccagccagtgctgcccactgacagcgccagccgaggtggagtggccgtggtccccgcatcaggtgactgtgtccccagcccctgccacaatggtgggacatgcttggaggaggaggaaggggtccgctgcctatgtctgcctggctatgggggggacctgtgcgatgttggtgagtgttgagggacggggggcaggtttgaagcctggaccctgccacaacgtgctacttctggaggggggagggagaacattggttttggccttgtcattaatgagtccctgttttaggcaagttgcataacttctttgagtcctaccctcaattttcttatctaagtgaaaccacaatgcctctcatagggggtccatttgagaccagtgcaaagcatactcctggcatttaatcggtggtcaatacatgacaggctccattctcctggagaggagagccactgctcgttaggatggagacccaggccggaactccatccctcaccctggttcctgtctcttagaaaaggcaccagcgcccctgcccaagagcccctccaggctcctgctaccccctcattctctactagctcttttgcaccgccctcctgtcccccttagtcccgcccctctcggcctgcggtagtggaaggagaccagccccttccaggggacctggccctctgggttttggggccctaagatgcccgcccttatgtgccgcaggcctccgcttctgcaaccccggctgggacgccttccagggcgcctgctacaagcacttttccacacgaaggagctgggaggaggcagagacccagtgccggatgtacggcgcgcatctggccagcatcagcacacccgaggaacaggacttcatcaacagtgggctgggagacagggcgggaggggcccccgccatatgctctcactctctctcactcgcctaaccgccttcctcattaacccatgcacttattccttggttttctcaagcgtgcattccctcactcattcgttcactccccttctcattctctctcccttcccaccctacgcttaggcagtggccttcgggaacggagagtggaggttcgcgcagtagagtgcgcctgtgtgggccgggccgccgtgcagggggccgcctccaatccctccaacctccctgctctccgacctccgtcggcctcctccaactccaactccaatcttgttgaaagttttgactctttttccaaaactccccttttctagcctgggttgatatcttccttattctcccacccccattcccctgctttccatctggcccttgagcagaggctggggtagaagaacccgacaagggcgggtgctggatcgcggggaagggtttccaaggcagtcaccgcagaccgcccgggagcggggaacggccgccatctgctggcggctgcgctcactgcacgccttcgtctccctagaccggtaccgggagtaccagtggatcggactcaacgacaggaccatcgaaggcgacttcttgtggtcggatggcgtccccctgctctatgagaactggaaccctgggcagcctgacagctacttcctgtctggagagaactgcgtggtcatggtgtggcatgatcagggacaatggagtgacgtgccctgcaactaccacctgtcctacacctgcaagatggggctggtgtcctgtgggccgccaccggagctgcccctggctcaagtgttcggccgcccacggctgcgctatgaggtggacactgtgcttcgctaccggtgccgggaaggactggcccagcgcaatctgccgctgatccgatgccaagagaacggtcgttgggaggccccccagatctcctgtgtgcccagaagacctgcccgagctctgcacccagaggaggacccagaaggacgtcaggggaggctactgggacgctggaaggcgctgttgatccccccttccagccccatgccaggtccctagggggcaaggccttgaacactgccggccacagcactgccctgtcacccaaattttccctcacaccctgcgctcccgccaccacaggaagtgacaacatgacgaggggtggtgctggagtccaggtgacagttcctgaaggggcttctgggaaatacctaggaggctccagcccagcccaggccctctccccctaccctgggcaccagatcttccatcagggccggagtaaatccctaagtgcctcaactgccctctccctggcagccatcttgtcccctctattcctctagggagcactgtgcccactctttctgggttttccaagggaatgggcttgcaggatggagtgtctgtaaaatcaacaggaaataaaactgtgtatgagccccaaaaaaaacacaaaacaaaaaaaaaaaaaaaaaaaaaaaacaaaaaaaaa

SEQ ID NO: 733199 - DNA, 4436 bp, Homo sapiens
  misc_feature (32)..(33): n is a, c, g, or t
ctgtcggccggaagtattggattgtcgacccnncgtcgcgtccagcctctcctcacgctcgcgcagtctccgccgcagtctcagctgcagctgcaggactgagccgtgcacccggaggagacccccggaggaggcgacaaacttcgcagtgccgcgacccaaccccagccctgggtagcctgcagcatggcccagctgttcctgcccctgctggcagccctggtcctggcccaggctcctgcagctttagcagatgttctggaaggagacagctcagaggaccgcgcttttcgcgtgcgcatcgcgggcgacgcgccactgcagggcgtgctcggcggcgccctcaccatcccttgccacgtccactacctgcggccaccgccgagccgccgggctgtgctgggctctccgcgggtcaagtggactttcctgtcccggggccgggaggcagaggtgctggtggcgcggggagtgcgcgtcaaggtgaacgaggcctaccggttccgcgtggcactgcctgcgtacccagcgtcgctcaccgacgtctccctggcgctgagcgagctgcgccccaacgactcaggtatctatcgctgtgaggtccagcacggcatcgatgacagcagcgacgctgtggaggtcaaggtcaaaggggtcgtctttctctaccgagagggctctgcccgctatgctttctccttttctggggcccaggaggcctgtgcccgcattggagcccacatcgccaccccggagcagctctatgccgcctaccttgggggctatgagcaatgtgatgctggctggctgtcggatcagaccgtgaggtatcccatccagaccccacgagaggcctgttacggagacatggatggcttccccggggtccggaactatggtgtggtggacccggatgacctctatgatgtgtactgttatgctgaagacctaaatggagaactgttcctgggtgaccctccagagaagctgacattggaggaagcacgggcgtactgccaggagcggggtgcagagattgccaccacgggccaactgtatgcagcctgggatggtggcctggaccactgcagcccagggtggctagctgatggcagtgtgcgctaccccatcgtcacacccagccagcgctgtggtgggggcttgcctggtgtcaagactctcttcctcttccccaaccagactggcttccccaataagcacagccgcttcaacgtctactgcttccgagactcggcccagccttctgccatccctgaggcctccaacccagcctccaacccagcctctgatggactagaggctatcgtcacagtgacagagaccctggaggaactgcagctgcctcaggaagccacagagagtgaatcccgtggggccatctactccatccccatcatggaggacggaggaggtggaagctccactccagaagacccagcagaggcccctaggacgctcctagaatttgaaacacaatccatggtaccgcccacggggttctcagaagaggaaggtaaggcattggaggaagaagagaaatatgaagatgaagaagagaaagaggaggaagaagaagaggaggaggtggaggatgaggctctgtgggcatggcccagcgagctcagcagcccgggccctgaggcctctctccccactgagccagcagcccaggaggagtcactctcccaggcgccagcaagggcagtcctgcagcctggtgcatcaccacttcctgatggagagtcagaagcttccaggcctccaagggtccatggaccacctactgagactctgcccactcccagggagaggaacctagcatccccatcaccttccactctggttgaggcaagagaggtgggggaggcaactggtggtcctgagctatctggggtccctcgaggagagagcgaggagacaggaagctccgagggtgccccttccctgcttccagccacacgggcccctgagggtaccagggagctggaggccccctctgaagataattctggaagaactgccccagcagggacctcagtgcaggcccagccagtgctgcccactgacagcgccagccgaggtggagtggccgtggtccccgcatcaggtgactgtgtccccagcccctgccacaatggtgggacatgcttggaggaggaggaaggggtccgctgcctatgtctgcctggctatgggggggacctgtgcgatgttggtgagtgttgagggacggggggcaggtttgaagcctggaccctgccacaacgtgctacttctggaggggggagggagaacattggttttggccttgtcattaatgagtccctgttttaggcaagttgcataacttctttgagtcctaccctcaattttcttatctaagtgaaaccacaatgcctctcatagggggtccatttgagaccagtgcaaagcatactcctggcatttaatcggtggtcaatacatgacaggctccattctcctggagaggagagccactgctcgttaggatggagacccaggccggaactccatccctcaccctggttcctgtctcttagaaaaggcaccagcgcccctgcccaagagcccctccaggctcctgctaccccctcattctctactagctcttttgcaccgccctcctgtcccccttagtcccgcccctctcggcctgcggtagtggaaggagaccagccccttccaggggacctggccctctgggttttggggccctaagatgcccgcccttatgtgccgcaggcctccgcttctgcaaccccggctgggacgccttccagggcgcctgctacaagcacttttccacacgaaggagctgggaggaggcagagacccagtgccggatgtacggcgcgcatctggccagcatcagcacacccgaggaacaggacttcatcaacagtgggctgggagacagggcgggaggggcccccgccatatgctctcactctctctcactcgcctaaccgccttcctcattaacccatgcacttattccttggttttctcaagcgtgcattccctcactcattcgttcactccccttctcattctctctcccttcccaccctacgcttaggcagtggccttcgggaacggagagtggaggttcgcgcagtagagtgcgcctgtgtgggccgggccgccgtgcagggggccgcctccaatccctccaacctccctgctctccgacctccgtcggcctcctccaactccaactccaatcttgttgaaagttttgactctttttccaaaactccccttttctagcctgggttgatatcttccttattctcccacccccattcccctgctttccatctggcccttgagcagaggctggggtagaagaacccgacaagggcgggtgctggatcgcggggaagggtttccaaggcagtcaccgcagaccgcccgggagcggggaacggccgccatctgctggcggctgcgctcactgcacgccttcgtctccctagaccggtaccgggagtaccagtggatcggactcaacgacaggaccatcgaaggcgacttcttgtggtcggatggcgtccccctgctctatgagaactggaaccctgggcagcctgacagctacttcctgtctggagagaactgcgtggtcatggtgtggcatgatcagggacaatggagtgacgtgccctgcaactaccacctgtcctacacctgcaagatggggctggtgtcctgtgggccgccaccggagctgcccctggctcaagtgttcggccgcccacggctgcgctatgaggtggacactgtgcttcgctaccggtgccgggaaggactggcccagcgcaatctgccgctgatccgatgccaagagaacggtcgttgggaggccccccagatctcctgtgtgcccagaagacctgcccgagctctgcacccagaggaggacccagaaggacgtcaggggaggctactgggacgctggaaggcgctgttgatccccccttccagccccatgccaggtccctagggggcaaggccttgaacactgccggccacagcactgccctgtcacccaaattttccctcacaccctgcgctcccgccaccacaggaagtgacaacatgacgaggggtggtgctggagtccaggtgacagttcctgaaggggcttctgggaaatacctaggaggctccagcccagcccaggccctctccccctaccctgggcaccagatcttccatcagggccggagtaaatccctaagtgcctcaactgccctctccctggcagccatcttgtcccctctattcctctagggagcactgtgcccactctttctgggttttccaagggaatgggcttgcaggatggagtgtctgtaaaatcaacaggaaataaaactgtgtatgagccc

SEQ ID NO: 733200 - DNA, 4758 bp, Homo sapiens
  misc_feature (32)..(33): n is a, c, g, or t
  misc_feature (4463)..(4463): n is a, c, g, or t
ctgtcggccggaagtattggattgtcgacccnncgtcgcgtccagcctctcctcacgctcgcgcagtctccgccgcagtctcagctgcagctgcaggactgagccgtgcacccggaggagacccccggaggaggcgacaaacttcgcagtgccgcgacccaaccccagccctgggtagcctgcagcatggcccagctgttcctgcccctgctggcagccctggtcctggcccaggctcctgcagctttagcagatgttctggaaggagacagctcagaggaccgcgcttttcgcgtgcgcatcgcgggcgacgcgccactgcagggcgtgctcggcggcgccctcaccatcccttgccacgtccactacctgcggccaccgccgagccgccgggctgtgctgggctctccgcgggtcaagtggactttcctgtcccggggccgggaggcagaggtgctggtggcgcggggagtgcgcgtcaaggtgaacgaggcctaccggttccgcgtggcactgcctgcgtacccagcgtcgctcaccgacgtctccctggcgctgagcgagctgcgccccaacgactcaggtatctatcgctgtgaggtccagcacggcatcgatgacagcagcgacgctgtggaggtcaaggtcaaaggggtcgtctttctctaccgagagggctctgcccgctatgctttctccttttctggggcccaggaggcctgtgcccgcattggagcccacatcgccaccccggagcagctctatgccgcctaccttgggggctatgagcaatgtgatgctggctggctgtcggatcagaccgtgaggtatcccatccagaccccacgagaggcctgttacggagacatggatggcttccccggggtccggaactatggtgtggtggacccggatgacctctatgatgtgtactgttatgctgaagacctaaatggagaactgttcctgggtgaccctccagagaagctgacattggaggaagcacgggcgtactgccaggagcggggtgcagagattgccaccacgggccaactgtatgcagcctgggatggtggcctggaccactgcagcccagggtggctagctgatggcagtgtgcgctaccccatcgtcacacccagccagcgctgtggtgggggcttgcctggtgtcaagactctcttcctcttccccaaccagactggcttccccaataagcacagccgcttcaacgtctactgcttccgagactcggcccagccttctgccatccctgaggcctccaacccagcctccaacccagcctctgatggactagaggctatcgtcacagtgacagagaccctggaggaactgcagctgcctcaggaagccacagagagtgaatcccgtggggccatctactccatccccatcatggaggacggaggaggtggaagctccactccagaagacccagcagaggcccctaggacgctcctagaatttgaaacacaatccatggtaccgcccacggggttctcagaagaggaaggtaaggcattggaggaagaagagaaatatgaagatgaagaagagaaagaggaggaagaagaagaggaggaggtggaggatgaggctctgtgggcatggcccagcgagctcagcagcccgggccctgaggcctctctccccactgagccagcagcccaggaggagtcactctcccaggcgccagcaagggcagtcctgcagcctggtgcatcaccacttcctgatggagagtcagaagcttccaggcctccaagggtccatggaccacctactgagactctgcccactcccagggagaggaacctagcatccccatcaccttccactctggttgaggcaagagaggtgggggaggcaactggtggtcctgagctatctggggtccctcgaggagagagcgaggagacaggaagctccgagggtgccccttccctgcttccagccacacgggcccctgagggtaccagggagctggaggccccctctgaagataattctggaagaactgccccagcagggacctcagtgcaggcccagccagtgctgcccactgacagcgccagccgaggtggagtggccgtggtccccgcatcaggtgactgtgtccccagcccctgccacaatggtgggacatgcttggaggaggaggaaggggtccgctgcctatgtctgcctggctatgggggggacctgtgcgatgttggtgagtgttgagggacggggggcaggtttgaagcctggaccctgccacaacgtgctacttctggaggggggagggagaacattggttttggccttgtcattaatgagtccctgttttaggcaagttgcataacttctttgagtcctaccctcaattttcttatctaagtgaaaccacaatgcctctcatagggggtccatttgagaccagtgcaaagcatactcctggcatttaatcggtggtcaatacatgacaggctccattctcctggagaggagagccactgctcgttaggatggagacccaggccggaactccatccctcaccctggttcctgtctcttagaaaaggcaccagcgcccctgcccaagagcccctccaggctcctgctaccccctcattctctactagctcttttgcaccgccctcctgtcccccttagtcccgcccctctcggcctgcggtagtggaaggagaccagccccttccaggggacctggccctctgggttttggggccctaagatgcccgcccttatgtgccgcaggcctccgcttctgcaaccccggctgggacgccttccagggcgcctgctacaagcacttttccacacgaaggagctgggaggaggcagagacccagtgccggatgtacggcgcgcatctggccagcatcagcacacccgaggaacaggacttcatcaacagtgggctgggagacagggcgggaggggcccccgccatatgctctcactctctctcactcgcctaaccgccttcctcattaacccatgcacttattccttggttttctcaagcgtgcattccctcactcattcgttcactccccttctcattctctctcccttcccaccctacgcttaggcagtggccttcgggaacggagagtggaggttcgcgcagtagagtgcgcctgtgtgggccgggccgccgtgcagggggccgcctccaatccctccaacctccctgctctccgacctccgtcggcctcctccaactccaactccaatcttgttgaaagttttgactctttttccaaaactccccttttctagcctgggttgatatcttccttattctcccacccccattcccctgctttccatctggcccttgagcagaggctggggtagaagaacccgacaagggcgggtgctggatcgcggggaagggtttccaaggcagtcaccgcagaccgcccgggagcggggaacggccgccatctgctggcggctgcgctcactgcacgccttcgtctccctagaccggtaccgggagtaccagtggatcggactcaacgacaggaccatcgaaggcgacttcttgtggtcggatggcgtccccctgctctatgagaactggaaccctgggcagcctgacagctacttcctgtctggagagaactgcgtggtcatggtgtggcatgatcagggacaatggagtgacgtgccctgcaactaccacctgtcctacacctgcaagatggggctggtgtcctgtgggccgccaccggagctgcccctggctcaagtgttcggccgcccacggctgcgctatgaggtggacactgtgcttcgctaccggtgccgggaaggactggcccagcgcaatctgccgctgatccgatgccaagagaacggtcgttgggaggccccccagatctcctgtgtgcccagaagacctgcccgagctctgcacccagaggaggacccagaaggacgtcaggggaggctactgggacgctggaaggcgctgttgatccccccttccagccccatgccaggtccctagggggcaaggccttgaacactgccggccacagcactgccctgtcacccaaattttccctcacaccctgcgctcccgccaccacaggaagtgacaacatgacgaggggtggtgctggagtccaggtgacagttcctgaaggggcttctgggaaatacctaggaggctccagcccagcccaggccctctccccctaccctgggcaccagatcttccatcagggccggagtaaatccctaagtgcctcaactgccctctccctggcagccatcttgtcccctctattcctctagggagcactgtgcccactctttctgggttttccaagggaatgggcttgcaggatggagtgtctgtaaaatcaacaggaaataaaactgtgtatgagcccagaaagaaaaaaaagaaacaacaaaanaaaaccaaaaacaaaaaaagggggcgccccccaaaaaaacaccccccgggggaccccaaagtagcgacccccactttttttgcaaaggggggcccccacaagagggcagcacgattataaaagaccggcgccggccaccgaggcataaaacaccgcggtgtgtgggaacaacgcgtgccagtggaacatctgcgggaggaaccaccactgcgagggcgggaaaaatgggcacgacacacgcgaaaattagcccacgcgaacacaggggacttaacgcacacaggacagaggccgg

SEQ ID NO: 733201 - DNA, 2707 bp, Homo sapiens
  misc_feature (32)..(33): n is a, c, g, or t
ctgtcggccggaagtattggattgtcgacccnncgtcgcgtccagcctctcctcacgctcgcgcagtctccgccgcagtctcagctgcagctgcaggactgagccgtgcacccggaggagacccccggaggaggcgacaaacttcgcagtgccgcgacccaaccccagccctgggtagcctgcagcatggcccagctgttcctgcccctgctggcagccctggtcctggcccaggctcctgcagctttagcagatgttctggaaggagacagctcagaggaccgcgcttttcgcgtgcgcatcgcgggcgacgcgccactgcagggcgtgctcggcggcgccctcaccatcccttgccacgtccactacctgcggccaccgccgagccgccgggctgtgctgggctctccgcgggtcaagtggactttcctgtcccggggccgggaggcagaggtgctggtggcgcggggagtgcgcgtcaaggtgaacgaggcctaccggttccgcgtggcactgcctgcgtacccagcgtcgctcaccgacgtctccctggcgctgagcgagctgcgccccaacgactcaggtatctatcgctgtgaggtccagcacggcatcgatgacagcagcgacgctgtggaggtcaaggtcaaaggggtcgtctttctctaccgagagggctctgcccgctatgctttctccttttctggggcccaggaggcctgtgcccgcattggagcccacatcgccaccccggagcagctctatgccgcctaccttgggggctatgagcaatgtgatgctggctggctgtcggatcagaccgtgaggtatcccatccagaccccacgagaggcctgttacggagacatggatggcttccccggggtccggaactatggtgtggtggacccggatgacctctatgatgtgtactgttatgctgaagacctaaatggagaactgttcctgggtgaccctccagagaagctgacattggaggaagcacgggcgtactgccaggagcggggtgcagagattgccaccacgggccaactgtatgcagcctgggatggtggcctggaccactgcagcccagggtggctagctgatggcagtgtgcgctaccccatcgtcacacccagccagcgctgtggtgggggcttgcctggtgtcaagactctcttcctcttccccaaccagactggcttccccaataagcacagccgcttcaacgtctactgcttccgagactcggcccagccttctgccatccctgaggcctccaacccagcctccaacccagcctctgatggactagaggctatcgtcacagtgacagagaccctggaggaactgcagctgcctcaggaagccacagagagtgaatcccgtggggccatctactccatccccatcatggaggacggaggaggtggaagctccactccagaagacccagcagaggcccctaggacgctcctagaatttgaaacacaatccatggtaccgcccacggggttctcagaagaggaaggtaaggcattggaggaagaagagaaatatgaagatgaagaagagaaagaggaggaagaagaagaggaggaggtggaggatgaggctctgtgggcatggcccagcgagctcagcagcccgggccctgaggcctctctccccactgagccagcagcccaggaggagtcactctcccaggcgccagcaagggcagtcctgcagcctggtgcatcaccacttcctgatggagagtcagaagcttccaggcctccaagggtccatggaccacctactgagactctgcccactcccagggagaggaacctagcatccccatcaccttccactctggttgaggcaagagaggtgggggaggcaactggtggtcctgagctatctggggtccctcgaggagagagcgaggagacaggaagctccgagggtgccccttccctgcttccagccacacgggcccctgagggtaccagggagctggaggccccctctgaagataattctggaagaactgccccagcagggacctcagtgcaggcccagccagtgctgcccactgacagcgccagccgaggtggagtggccgtggtccccgcatcaggtaattctgcccaaggctcaactgccctctctatcctactccttttcttccccctgcagctctgggtcacctgacctgtagtcctttaacccaccatcatcccaaactctcctgtcctttgccttcattctcttacccacctctacctatgggtctccaatctcggatatccaccttgtgggtatctcagctctccgcgtctttaccctgtgatcccagccccgccactgaccatctgtgacccttccctgccattgggccctccacctgtggctcacatctcgccagccccacagagcatcctcaggcctctccaagggtcctcatcacctattgcagccttcagggctcggcctattttccactactcccttcatccgcctgtgtgccgtcccctttagctgcctcctattgatctcagggaagcctgggagtcccttctcacccctcaacctccggagtccaggagaacccgtacccccacagagccttaagcaactacttctgtgaagtattttttgactgtttcatggaaaacaagccttggaaataaatctctattaaaccgctttgtaacca

SEQ ID NO: 733202 - DNA, 1522 bp, Homo sapiens
  misc_feature (95)..(95): n is a, c, g, or t
  misc_feature (98)..(98): n is a, c, g, or t
  misc_feature (104)..(105): n is a, c, g, or t
  misc_feature (108)..(109): n is a, c, g, or t
  misc_feature (112)..(112): n is a, c, g, or t
  misc_feature (114)..(114): n is a, c, g, or t
  misc_feature (116)..(116): n is a, c, g, or t
tggaggaactgcagctgcctcaggttctctgtcactgtgacgatagcctctagtccatcagaggctgggttggaggctgggttggaggcctcagnganggagannctnngcngngnctcggaagccacagagagtgaatcccgtggggccatctactccatccccatcatggaggacggaggaggtggaagctccactccagaagacccagcagaggcccctaggacgctcctagaatttgaaacacaatccatggtaccgcccacggggttctcagaagaggaaggtaaggcattggaggaagaagagaaatatgaagatgaagaagagaaagaggaggaagaagaagaggaggaggtggaggatgaggctctgtgggcatggcccagcgagctcagcagcccgggccctgaggcctctctccccactgagccagcagcccaggaggagtcactctcccaggcgccagcaagggcagtcctgcagcctggtgcatcaccacttcctgatggagagtcagaagcttccaggcctccaagggtccatggaccacctactgagactctgcccactcccagggagaggaacctagcatccccatcaccttccactctggttgaggcaagagaggtgggggaggcaactggtggtcctgagctatctggggtccctcgaggagagagcgaggagacaggaagctccgagggtgccccttccctgcttccagccacacgggcccctgagggtaccagggagctggaggccccctctgaagataattctggaagaactgccccagcagggacctcagtgcaggcccagccagtgctgcccactgacagcgccagccgaggtggagtggccgtggtccccgcatcaggtgactgtgtccccagcccctgccacaatggtgggacatgcttggaggaggaggaaggggtccgctgcctatgtctgcctggctatgggggggacctgtgcgatgttggcctccgcttctgcaaccccggctgggacgccttccagggcgcctgctacaagcacttttccacacgaaggagctgggaggaggcagagacccagtgccggatgtacggcgcgcatctggccagcatcagcacacccgaggaacaggacttcatcaacagtgggctgggagacagggcgggaggggcccccgccatatgctctcactctctctcactcgcctaaccgccttcctcattaacccatgcacttattccttggttttctcaagcgtgcattccctcactcattcgttcactccccttctcattctctctcccttcccaccctacgcttaggcagtggccttcgggaacggagagtggaggttcgcgcagtagagtgcgcctgtgtgggccgggccgccgtgcagggggccgcctccaatccctccaacctccctgctctccgacctccgtcggcctcctccaactccaactccaatcttgttgaaagttttgactctttttccaaaactccccttttctagcctggg

SEQ ID NO: 733203 - DNA, 2062 bp, Homo sapiens
  misc_feature (95)..(95): n is a, c, g, or t
  misc_feature (98)..(98): n is a, c, g, or t
  misc_feature (104)..(105): n is a, c, g, or t
  misc_feature (108)..(109): n is a, c, g, or t
  misc_feature (112)..(112): n is a, c, g, or t
  misc_feature (114)..(114): n is a, c, g, or t
  misc_feature (116)..(116): n is a, c, g, or t
tggaggaactgcagctgcctcaggttctctgtcactgtgacgatagcctctagtccatcagaggctgggttggaggctgggttggaggcctcagnganggagannctnngcngngnctcggaagccacagagagtgaatcccgtggggccatctactccatccccatcatggaggacggaggaggtggaagctccactccagaagacccagcagaggcccctaggacgctcctagaatttgaaacacaatccatggtaccgcccacggggttctcagaagaggaaggtaaggcattggaggaagaagagaaatatgaagatgaagaagagaaagaggaggaagaagaagaggaggaggtggaggatgaggctctgtgggcatggcccagcgagctcagcagcccgggccctgaggcctctctccccactgagccagcagcccaggaggagtcactctcccaggcgccagcaagggcagtcctgcagcctggtgcatcaccacttcctgatggagagtcagaagcttccaggcctccaagggtccatggaccacctactgagactctgcccactcccagggagaggaacctagcatccccatcaccttccactctggttgaggcaagagaggtgggggaggcaactggtggtcctgagctatctggggtccctcgaggagagagcgaggagacaggaagctccgagggtgccccttccctgcttccagccacacgggcccctgagggtaccagggagctggaggccccctctgaagataattctggaagaactgccccagcagggacctcagtgcaggcccagccagtgctgcccactgacagcgccagccgaggtggagtggccgtggtccccgcatcaggtgactgtgtccccagcccctgccacaatggtgggacatgcttggaggaggaggaaggggtccgctgcctatgtctgcctggctatgggggggacctgtgcgatgttggcctccgcttctgcaaccccggctgggacgccttccagggcgcctgctacaagcacttttccacacgaaggagctgggaggaggcagagacccagtgccggatgtacggcgcgcatctggccagcatcagcacacccgaggaacaggacttcatcaacaaccggtaccgggagtaccagtggatcggactcaacgacaggaccatcgaaggcgacttcttgtggtcggatggcgtccccctgctctatgagaactggaaccctgggcagcctgacagctacttcctgtctggagagaactgcgtggtcatggtgtggcatgatcagggacaatggagtgacgtgccctgcaactaccacctgtcctacacctgcaagatggggctggtgtcctgtgggccgccaccggagctgcccctggctcaagtgttcggccgcccacggctgcgctatgaggtggacactgtgcttcgctaccggtgccgggaaggactggcccagcgcaatctgccgctgatccgatgccaagagaacggtcgttgggaggccccccagatctcctgtgtgcccagaagacctgcccgagctctgcacccagaggaggacccagaaggacgtcaggggaggctactgggacgctggaaggcgctgttgatccccccttccagccccatgccaggtccctagggggcaaggccttgaacactgccggccacagcactgccctgtcacccaaattttccctcacaccctgcgctcccgccaccacaggaagtgacaacatgacgaggggtggtgctggagtccaggtgacagttcctgaaggggcttctgggaaatacctaggaggctccagcccagcccaggccctctccccctaccctgggcaccagatcttccatcagggccggagtaaatccctaagtgcctcaactgccctctccctggcagccatcttgtcccctctattcctctagggagcactgtgcccactctttctgggttttccaagggaatgggcttgcaggatggagtgtctgtaaaatcaacaggaaataaaactgtgtatgagccc

SEQ ID NO: 733204 - DNA, 2113 bp, Homo sapiens
  misc_feature (95)..(95): n is a, c, g, or t
  misc_feature (98)..(98): n is a, c, g, or t
  misc_feature (104)..(105): n is a, c, g, or t
  misc_feature (108)..(109): n is a, c, g, or t
  misc_feature (112)..(112): n is a, c, g, or t
  misc_feature (114)..(114): n is a, c, g, or t
  misc_feature (116)..(116): n is a, c, g, or t
tggaggaactgcagctgcctcaggttctctgtcactgtgacgatagcctctagtccatcagaggctgggttggaggctgggttggaggcctcagnganggagannctnngcngngnctcggaagccacagagagtgaatcccgtggggccatctactccatccccatcatggaggacggaggaggtggaagctccactccagaagacccagcagaggcccctaggacgctcctagaatttgaaacacaatccatggtaccgcccacggggttctcagaagaggaaggtaaggcattggaggaagaagagaaatatgaagatgaagaagagaaagaggaggaagaagaagaggaggaggtggaggatgaggctctgtgggcatggcccagcgagctcagcagcccgggccctgaggcctctctccccactgagccagcagcccaggaggagtcactctcccaggcgccagcaagggcagtcctgcagcctggtgcatcaccacttcctgatggagagtcagaagcttccaggcctccaagggtccatggaccacctactgagactctgcccactcccagggagaggaacctagcatccccatcaccttccactctggttgaggcaagagaggtgggggaggcaactggtggtcctgagctatctggggtccctcgaggagagagcgaggagacaggaagctccgagggtgccccttccctgcttccagccacacgggcccctgagggtaccagggagctggaggccccctctgaagataattctggaagaactgccccagcagggacctcagtgcaggcccagccagtgctgcccactgacagcgccagccgaggtggagtggccgtggtccccgcatcaggtgactgtgtccccagcccctgccacaatggtgggacatgcttggaggaggaggaaggggtccgctgcctatgtctgcctggctatgggggggacctgtgcgatgttggcctccgcttctgcaaccccggctgggacgccttccagggcgcctgctacaagcacttttccacacgaaggagctgggaggaggcagagacccagtgccggatgtacggcgcgcatctggccagcatcagcacacccgaggaacaggacttcatcaacaaccggtaccgggagtaccagtggatcggactcaacgacaggaccatcgaaggcgacttcttgtggtcggatggcgtccccctgctctatgagaactggaaccctgggcagcctgacagctacttcctgtctggagagaactgcgtggtcatggtgtggcatgatcagggacaatggagtgacgtgccctgcaactaccacctgtcctacacctgcaagatggggctggtgtcctgtgggccgccaccggagctgcccctggctcaagtgttcggccgcccacggctgcgctatgaggtggacactgtgcttcgctaccggtgccgggaaggactggcccagcgcaatctgccgctgatccgatgccaagagaacggtcgttgggaggccccccagatctcctgtgtgcccagaagacctgcccgagctctgcacccagaggaggacccagaaggacgtcaggggaggctactgggacgctggaaggcgctgttgatccccccttccagccccatgccaggtccctagggggcaaggccttgaacactgccggccacagcactgccctgtcacccaaattttccctcacaccctgcgctcccgccaccacaggaagtgacaacatgacgaggggtggtgctggagtccaggtgacagttcctgaaggggcttctgggaaatacctaggaggctccagcccagcccaggccctctccccctaccctgggcaccagatcttccatcagggccggagtaaatccctaagtgcctcaactgccctctccctggcagccatcttgtcccctctattcctctagggagcactgtgcccactctttctgggttttccaagggaatgggcttgcaggatggagtgtctgtaaaatcaacaggaaataaaactgtgtatgagccccaaaaaaaacacaaaacaaaaaaaaaaaaaaaaaaaaaaaacaaaaaaaaa

SEQ ID NO: 733205 - DNA, 2384 bp, Homo sapiens
  misc_feature (95)..(95): n is a, c, g, or t
  misc_feature (98)..(98): n is a, c, g, or t
  misc_feature (104)..(105): n is a, c, g, or t
  misc_feature (108)..(109): n is a, c, g, or t
  misc_feature (112)..(112): n is a, c, g, or t
  misc_feature (114)..(114): n is a, c, g, or t
  misc_feature (116)..(116): n is a, c, g, or t
  misc_feature (2089)..(2089): n is a, c, g, or t
tggaggaactgcagctgcctcaggttctctgtcactgtgacgatagcctctagtccatcagaggctgggttggaggctgggttggaggcctcagnganggagannctnngcngngnctcggaagccacagagagtgaatcccgtggggccatctactccatccccatcatggaggacggaggaggtggaagctccactccagaagacccagcagaggcccctaggacgctcctagaatttgaaacacaatccatggtaccgcccacggggttctcagaagaggaaggtaaggcattggaggaagaagagaaatatgaagatgaagaagagaaagaggaggaagaagaagaggaggaggtggaggatgaggctctgtgggcatggcccagcgagctcagcagcccgggccctgaggcctctctccccactgagccagcagcccaggaggagtcactctcccaggcgccagcaagggcagtcctgcagcctggtgcatcaccacttcctgatggagagtcagaagcttccaggcctccaagggtccatggaccacctactgagactctgcccactcccagggagaggaacctagcatccccatcaccttccactctggttgaggcaagagaggtgggggaggcaactggtggtcctgagctatctggggtccctcgaggagagagcgaggagacaggaagctccgagggtgccccttccctgcttccagccacacgggcccctgagggtaccagggagctggaggccccctctgaagataattctggaagaactgccccagcagggacctcagtgcaggcccagccagtgctgcccactgacagcgccagccgaggtggagtggccgtggtccccgcatcaggtgactgtgtccccagcccctgccacaatggtgggacatgcttggaggaggaggaaggggtccgctgcctatgtctgcctggctatgggggggacctgtgcgatgttggcctccgcttctgcaaccccggctgggacgccttccagggcgcctgctacaagcacttttccacacgaaggagctgggaggaggcagagacccagtgccggatgtacggcgcgcatctggccagcatcagcacacccgaggaacaggacttcatcaacaaccggtaccgggagtaccagtggatcggactcaacgacaggaccatcgaaggcgacttcttgtggtcggatggcgtccccctgctctatgagaactggaaccctgggcagcctgacagctacttcctgtctggagagaactgcgtggtcatggtgtggcatgatcagggacaatggagtgacgtgccctgcaactaccacctgtcctacacctgcaagatggggctggtgtcctgtgggccgccaccggagctgcccctggctcaagtgttcggccgcccacggctgcgctatgaggtggacactgtgcttcgctaccggtgccgggaaggactggcccagcgcaatctgccgctgatccgatgccaagagaacggtcgttgggaggccccccagatctcctgtgtgcccagaagacctgcccgagctctgcacccagaggaggacccagaaggacgtcaggggaggctactgggacgctggaaggcgctgttgatccccccttccagccccatgccaggtccctagggggcaaggccttgaacactgccggccacagcactgccctgtcacccaaattttccctcacaccctgcgctcccgccaccacaggaagtgacaacatgacgaggggtggtgctggagtccaggtgacagttcctgaaggggcttctgggaaatacctaggaggctccagcccagcccaggccctctccccctaccctgggcaccagatcttccatcagggccggagtaaatccctaagtgcctcaactgccctctccctggcagccatcttgtcccctctattcctctagggagcactgtgcccactctttctgggttttccaagggaatgggcttgcaggatggagtgtctgtaaaatcaacaggaaataaaactgtgtatgagcccagaaagaaaaaaaagaaacaacaaaanaaaaccaaaaacaaaaaaagggggcgccccccaaaaaaacaccccccgggggaccccaaagtagcgacccccactttttttgcaaaggggggcccccacaagagggcagcacgattataaaagaccggcgccggccaccgaggcataaaacaccgcggtgtgtgggaacaacgcgtgccagtggaacatctgcgggaggaaccaccactgcgagggcgggaaaaatgggcacgacacacgcgaaaattagcccacgcgaacacaggggacttaacgcacacaggacagaggccgg

SEQ ID NO: 733206 - DNA, 3239 bp, Homo sapiens
  misc_feature (95)..(95): n is a, c, g, or t
  misc_feature (98)..(98): n is a, c, g, or t
  misc_feature (104)..(105): n is a, c, g, or t
  misc_feature (108)..(109): n is a, c, g, or t
  misc_feature (112)..(112): n is a, c, g, or t
  misc_feature (114)..(114): n is a, c, g, or t
  misc_feature (116)..(116): n is a, c, g, or t
tggaggaactgcagctgcctcaggttctctgtcactgtgacgatagcctctagtccatcagaggctgggttggaggctgggttggaggcctcagnganggagannctnngcngngnctcggaagccacagagagtgaatcccgtggggccatctactccatccccatcatggaggacggaggaggtggaagctccactccagaagacccagcagaggcccctaggacgctcctagaatttgaaacacaatccatggtaccgcccacggggttctcagaagaggaaggtaaggcattggaggaagaagagaaatatgaagatgaagaagagaaagaggaggaagaagaagaggaggaggtggaggatgaggctctgtgggcatggcccagcgagctcagcagcccgggccctgaggcctctctccccactgagccagcagcccaggaggagtcactctcccaggcgccagcaagggcagtcctgcagcctggtgcatcaccacttcctgatggagagtcagaagcttccaggcctccaagggtccatggaccacctactgagactctgcccactcccagggagaggaacctagcatccccatcaccttccactctggttgaggcaagagaggtgggggaggcaactggtggtcctgagctatctggggtccctcgaggagagagcgaggagacaggaagctccgagggtgccccttccctgcttccagccacacgggcccctgagggtaccagggagctggaggccccctctgaagataattctggaagaactgccccagcagggacctcagtgcaggcccagccagtgctgcccactgacagcgccagccgaggtggagtggccgtggtccccgcatcaggtgactgtgtccccagcccctgccacaatggtgggacatgcttggaggaggaggaaggggtccgctgcctatgtctgcctggctatgggggggacctgtgcgatgttggtgagtgttgagggacggggggcaggtttgaagcctggaccctgccacaacgtgctacttctggaggggggagggagaacattggttttggccttgtcattaatgagtccctgttttaggcaagttgcataacttctttgagtcctaccctcaattttcttatctaagtgaaaccacaatgcctctcatagggggtccatttgagaccagtgcaaagcatactcctggcatttaatcggtggtcaatacatgacaggctccattctcctggagaggagagccactgctcgttaggatggagacccaggccggaactccatccctcaccctggttcctgtctcttagaaaaggcaccagcgcccctgcccaagagcccctccaggctcctgctaccccctcattctctactagctcttttgcaccgccctcctgtcccccttagtcccgcccctctcggcctgcggtagtggaaggagaccagccccttccaggggacctggccctctgggttttggggccctaagatgcccgcccttatgtgccgcaggcctccgcttctgcaaccccggctgggacgccttccagggcgcctgctacaagcacttttccacacgaaggagctgggaggaggcagagacccagtgccggatgtacggcgcgcatctggccagcatcagcacacccgaggaacaggacttcatcaacagtgggctgggagacagggcgggaggggcccccgccatatgctctcactctctctcactcgcctaaccgccttcctcattaacccatgcacttattccttggttttctcaagcgtgcattccctcactcattcgttcactccccttctcattctctctcccttcccaccctacgcttaggcagtggccttcgggaacggagagtggaggttcgcgcagtagagtgcgcctgtgtgggccgggccgccgtgcagggggccgcctccaatccctccaacctccctgctctccgacctccgtcggcctcctccaactccaactccaatcttgttgaaagttttgactctttttccaaaactccccttttctagcctgggttgatatcttccttattctcccacccccattcccctgctttccatctggcccttgagcagaggctggggtagaagaacccgacaagggcgggtgctggatcgcggggaagggtttccaaggcagtcaccgcagaccgcccgggagcggggaacggccgccatctgctggcggctgcgctcactgcacgccttcgtctccctagaccggtaccgggagtaccagtggatcggactcaacgacaggaccatcgaaggcgacttcttgtggtcggatggcgtccccctgctctatgagaactggaaccctgggcagcctgacagctacttcctgtctggagagaactgcgtggtcatggtgtggcatgatcagggacaatggagtgacgtgccctgcaactaccacctgtcctacacctgcaagatggggctggtgtcctgtgggccgccaccggagctgcccctggctcaagtgttcggccgcccacggctgcgctatgaggtggacactgtgcttcgctaccggtgccgggaaggactggcccagcgcaatctgccgctgatccgatgccaagagaacggtcgttgggaggccccccagatctcctgtgtgcccagaagacctgcccgagctctgcacccagaggaggacccagaaggacgtcaggggaggctactgggacgctggaaggcgctgttgatccccccttccagccccatgccaggtccctagggggcaaggccttgaacactgccggccacagcactgccctgtcacccaaattttccctcacaccctgcgctcccgccaccacaggaagtgacaacatgacgaggggtggtgctggagtccaggtgacagttcctgaaggggcttctgggaaatacctaggaggctccagcccagcccaggccctctccccctaccctgggcaccagatcttccatcagggccggagtaaatccctaagtgcctcaactgccctctccctggcagccatcttgtcccctctattcctctagggagcactgtgcccactctttctgggttttccaagggaatgggcttgcaggatggagtgtctgtaaaatcaacaggaaataaaactgtgtatgagccccaaaaaaaacacaaaacaaaaaaaaaaaaaaaaaaaaaaaacaaaaaaaaa

SEQ ID NO: 733207 - DNA, 3188 bp, Homo sapiens
  misc_feature (95)..(95): n is a, c, g, or t
  misc_feature (98)..(98): n is a, c, g, or t
  misc_feature (104)..(105): n is a, c, g, or t
  misc_feature (108)..(109): n is a, c, g, or t
  misc_feature (112)..(112): n is a, c, g, or t
  misc_feature (114)..(114): n is a, c, g, or t
  misc_feature (116)..(116): n is a, c, g, or t
tggaggaactgcagctgcctcaggttctctgtcactgtgacgatagcctctagtccatcagaggctgggttggaggctgggttggaggcctcagnganggagannctnngcngngnctcggaagccacagagagtgaatcccgtggggccatctactccatccccatcatggaggacggaggaggtggaagctccactccagaagacccagcagaggcccctaggacgctcctagaatttgaaacacaatccatggtaccgcccacggggttctcagaagaggaaggtaaggcattggaggaagaagagaaatatgaagatgaagaagagaaagaggaggaagaagaagaggaggaggtggaggatgaggctctgtgggcatggcccagcgagctcagcagcccgggccctgaggcctctctccccactgagccagcagcccaggaggagtcactctcccaggcgccagcaagggcagtcctgcagcctggtgcatcaccacttcctgatggagagtcagaagcttccaggcctccaagggtccatggaccacctactgagactctgcccactcccagggagaggaacctagcatccccatcaccttccactctggttgaggcaagagaggtgggggaggcaactggtggtcctgagctatctggggtccctcgaggagagagcgaggagacaggaagctccgagggtgccccttccctgcttccagccacacgggcccctgagggtaccagggagctggaggccccctctgaagataattctggaagaactgccccagcagggacctcagtgcaggcccagccagtgctgcccactgacagcgccagccgaggtggagtggccgtggtccccgcatcaggtgactgtgtccccagcccctgccacaatggtgggacatgcttggaggaggaggaaggggtccgctgcctatgtctgcctggctatgggggggacctgtgcgatgttggtgagtgttgagggacggggggcaggtttgaagcctggaccctgccacaacgtgctacttctggaggggggagggagaacattggttttggccttgtcattaatgagtccctgttttaggcaagttgcataacttctttgagtcctaccctcaattttcttatctaagtgaaaccacaatgcctctcatagggggtccatttgagaccagtgcaaagcatactcctggcatttaatcggtggtcaatacatgacaggctccattctcctggagaggagagccactgctcgttaggatggagacccaggccggaactccatccctcaccctggttcctgtctcttagaaaaggcaccagcgcccctgcccaagagcccctccaggctcctgctaccccctcattctctactagctcttttgcaccgccctcctgtcccccttagtcccgcccctctcggcctgcggtagtggaaggagaccagccccttccaggggacctggccctctgggttttggggccctaagatgcccgcccttatgtgccgcaggcctccgcttctgcaaccccggctgggacgccttccagggcgcctgctacaagcacttttccacacgaaggagctgggaggaggcagagacccagtgccggatgtacggcgcgcatctggccagcatcagcacacccgaggaacaggacttcatcaacagtgggctgggagacagggcgggaggggcccccgccatatgctctcactctctctcactcgcctaaccgccttcctcattaacccatgcacttattccttggttttctcaagcgtgcattccctcactcattcgttcactccccttctcattctctctcccttcccaccctacgcttaggcagtggccttcgggaacggagagtggaggttcgcgcagtagagtgcgcctgtgtgggccgggccgccgtgcagggggccgcctccaatccctccaacctccctgctctccgacctccgtcggcctcctccaactccaactccaatcttgttgaaagttttgactctttttccaaaactccccttttctagcctgggttgatatcttccttattctcccacccccattcccctgctttccatctggcccttgagcagaggctggggtagaagaacccgacaagggcgggtgctggatcgcggggaagggtttccaaggcagtcaccgcagaccgcccgggagcggggaacggccgccatctgctggcggctgcgctcactgcacgccttcgtctccctagaccggtaccgggagtaccagtggatcggactcaacgacaggaccatcgaaggcgacttcttgtggtcggatggcgtccccctgctctatgagaactggaaccctgggcagcctgacagctacttcctgtctggagagaactgcgtggtcatggtgtggcatgatcagggacaatggagtgacgtgccctgcaactaccacctgtcctacacctgcaagatggggctggtgtcctgtgggccgccaccggagctgcccctggctcaagtgttcggccgcccacggctgcgctatgaggtggacactgtgcttcgctaccggtgccgggaaggactggcccagcgcaatctgccgctgatccgatgccaagagaacggtcgttgggaggccccccagatctcctgtgtgcccagaagacctgcccgagctctgcacccagaggaggacccagaaggacgtcaggggaggctactgggacgctggaaggcgctgttgatccccccttccagccccatgccaggtccctagggggcaaggccttgaacactgccggccacagcactgccctgtcacccaaattttccctcacaccctgcgctcccgccaccacaggaagtgacaacatgacgaggggtggtgctggagtccaggtgacagttcctgaaggggcttctgggaaatacctaggaggctccagcccagcccaggccctctccccctaccctgggcaccagatcttccatcagggccggagtaaatccctaagtgcctcaactgccctctccctggcagccatcttgtcccctctattcctctagggagcactgtgcccactctttctgggttttccaagggaatgggcttgcaggatggagtgtctgtaaaatcaacaggaaataaaactgtgtatgagccc

SEQ ID NO: 733208 - DNA, 3510 bp, Homo sapiens
  misc_feature (95)..(95): n is a, c, g, or t
  misc_feature (98)..(98): n is a, c, g, or t
  misc_feature (104)..(105): n is a, c, g, or t
  misc_feature (108)..(109): n is a, c, g, or t
  misc_feature (112)..(112): n is a, c, g, or t
  misc_feature (114)..(114): n is a, c, g, or t
  misc_feature (116)..(116): n is a, c, g, or t
  misc_feature (3215)..(3215): n is a, c, g, or t
tggaggaactgcagctgcctcaggttctctgtcactgtgacgatagcctctagtccatcagaggctgggttggaggctgggttggaggcctcagnganggagannctnngcngngnctcggaagccacagagagtgaatcccgtggggccatctactccatccccatcatggaggacggaggaggtggaagctccactccagaagacccagcagaggcccctaggacgctcctagaatttgaaacacaatccatggtaccgcccacggggttctcagaagaggaaggtaaggcattggaggaagaagagaaatatgaagatgaagaagagaaagaggaggaagaagaagaggaggaggtggaggatgaggctctgtgggcatggcccagcgagctcagcagcccgggccctgaggcctctctccccactgagccagcagcccaggaggagtcactctcccaggcgccagcaagggcagtcctgcagcctggtgcatcaccacttcctgatggagagtcagaagcttccaggcctccaagggtccatggaccacctactgagactctgcccactcccagggagaggaacctagcatccccatcaccttccactctggttgaggcaagagaggtgggggaggcaactggtggtcctgagctatctggggtccctcgaggagagagcgaggagacaggaagctccgagggtgccccttccctgcttccagccacacgggcccctgagggtaccagggagctggaggccccctctgaagataattctggaagaactgccccagcagggacctcagtgcaggcccagccagtgctgcccactgacagcgccagccgaggtggagtggccgtggtccccgcatcaggtgactgtgtccccagcccctgccacaatggtgggacatgcttggaggaggaggaaggggtccgctgcctatgtctgcctggctatgggggggacctgtgcgatgttggtgagtgttgagggacggggggcaggtttgaagcctggaccctgccacaacgtgctacttctggaggggggagggagaacattggttttggccttgtcattaatgagtccctgttttaggcaagttgcataacttctttgagtcctaccctcaattttcttatctaagtgaaaccacaatgcctctcatagggggtccatttgagaccagtgcaaagcatactcctggcatttaatcggtggtcaatacatgacaggctccattctcctggagaggagagccactgctcgttaggatggagacccaggccggaactccatccctcaccctggttcctgtctcttagaaaaggcaccagcgcccctgcccaagagcccctccaggctcctgctaccccctcattctctactagctcttttgcaccgccctcctgtcccccttagtcccgcccctctcggcctgcggtagtggaaggagaccagccccttccaggggacctggccctctgggttttggggccctaagatgcccgcccttatgtgccgcaggcctccgcttctgcaaccccggctgggacgccttccagggcgcctgctacaagcacttttccacacgaaggagctgggaggaggcagagacccagtgccggatgtacggcgcgcatctggccagcatcagcacacccgaggaacaggacttcatcaacagtgggctgggagacagggcgggaggggcccccgccatatgctctcactctctctcactcgcctaaccgccttcctcattaacccatgcacttattccttggttttctcaagcgtgcattccctcactcattcgttcactccccttctcattctctctcccttcccaccctacgcttaggcagtggccttcgggaacggagagtggaggttcgcgcagtagagtgcgcctgtgtgggccgggccgccgtgcagggggccgcctccaatccctccaacctccctgctctccgacctccgtcggcctcctccaactccaactccaatcttgttgaaagttttgactctttttccaaaactccccttttctagcctgggttgatatcttccttattctcccacccccattcccctgctttccatctggcccttgagcagaggctggggtagaagaacccgacaagggcgggtgctggatcgcggggaagggtttccaaggcagtcaccgcagaccgcccgggagcggggaacggccgccatctgctggcggctgcgctcactgcacgccttcgtctccctagaccggtaccgggagtaccagtggatcggactcaacgacaggaccatcgaaggcgacttcttgtggtcggatggcgtccccctgctctatgagaactggaaccctgggcagcctgacagctacttcctgtctggagagaactgcgtggtcatggtgtggcatgatcagggacaatggagtgacgtgccctgcaactaccacctgtcctacacctgcaagatggggctggtgtcctgtgggccgccaccggagctgcccctggctcaagtgttcggccgcccacggctgcgctatgaggtggacactgtgcttcgctaccggtgccgggaaggactggcccagcgcaatctgccgctgatccgatgccaagagaacggtcgttgggaggccccccagatctcctgtgtgcccagaagacctgcccgagctctgcacccagaggaggacccagaaggacgtcaggggaggctactgggacgctggaaggcgctgttgatccccccttccagccccatgccaggtccctagggggcaaggccttgaacactgccggccacagcactgccctgtcacccaaattttccctcacaccctgcgctcccgccaccacaggaagtgacaacatgacgaggggtggtgctggagtccaggtgacagttcctgaaggggcttctgggaaatacctaggaggctccagcccagcccaggccctctccccctaccctgggcaccagatcttccatcagggccggagtaaatccctaagtgcctcaactgccctctccctggcagccatcttgtcccctctattcctctagggagcactgtgcccactctttctgggttttccaagggaatgggcttgcaggatggagtgtctgtaaaatcaacaggaaataaaactgtgtatgagcccagaaagaaaaaaaagaaacaacaaaanaaaaccaaaaacaaaaaaagggggcgccccccaaaaaaacaccccccgggggaccccaaagtagcgacccccactttttttgcaaaggggggcccccacaagagggcagcacgattataaaagaccggcgccggccaccgaggcataaaacaccgcggtgtgtgggaacaacgcgtgccagtggaacatctgcgggaggaaccaccactgcgagggcgggaaaaatgggcacgacacacgcgaaaattagcccacgcgaacacaggggacttaacgcacacaggacagaggccgg

SEQ ID NO: 733209 - DNA, 1459 bp, Homo sapiens
  misc_feature (95)..(95): n is a, c, g, or t
  misc_feature (98)..(98): n is a, c, g, or t
  misc_feature (104)..(105): n is a, c, g, or t
  misc_feature (108)..(109): n is a, c, g, or t
  misc_feature (112)..(112): n is a, c, g, or t
  misc_feature (114)..(114): n is a, c, g, or t
  misc_feature (116)..(116): n is a, c, g, or t
tggaggaactgcagctgcctcaggttctctgtcactgtgacgatagcctctagtccatcagaggctgggttggaggctgggttggaggcctcagnganggagannctnngcngngnctcggaagccacagagagtgaatcccgtggggccatctactccatccccatcatggaggacggaggaggtggaagctccactccagaagacccagcagaggcccctaggacgctcctagaatttgaaacacaatccatggtaccgcccacggggttctcagaagaggaaggtaaggcattggaggaagaagagaaatatgaagatgaagaagagaaagaggaggaagaagaagaggaggaggtggaggatgaggctctgtgggcatggcccagcgagctcagcagcccgggccctgaggcctctctccccactgagccagcagcccaggaggagtcactctcccaggcgccagcaagggcagtcctgcagcctggtgcatcaccacttcctgatggagagtcagaagcttccaggcctccaagggtccatggaccacctactgagactctgcccactcccagggagaggaacctagcatccccatcaccttccactctggttgaggcaagagaggtgggggaggcaactggtggtcctgagctatctggggtccctcgaggagagagcgaggagacaggaagctccgagggtgccccttccctgcttccagccacacgggcccctgagggtaccagggagctggaggccccctctgaagataattctggaagaactgccccagcagggacctcagtgcaggcccagccagtgctgcccactgacagcgccagccgaggtggagtggccgtggtccccgcatcaggtaattctgcccaaggctcaactgccctctctatcctactccttttcttccccctgcagctctgggtcacctgacctgtagtcctttaacccaccatcatcccaaactctcctgtcctttgccttcattctcttacccacctctacctatgggtctccaatctcggatatccaccttgtgggtatctcagctctccgcgtctttaccctgtgatcccagccccgccactgaccatctgtgacccttccctgccattgggccctccacctgtggctcacatctcgccagccccacagagcatcctcaggcctctccaagggtcctcatcacctattgcagccttcagggctcggcctattttccactactcccttcatccgcctgtgtgccgtcccctttagctgcctcctattgatctcagggaagcctgggagtcccttctcacccctcaacctccggagtccaggagaacccgtacccccacagagccttaagcaactacttctgtgaagtattttttgactgtttcatggaaaacaagccttggaaataaatctctattaaaccgctttgtaacca

SEQ ID NO: 733210 - DNA, 4264 bp, Homo sapiens
gccctaaggccctgcttatattgtgtaggctcatgttgctcctcatgaagccgttaagggggtagcagagagcttccctcctgctatagccaaagctctggcttcttgtgcctccctgctgaccctgctgagtgctggagctcagttcctatgggacagaccttggttgccggctgatgggcattcagcatggaggtggtgggtgttgttagatgtgtgtacacacgtgcatgcctacacacacaacacacacacacagagagagagagagagagagagagagagagagagagacctggtcttaactctctgggttgggtctatgaagactgtgagggagatggacatcccgggtcagacagaaatgatgtgacaagaggaaagtttcctgaacagctcaagaaattcaaaacaagggcagagatacagacgctggagctgaaacagagagggggatgttgtggcgtcaagggaacggaccgcatgactgctgagctctcagggttagagttggaggaagtagaggagagggtgggctcaggagaagctgtgcttacttgcgttcggtctaggaggccctcctggaaaaggccaggtgagtatggtgtccctggaggcagggacagtctagaaggcagaagaggctaaagagatactatgggagaaggctctgggttcgaggaaggagtctggcactgggaggagcagatggaattctgagtataagagcacccaccattcatgctgtaaactgagctcctactgtctgcctggtgctatgcatttgtacaggagttttaagatactaaacactctcaaagcacatggtcctatctcaactcatgagatagtaatgatgatgcttttttataagtaagaaaataaaggctcagagaaggtaaggagcttggcttaggtcacacagtgagttgactaggactcgggttttggttctgagaagaaatcacttgctgggaagatggggatcagaaacagagagtccatggtgatgtgaaggtaggggacttctggagccaggatatgtgtgaacccacatgggtgtggtagggagcaggggggaagtccatcctgaagtctaaccccatctttccttctcatgtccctctgtcagcctgcagcatggcccagctgttcctgcccctgctggcagccctggtcctggcccaggctcctgcagctttagcagatgttctggaaggagacagctcagaggaccgcgcttttcgcgtgcgcatcgcgggcgacgcgccactgcagggcgtgctcggcggcgccctcaccatcccttgccacgtccactacctgcggccaccgccgagccgccgggctgtgctgggctctccgcgggtcaagtggactttcctgtcccggggccgggaggcagaggtgctggtggcgcggggagtgcgcgtcaaggtgaacgaggcctaccggttccgcgtggcactgcctgcgtacccagcgtcgctcaccgacgtctccctggcgctgagcgagctgcgccccaacgactcaggtatctatcgctgtgaggtccagcacggcatcgatgacagcagcgacgctgtggaggtcaaggtcaaaggggtcgtctttctctaccgagagggctctgcccgctatgctttctccttttctggggcccaggaggcctgtgcccgcattggagcccacatcgccaccccggagcagctctatgccgcctaccttgggggctatgagcaatgtgatgctggctggctgtcggatcagaccgtgaggtatcccatccagaccccacgagaggcctgttacggagacatggatggcttccccggggtccggaactatggtgtggtggacccggatgacctctatgatgtgtactgttatgctgaagacctaaatggagaactgttcctgggtgaccctccagagaagctgacattggaggaagcacgggcgtactgccaggagcggggtgcagagattgccaccacgggccaactgtatgcagcctgggatggtggcctggaccactgcagcccagggtggctagctgatggcagtgtgcgctaccccatcgtcacacccagccagcgctgtggtgggggcttgcctggtgtcaagactctcttcctcttccccaaccagactggcttccccaataagcacagccgcttcaacgtctactgcttccgagactcggcccagccttctgccatccctgaggcctccaacccagcctccaacccagcctctgatggactagaggctatcgtcacagtgacagagaccctggaggaactgcagctgcctcaggaagccacagagagtgaatcccgtggggccatctactccatccccatcatggaggacggaggaggtggaagctccactccagaagacccagcagaggcccctaggacgctcctagaatttgaaacacaatccatggtaccgcccacggggttctcagaagaggaaggtaaggcattggaggaagaagagaaatatgaagatgaagaagagaaagaggaggaagaagaagaggaggaggtggaggatgaggctctgtgggcatggcccagcgagctcagcagcccgggccctgaggcctctctccccactgagccagcagcccaggaggagtcactctcccaggcgccagcaagggcagtcctgcagcctggtgcatcaccacttcctgatggagagtcagaagcttccaggcctccaagggtccatggaccacctactgagactctgcccactcccagggagaggaacctagcatccccatcaccttccactctggttgaggcaagagaggtgggggaggcaactggtggtcctgagctatctggggtccctcgaggagagagcgaggagacaggaagctccgagggtgccccttccctgcttccagccacacgggcccctgagggtaccagggagctggaggccccctctgaagataattctggaagaactgccccagcagggacctcagtgcaggcccagccagtgctgcccactgacagcgccagccgaggtggagtggccgtggtccccgcatcaggtgactgtgtccccagcccctgccacaatggtgggacatgcttggaggaggaggaaggggtccgctgcctatgtctgcctggctatgggggggacctgtgcgatgttggcctccgcttctgcaaccccggctgggacgccttccagggcgcctgctacaagcacttttccacacgaaggagctgggaggaggcagagacccagtgccggatgtacggcgcgcatctggccagcatcagcacacccgaggaacaggacttcatcaacaaccggtaccgggagtaccagtggatcggactcaacgacaggaccatcgaaggcgacttcttgtggtcggatggcgtccccctgctctatgagaactggaaccctgggcagcctgacagctacttcctgtctggagagaactgcgtggtcatggtgtggcatgatcagggacaatggagtgacgtgccctgcaactaccacctgtcctacacctgcaagatggggctggtgtcctgtgggccgccaccggagctgcccctggctcaagtgttcggccgcccacggctgcgctatgaggtggacactgtgcttcgctaccggtgccgggaaggactggcccagcgcaatctgccgctgatccgatgccaagagaacggtcgttgggaggccccccagatctcctgtgtgcccagaagacctgcccgagctctgcacccagaggaggacccagaaggacgtcaggggaggctactgggacgctggaaggcgctgttgatccccccttccagccccatgccaggtccctagggggcaaggccttgaacactgccggccacagcactgccctgtcacccaaattttccctcacaccctgcgctcccgccaccacaggaagtgacaacatgacgaggggtggtgctggagtccaggtgacagttcctgaaggggcttctgggaaatacctaggaggctccagcccagcccaggccctctccccctaccctgggcaccagatcttccatcagggccggagtaaatccctaagtgcctcaactgccctctccctggcagccatcttgtcccctctattcctctagggagcactgtgcccactctttctgggttttccaagggaatgggcttgcaggatggagtgtctgtaaaatcaacaggaaataaaactgtgtatgagccc

SEQ ID NO: 733211 - DNA, 4315 bp, Homo sapiens
gccctaaggccctgcttatattgtgtaggctcatgttgctcctcatgaagccgttaagggggtagcagagagcttccctcctgctatagccaaagctctggcttcttgtgcctccctgctgaccctgctgagtgctggagctcagttcctatgggacagaccttggttgccggctgatgggcattcagcatggaggtggtgggtgttgttagatgtgtgtacacacgtgcatgcctacacacacaacacacacacacagagagagagagagagagagagagagagagagagagacctggtcttaactctctgggttgggtctatgaagactgtgagggagatggacatcccgggtcagacagaaatgatgtgacaagaggaaagtttcctgaacagctcaagaaattcaaaacaagggcagagatacagacgctggagctgaaacagagagggggatgttgtggcgtcaagggaacggaccgcatgactgctgagctctcagggttagagttggaggaagtagaggagagggtgggctcaggagaagctgtgcttacttgcgttcggtctaggaggccctcctggaaaaggccaggtgagtatggtgtccctggaggcagggacagtctagaaggcagaagaggctaaagagatactatgggagaaggctctgggttcgaggaaggagtctggcactgggaggagcagatggaattctgagtataagagcacccaccattcatgctgtaaactgagctcctactgtctgcctggtgctatgcatttgtacaggagttttaagatactaaacactctcaaagcacatggtcctatctcaactcatgagatagtaatgatgatgcttttttataagtaagaaaataaaggctcagagaaggtaaggagcttggcttaggtcacacagtgagttgactaggactcgggttttggttctgagaagaaatcacttgctgggaagatggggatcagaaacagagagtccatggtgatgtgaaggtaggggacttctggagccaggatatgtgtgaacccacatgggtgtggtagggagcaggggggaagtccatcctgaagtctaaccccatctttccttctcatgtccctctgtcagcctgcagcatggcccagctgttcctgcccctgctggcagccctggtcctggcccaggctcctgcagctttagcagatgttctggaaggagacagctcagaggaccgcgcttttcgcgtgcgcatcgcgggcgacgcgccactgcagggcgtgctcggcggcgccctcaccatcccttgccacgtccactacctgcggccaccgccgagccgccgggctgtgctgggctctccgcgggtcaagtggactttcctgtcccggggccgggaggcagaggtgctggtggcgcggggagtgcgcgtcaaggtgaacgaggcctaccggttccgcgtggcactgcctgcgtacccagcgtcgctcaccgacgtctccctggcgctgagcgagctgcgccccaacgactcaggtatctatcgctgtgaggtccagcacggcatcgatgacagcagcgacgctgtggaggtcaaggtcaaaggggtcgtctttctctaccgagagggctctgcccgctatgctttctccttttctggggcccaggaggcctgtgcccgcattggagcccacatcgccaccccggagcagctctatgccgcctaccttgggggctatgagcaatgtgatgctggctggctgtcggatcagaccgtgaggtatcccatccagaccccacgagaggcctgttacggagacatggatggcttccccggggtccggaactatggtgtggtggacccggatgacctctatgatgtgtactgttatgctgaagacctaaatggagaactgttcctgggtgaccctccagagaagctgacattggaggaagcacgggcgtactgccaggagcggggtgcagagattgccaccacgggccaactgtatgcagcctgggatggtggcctggaccactgcagcccagggtggctagctgatggcagtgtgcgctaccccatcgtcacacccagccagcgctgtggtgggggcttgcctggtgtcaagactctcttcctcttccccaaccagactggcttccccaataagcacagccgcttcaacgtctactgcttccgagactcggcccagccttctgccatccctgaggcctccaacccagcctccaacccagcctctgatggactagaggctatcgtcacagtgacagagaccctggaggaactgcagctgcctcaggaagccacagagagtgaatcccgtggggccatctactccatccccatcatggaggacggaggaggtggaagctccactccagaagacccagcagaggcccctaggacgctcctagaatttgaaacacaatccatggtaccgcccacggggttctcagaagaggaaggtaaggcattggaggaagaagagaaatatgaagatgaagaagagaaagaggaggaagaagaagaggaggaggtggaggatgaggctctgtgggcatggcccagcgagctcagcagcccgggccctgaggcctctctccccactgagccagcagcccaggaggagtcactctcccaggcgccagcaagggcagtcctgcagcctggtgcatcaccacttcctgatggagagtcagaagcttccaggcctccaagggtccatggaccacctactgagactctgcccactcccagggagaggaacctagcatccccatcaccttccactctggttgaggcaagagaggtgggggaggcaactggtggtcctgagctatctggggtccctcgaggagagagcgaggagacaggaagctccgagggtgccccttccctgcttccagccacacgggcccctgagggtaccagggagctggaggccccctctgaagataattctggaagaactgccccagcagggacctcagtgcaggcccagccagtgctgcccactgacagcgccagccgaggtggagtggccgtggtccccgcatcaggtgactgtgtccccagcccctgccacaatggtgggacatgcttggaggaggaggaaggggtccgctgcctatgtctgcctggctatgggggggacctgtgcgatgttggcctccgcttctgcaaccccggctgggacgccttccagggcgcctgctacaagcacttttccacacgaaggagctgggaggaggcagagacccagtgccggatgtacggcgcgcatctggccagcatcagcacacccgaggaacaggacttcatcaacaaccggtaccgggagtaccagtggatcggactcaacgacaggaccatcgaaggcgacttcttgtggtcggatggcgtccccctgctctatgagaactggaaccctgggcagcctgacagctacttcctgtctggagagaactgcgtggtcatggtgtggcatgatcagggacaatggagtgacgtgccctgcaactaccacctgtcctacacctgcaagatggggctggtgtcctgtgggccgccaccggagctgcccctggctcaagtgttcggccgcccacggctgcgctatgaggtggacactgtgcttcgctaccggtgccgggaaggactggcccagcgcaatctgccgctgatccgatgccaagagaacggtcgttgggaggccccccagatctcctgtgtgcccagaagacctgcccgagctctgcacccagaggaggacccagaaggacgtcaggggaggctactgggacgctggaaggcgctgttgatccccccttccagccccatgccaggtccctagggggcaaggccttgaacactgccggccacagcactgccctgtcacccaaattttccctcacaccctgcgctcccgccaccacaggaagtgacaacatgacgaggggtggtgctggagtccaggtgacagttcctgaaggggcttctgggaaatacctaggaggctccagcccagcccaggccctctccccctaccctgggcaccagatcttccatcagggccggagtaaatccctaagtgcctcaactgccctctccctggcagccatcttgtcccctctattcctctagggagcactgtgcccactctttctgggttttccaagggaatgggcttgcaggatggagtgtctgtaaaatcaacaggaaataaaactgtgtatgagccccaaaaaaaacacaaaacaaaaaaaaaaaaaaaaaaaaaaaacaaaaaaaaa

SEQ ID NO: 733212 - DNA, 4586 bp, Homo sapiens
  misc_feature (4291)..(4291): n is a, c, g, or t
gccctaaggccctgcttatattgtgtaggctcatgttgctcctcatgaagccgttaagggggtagcagagagcttccctcctgctatagccaaagctctggcttcttgtgcctccctgctgaccctgctgagtgctggagctcagttcctatgggacagaccttggttgccggctgatgggcattcagcatggaggtggtgggtgttgttagatgtgtgtacacacgtgcatgcctacacacacaacacacacacacagagagagagagagagagagagagagagagagagagacctggtcttaactctctgggttgggtctatgaagactgtgagggagatggacatcccgggtcagacagaaatgatgtgacaagaggaaagtttcctgaacagctcaagaaattcaaaacaagggcagagatacagacgctggagctgaaacagagagggggatgttgtggcgtcaagggaacggaccgcatgactgctgagctctcagggttagagttggaggaagtagaggagagggtgggctcaggagaagctgtgcttacttgcgttcggtctaggaggccctcctggaaaaggccaggtgagtatggtgtccctggaggcagggacagtctagaaggcagaagaggctaaagagatactatgggagaaggctctgggttcgaggaaggagtctggcactgggaggagcagatggaattctgagtataagagcacccaccattcatgctgtaaactgagctcctactgtctgcctggtgctatgcatttgtacaggagttttaagatactaaacactctcaaagcacatggtcctatctcaactcatgagatagtaatgatgatgcttttttataagtaagaaaataaaggctcagagaaggtaaggagcttggcttaggtcacacagtgagttgactaggactcgggttttggttctgagaagaaatcacttgctgggaagatggggatcagaaacagagagtccatggtgatgtgaaggtaggggacttctggagccaggatatgtgtgaacccacatgggtgtggtagggagcaggggggaagtccatcctgaagtctaaccccatctttccttctcatgtccctctgtcagcctgcagcatggcccagctgttcctgcccctgctggcagccctggtcctggcccaggctcctgcagctttagcagatgttctggaaggagacagctcagaggaccgcgcttttcgcgtgcgcatcgcgggcgacgcgccactgcagggcgtgctcggcggcgccctcaccatcccttgccacgtccactacctgcggccaccgccgagccgccgggctgtgctgggctctccgcgggtcaagtggactttcctgtcccggggccgggaggcagaggtgctggtggcgcggggagtgcgcgtcaaggtgaacgaggcctaccggttccgcgtggcactgcctgcgtacccagcgtcgctcaccgacgtctccctggcgctgagcgagctgcgccccaacgactcaggtatctatcgctgtgaggtccagcacggcatcgatgacagcagcgacgctgtggaggtcaaggtcaaaggggtcgtctttctctaccgagagggctctgcccgctatgctttctccttttctggggcccaggaggcctgtgcccgcattggagcccacatcgccaccccggagcagctctatgccgcctaccttgggggctatgagcaatgtgatgctggctggctgtcggatcagaccgtgaggtatcccatccagaccccacgagaggcctgttacggagacatggatggcttccccggggtccggaactatggtgtggtggacccggatgacctctatgatgtgtactgttatgctgaagacctaaatggagaactgttcctgggtgaccctccagagaagctgacattggaggaagcacgggcgtactgccaggagcggggtgcagagattgccaccacgggccaactgtatgcagcctgggatggtggcctggaccactgcagcccagggtggctagctgatggcagtgtgcgctaccccatcgtcacacccagccagcgctgtggtgggggcttgcctggtgtcaagactctcttcctcttccccaaccagactggcttccccaataagcacagccgcttcaacgtctactgcttccgagactcggcccagccttctgccatccctgaggcctccaacccagcctccaacccagcctctgatggactagaggctatcgtcacagtgacagagaccctggaggaactgcagctgcctcaggaagccacagagagtgaatcccgtggggccatctactccatccccatcatggaggacggaggaggtggaagctccactccagaagacccagcagaggcccctaggacgctcctagaatttgaaacacaatccatggtaccgcccacggggttctcagaagaggaaggtaaggcattggaggaagaagagaaatatgaagatgaagaagagaaagaggaggaagaagaagaggaggaggtggaggatgaggctctgtgggcatggcccagcgagctcagcagcccgggccctgaggcctctctccccactgagccagcagcccaggaggagtcactctcccaggcgccagcaagggcagtcctgcagcctggtgcatcaccacttcctgatggagagtcagaagcttccaggcctccaagggtccatggaccacctactgagactctgcccactcccagggagaggaacctagcatccccatcaccttccactctggttgaggcaagagaggtgggggaggcaactggtggtcctgagctatctggggtccctcgaggagagagcgaggagacaggaagctccgagggtgccccttccctgcttccagccacacgggcccctgagggtaccagggagctggaggccccctctgaagataattctggaagaactgccccagcagggacctcagtgcaggcccagccagtgctgcccactgacagcgccagccgaggtggagtggccgtggtccccgcatcaggtgactgtgtccccagcccctgccacaatggtgggacatgcttggaggaggaggaaggggtccgctgcctatgtctgcctggctatgggggggacctgtgcgatgttggcctccgcttctgcaaccccggctgggacgccttccagggcgcctgctacaagcacttttccacacgaaggagctgggaggaggcagagacccagtgccggatgtacggcgcgcatctggccagcatcagcacacccgaggaacaggacttcatcaacaaccggtaccgggagtaccagtggatcggactcaacgacaggaccatcgaaggcgacttcttgtggtcggatggcgtccccctgctctatgagaactggaaccctgggcagcctgacagctacttcctgtctggagagaactgcgtggtcatggtgtggcatgatcagggacaatggagtgacgtgccctgcaactaccacctgtcctacacctgcaagatggggctggtgtcctgtgggccgccaccggagctgcccctggctcaagtgttcggccgcccacggctgcgctatgaggtggacactgtgcttcgctaccggtgccgggaaggactggcccagcgcaatctgccgctgatccgatgccaagagaacggtcgttgggaggccccccagatctcctgtgtgcccagaagacctgcccgagctctgcacccagaggaggacccagaaggacgtcaggggaggctactgggacgctggaaggcgctgttgatccccccttccagccccatgccaggtccctagggggcaaggccttgaacactgccggccacagcactgccctgtcacccaaattttccctcacaccctgcgctcccgccaccacaggaagtgacaacatgacgaggggtggtgctggagtccaggtgacagttcctgaaggggcttctgggaaatacctaggaggctccagcccagcccaggccctctccccctaccctgggcaccagatcttccatcagggccggagtaaatccctaagtgcctcaactgccctctccctggcagccatcttgtcccctctattcctctagggagcactgtgcccactctttctgggttttccaagggaatgggcttgcaggatggagtgtctgtaaaatcaacaggaaataaaactgtgtatgagcccagaaagaaaaaaaagaaacaacaaaanaaaaccaaaaacaaaaaaagggggcgccccccaaaaaaacaccccccgggggaccccaaagtagcgacccccactttttttgcaaaggggggcccccacaagagggcagcacgattataaaagaccggcgccggccaccgaggcataaaacaccgcggtgtgtgggaacaacgcgtgccagtggaacatctgcgggaggaaccaccactgcgagggcgggaaaaatgggcacgacacacgcgaaaattagcccacgcgaacacaggggacttaacgcacacaggacagaggccgg

SEQ ID NO: 733213 - DNA, 3724 bp, Homo sapiens
gccctaaggccctgcttatattgtgtaggctcatgttgctcctcatgaagccgttaagggggtagcagagagcttccctcctgctatagccaaagctctggcttcttgtgcctccctgctgaccctgctgagtgctggagctcagttcctatgggacagaccttggttgccggctgatgggcattcagcatggaggtggtgggtgttgttagatgtgtgtacacacgtgcatgcctacacacacaacacacacacacagagagagagagagagagagagagagagagagagagacctggtcttaactctctgggttgggtctatgaagactgtgagggagatggacatcccgggtcagacagaaatgatgtgacaagaggaaagtttcctgaacagctcaagaaattcaaaacaagggcagagatacagacgctggagctgaaacagagagggggatgttgtggcgtcaagggaacggaccgcatgactgctgagctctcagggttagagttggaggaagtagaggagagggtgggctcaggagaagctgtgcttacttgcgttcggtctaggaggccctcctggaaaaggccaggtgagtatggtgtccctggaggcagggacagtctagaaggcagaagaggctaaagagatactatgggagaaggctctgggttcgaggaaggagtctggcactgggaggagcagatggaattctgagtataagagcacccaccattcatgctgtaaactgagctcctactgtctgcctggtgctatgcatttgtacaggagttttaagatactaaacactctcaaagcacatggtcctatctcaactcatgagatagtaatgatgatgcttttttataagtaagaaaataaaggctcagagaaggtaaggagcttggcttaggtcacacagtgagttgactaggactcgggttttggttctgagaagaaatcacttgctgggaagatggggatcagaaacagagagtccatggtgatgtgaaggtaggggacttctggagccaggatatgtgtgaacccacatgggtgtggtagggagcaggggggaagtccatcctgaagtctaaccccatctttccttctcatgtccctctgtcagcctgcagcatggcccagctgttcctgcccctgctggcagccctggtcctggcccaggctcctgcagctttagcagatgttctggaaggagacagctcagaggaccgcgcttttcgcgtgcgcatcgcgggcgacgcgccactgcagggcgtgctcggcggcgccctcaccatcccttgccacgtccactacctgcggccaccgccgagccgccgggctgtgctgggctctccgcgggtcaagtggactttcctgtcccggggccgggaggcagaggtgctggtggcgcggggagtgcgcgtcaaggtgaacgaggcctaccggttccgcgtggcactgcctgcgtacccagcgtcgctcaccgacgtctccctggcgctgagcgagctgcgccccaacgactcaggtatctatcgctgtgaggtccagcacggcatcgatgacagcagcgacgctgtggaggtcaaggtcaaaggggtcgtctttctctaccgagagggctctgcccgctatgctttctccttttctggggcccaggaggcctgtgcccgcattggagcccacatcgccaccccggagcagctctatgccgcctaccttgggggctatgagcaatgtgatgctggctggctgtcggatcagaccgtgaggtatcccatccagaccccacgagaggcctgttacggagacatggatggcttccccggggtccggaactatggtgtggtggacccggatgacctctatgatgtgtactgttatgctgaagacctaaatggagaactgttcctgggtgaccctccagagaagctgacattggaggaagcacgggcgtactgccaggagcggggtgcagagattgccaccacgggccaactgtatgcagcctgggatggtggcctggaccactgcagcccagggtggctagctgatggcagtgtgcgctaccccatcgtcacacccagccagcgctgtggtgggggcttgcctggtgtcaagactctcttcctcttccccaaccagactggcttccccaataagcacagccgcttcaacgtctactgcttccgagactcggcccagccttctgccatccctgaggcctccaacccagcctccaacccagcctctgatggactagaggctatcgtcacagtgacagagaccctggaggaactgcagctgcctcaggaagccacagagagtgaatcccgtggggccatctactccatccccatcatggaggacggaggaggtggaagctccactccagaagacccagcagaggcccctaggacgctcctagaatttgaaacacaatccatggtaccgcccacggggttctcagaagaggaaggtaaggcattggaggaagaagagaaatatgaagatgaagaagagaaagaggaggaagaagaagaggaggaggtggaggatgaggctctgtgggcatggcccagcgagctcagcagcccgggccctgaggcctctctccccactgagccagcagcccaggaggagtcactctcccaggcgccagcaagggcagtcctgcagcctggtgcatcaccacttcctgatggagagtcagaagcttccaggcctccaagggtccatggaccacctactgagactctgcccactcccagggagaggaacctagcatccccatcaccttccactctggttgaggcaagagaggtgggggaggcaactggtggtcctgagctatctggggtccctcgaggagagagcgaggagacaggaagctccgagggtgccccttccctgcttccagccacacgggcccctgagggtaccagggagctggaggccccctctgaagataattctggaagaactgccccagcagggacctcagtgcaggcccagccagtgctgcccactgacagcgccagccgaggtggagtggccgtggtccccgcatcaggtgactgtgtccccagcccctgccacaatggtgggacatgcttggaggaggaggaaggggtccgctgcctatgtctgcctggctatgggggggacctgtgcgatgttggcctccgcttctgcaaccccggctgggacgccttccagggcgcctgctacaagcacttttccacacgaaggagctgggaggaggcagagacccagtgccggatgtacggcgcgcatctggccagcatcagcacacccgaggaacaggacttcatcaacagtgggctgggagacagggcgggaggggcccccgccatatgctctcactctctctcactcgcctaaccgccttcctcattaacccatgcacttattccttggttttctcaagcgtgcattccctcactcattcgttcactccccttctcattctctctcccttcccaccctacgcttaggcagtggccttcgggaacggagagtggaggttcgcgcagtagagtgcgcctgtgtgggccgggccgccgtgcagggggccgcctccaatccctccaacctccctgctctccgacctccgtcggcctcctccaactccaactccaatcttgttgaaagttttgactctttttccaaaactccccttttctagcctggg

SEQ ID NO: 733214 - DNA, 5441 bp, Homo sapiens
gccctaaggccctgcttatattgtgtaggctcatgttgctcctcatgaagccgttaagggggtagcagagagcttccctcctgctatagccaaagctctggcttcttgtgcctccctgctgaccctgctgagtgctggagctcagttcctatgggacagaccttggttgccggctgatgggcattcagcatggaggtggtgggtgttgttagatgtgtgtacacacgtgcatgcctacacacacaacacacacacacagagagagagagagagagagagagagagagagagagacctggtcttaactctctgggttgggtctatgaagactgtgagggagatggacatcccgggtcagacagaaatgatgtgacaagaggaaagtttcctgaacagctcaagaaattcaaaacaagggcagagatacagacgctggagctgaaacagagagggggatgttgtggcgtcaagggaacggaccgcatgactgctgagctctcagggttagagttggaggaagtagaggagagggtgggctcaggagaagctgtgcttacttgcgttcggtctaggaggccctcctggaaaaggccaggtgagtatggtgtccctggaggcagggacagtctagaaggcagaagaggctaaagagatactatgggagaaggctctgggttcgaggaaggagtctggcactgggaggagcagatggaattctgagtataagagcacccaccattcatgctgtaaactgagctcctactgtctgcctggtgctatgcatttgtacaggagttttaagatactaaacactctcaaagcacatggtcctatctcaactcatgagatagtaatgatgatgcttttttataagtaagaaaataaaggctcagagaaggtaaggagcttggcttaggtcacacagtgagttgactaggactcgggttttggttctgagaagaaatcacttgctgggaagatggggatcagaaacagagagtccatggtgatgtgaaggtaggggacttctggagccaggatatgtgtgaacccacatgggtgtggtagggagcaggggggaagtccatcctgaagtctaaccccatctttccttctcatgtccctctgtcagcctgcagcatggcccagctgttcctgcccctgctggcagccctggtcctggcccaggctcctgcagctttagcagatgttctggaaggagacagctcagaggaccgcgcttttcgcgtgcgcatcgcgggcgacgcgccactgcagggcgtgctcggcggcgccctcaccatcccttgccacgtccactacctgcggccaccgccgagccgccgggctgtgctgggctctccgcgggtcaagtggactttcctgtcccggggccgggaggcagaggtgctggtggcgcggggagtgcgcgtcaaggtgaacgaggcctaccggttccgcgtggcactgcctgcgtacccagcgtcgctcaccgacgtctccctggcgctgagcgagctgcgccccaacgactcaggtatctatcgctgtgaggtccagcacggcatcgatgacagcagcgacgctgtggaggtcaaggtcaaaggggtcgtctttctctaccgagagggctctgcccgctatgctttctccttttctggggcccaggaggcctgtgcccgcattggagcccacatcgccaccccggagcagctctatgccgcctaccttgggggctatgagcaatgtgatgctggctggctgtcggatcagaccgtgaggtatcccatccagaccccacgagaggcctgttacggagacatggatggcttccccggggtccggaactatggtgtggtggacccggatgacctctatgatgtgtactgttatgctgaagacctaaatggagaactgttcctgggtgaccctccagagaagctgacattggaggaagcacgggcgtactgccaggagcggggtgcagagattgccaccacgggccaactgtatgcagcctgggatggtggcctggaccactgcagcccagggtggctagctgatggcagtgtgcgctaccccatcgtcacacccagccagcgctgtggtgggggcttgcctggtgtcaagactctcttcctcttccccaaccagactggcttccccaataagcacagccgcttcaacgtctactgcttccgagactcggcccagccttctgccatccctgaggcctccaacccagcctccaacccagcctctgatggactagaggctatcgtcacagtgacagagaccctggaggaactgcagctgcctcaggaagccacagagagtgaatcccgtggggccatctactccatccccatcatggaggacggaggaggtggaagctccactccagaagacccagcagaggcccctaggacgctcctagaatttgaaacacaatccatggtaccgcccacggggttctcagaagaggaaggtaaggcattggaggaagaagagaaatatgaagatgaagaagagaaagaggaggaagaagaagaggaggaggtggaggatgaggctctgtgggcatggcccagcgagctcagcagcccgggccctgaggcctctctccccactgagccagcagcccaggaggagtcactctcccaggcgccagcaagggcagtcctgcagcctggtgcatcaccacttcctgatggagagtcagaagcttccaggcctccaagggtccatggaccacctactgagactctgcccactcccagggagaggaacctagcatccccatcaccttccactctggttgaggcaagagaggtgggggaggcaactggtggtcctgagctatctggggtccctcgaggagagagcgaggagacaggaagctccgagggtgccccttccctgcttccagccacacgggcccctgagggtaccagggagctggaggccccctctgaagataattctggaagaactgccccagcagggacctcagtgcaggcccagccagtgctgcccactgacagcgccagccgaggtggagtggccgtggtccccgcatcaggtgactgtgtccccagcccctgccacaatggtgggacatgcttggaggaggaggaaggggtccgctgcctatgtctgcctggctatgggggggacctgtgcgatgttggtgagtgttgagggacggggggcaggtttgaagcctggaccctgccacaacgtgctacttctggaggggggagggagaacattggttttggccttgtcattaatgagtccctgttttaggcaagttgcataacttctttgagtcctaccctcaattttcttatctaagtgaaaccacaatgcctctcatagggggtccatttgagaccagtgcaaagcatactcctggcatttaatcggtggtcaatacatgacaggctccattctcctggagaggagagccactgctcgttaggatggagacccaggccggaactccatccctcaccctggttcctgtctcttagaaaaggcaccagcgcccctgcccaagagcccctccaggctcctgctaccccctcattctctactagctcttttgcaccgccctcctgtcccccttagtcccgcccctctcggcctgcggtagtggaaggagaccagccccttccaggggacctggccctctgggttttggggccctaagatgcccgcccttatgtgccgcaggcctccgcttctgcaaccccggctgggacgccttccagggcgcctgctacaagcacttttccacacgaaggagctgggaggaggcagagacccagtgccggatgtacggcgcgcatctggccagcatcagcacacccgaggaacaggacttcatcaacagtgggctgggagacagggcgggaggggcccccgccatatgctctcactctctctcactcgcctaaccgccttcctcattaacccatgcacttattccttggttttctcaagcgtgcattccctcactcattcgttcactccccttctcattctctctcccttcccaccctacgcttaggcagtggccttcgggaacggagagtggaggttcgcgcagtagagtgcgcctgtgtgggccgggccgccgtgcagggggccgcctccaatccctccaacctccctgctctccgacctccgtcggcctcctccaactccaactccaatcttgttgaaagttttgactctttttccaaaactccccttttctagcctgggttgatatcttccttattctcccacccccattcccctgctttccatctggcccttgagcagaggctggggtagaagaacccgacaagggcgggtgctggatcgcggggaagggtttccaaggcagtcaccgcagaccgcccgggagcggggaacggccgccatctgctggcggctgcgctcactgcacgccttcgtctccctagaccggtaccgggagtaccagtggatcggactcaacgacaggaccatcgaaggcgacttcttgtggtcggatggcgtccccctgctctatgagaactggaaccctgggcagcctgacagctacttcctgtctggagagaactgcgtggtcatggtgtggcatgatcagggacaatggagtgacgtgccctgcaactaccacctgtcctacacctgcaagatggggctggtgtcctgtgggccgccaccggagctgcccctggctcaagtgttcggccgcccacggctgcgctatgaggtggacactgtgcttcgctaccggtgccgggaaggactggcccagcgcaatctgccgctgatccgatgccaagagaacggtcgttgggaggccccccagatctcctgtgtgcccagaagacctgcccgagctctgcacccagaggaggacccagaaggacgtcaggggaggctactgggacgctggaaggcgctgttgatccccccttccagccccatgccaggtccctagggggcaaggccttgaacactgccggccacagcactgccctgtcacccaaattttccctcacaccctgcgctcccgccaccacaggaagtgacaacatgacgaggggtggtgctggagtccaggtgacagttcctgaaggggcttctgggaaatacctaggaggctccagcccagcccaggccctctccccctaccctgggcaccagatcttccatcagggccggagtaaatccctaagtgcctcaactgccctctccctggcagccatcttgtcccctctattcctctagggagcactgtgcccactctttctgggttttccaagggaatgggcttgcaggatggagtgtctgtaaaatcaacaggaaataaaactgtgtatgagccccaaaaaaaacacaaaacaaaaaaaaaaaaaaaaaaaaaaaacaaaaaaaaa

SEQ ID NO: 733215 - DNA, 5390 bp, Homo sapiens
gccctaaggccctgcttatattgtgtaggctcatgttgctcctcatgaagccgttaagggggtagcagagagcttccctcctgctatagccaaagctctggcttcttgtgcctccctgctgaccctgctgagtgctggagctcagttcctatgggacagaccttggttgccggctgatgggcattcagcatggaggtggtgggtgttgttagatgtgtgtacacacgtgcatgcctacacacacaacacacacacacagagagagagagagagagagagagagagagagagagacctggtcttaactctctgggttgggtctatgaagactgtgagggagatggacatcccgggtcagacagaaatgatgtgacaagaggaaagtttcctgaacagctcaagaaattcaaaacaagggcagagatacagacgctggagctgaaacagagagggggatgttgtggcgtcaagggaacggaccgcatgactgctgagctctcagggttagagttggaggaagtagaggagagggtgggctcaggagaagctgtgcttacttgcgttcggtctaggaggccctcctggaaaaggccaggtgagtatggtgtccctggaggcagggacagtctagaaggcagaagaggctaaagagatactatgggagaaggctctgggttcgaggaaggagtctggcactgggaggagcagatggaattctgagtataagagcacccaccattcatgctgtaaactgagctcctactgtctgcctggtgctatgcatttgtacaggagttttaagatactaaacactctcaaagcacatggtcctatctcaactcatgagatagtaatgatgatgcttttttataagtaagaaaataaaggctcagagaaggtaaggagcttggcttaggtcacacagtgagttgactaggactcgggttttggttctgagaagaaatcacttgctgggaagatggggatcagaaacagagagtccatggtgatgtgaaggtaggggacttctggagccaggatatgtgtgaacccacatgggtgtggtagggagcaggggggaagtccatcctgaagtctaaccccatctttccttctcatgtccctctgtcagcctgcagcatggcccagctgttcctgcccctgctggcagccctggtcctggcccaggctcctgcagctttagcagatgttctggaaggagacagctcagaggaccgcgcttttcgcgtgcgcatcgcgggcgacgcgccactgcagggcgtgctcggcggcgccctcaccatcccttgccacgtccactacctgcggccaccgccgagccgccgggctgtgctgggctctccgcgggtcaagtggactttcctgtcccggggccgggaggcagaggtgctggtggcgcggggagtgcgcgtcaaggtgaacgaggcctaccggttccgcgtggcactgcctgcgtacccagcgtcgctcaccgacgtctccctggcgctgagcgagctgcgccccaacgactcaggtatctatcgctgtgaggtccagcacggcatcgatgacagcagcgacgctgtggaggtcaaggtcaaaggggtcgtctttctctaccgagagggctctgcccgctatgctttctccttttctggggcccaggaggcctgtgcccgcattggagcccacatcgccaccccggagcagctctatgccgcctaccttgggggctatgagcaatgtgatgctggctggctgtcggatcagaccgtgaggtatcccatccagaccccacgagaggcctgttacggagacatggatggcttccccggggtccggaactatggtgtggtggacccggatgacctctatgatgtgtactgttatgctgaagacctaaatggagaactgttcctgggtgaccctccagagaagctgacattggaggaagcacgggcgtactgccaggagcggggtgcagagattgccaccacgggccaactgtatgcagcctgggatggtggcctggaccactgcagcccagggtggctagctgatggcagtgtgcgctaccccatcgtcacacccagccagcgctgtggtgggggcttgcctggtgtcaagactctcttcctcttccccaaccagactggcttccccaataagcacagccgcttcaacgtctactgcttccgagactcggcccagccttctgccatccctgaggcctccaacccagcctccaacccagcctctgatggactagaggctatcgtcacagtgacagagaccctggaggaactgcagctgcctcaggaagccacagagagtgaatcccgtggggccatctactccatccccatcatggaggacggaggaggtggaagctccactccagaagacccagcagaggcccctaggacgctcctagaatttgaaacacaatccatggtaccgcccacggggttctcagaagaggaaggtaaggcattggaggaagaagagaaatatgaagatgaagaagagaaagaggaggaagaagaagaggaggaggtggaggatgaggctctgtgggcatggcccagcgagctcagcagcccgggccctgaggcctctctccccactgagccagcagcccaggaggagtcactctcccaggcgccagcaagggcagtcctgcagcctggtgcatcaccacttcctgatggagagtcagaagcttccaggcctccaagggtccatggaccacctactgagactctgcccactcccagggagaggaacctagcatccccatcaccttccactctggttgaggcaagagaggtgggggaggcaactggtggtcctgagctatctggggtccctcgaggagagagcgaggagacaggaagctccgagggtgccccttccctgcttccagccacacgggcccctgagggtaccagggagctggaggccccctctgaagataattctggaagaactgccccagcagggacctcagtgcaggcccagccagtgctgcccactgacagcgccagccgaggtggagtggccgtggtccccgcatcaggtgactgtgtccccagcccctgccacaatggtgggacatgcttggaggaggaggaaggggtccgctgcctatgtctgcctggctatgggggggacctgtgcgatgttggtgagtgttgagggacggggggcaggtttgaagcctggaccctgccacaacgtgctacttctggaggggggagggagaacattggttttggccttgtcattaatgagtccctgttttaggcaagttgcataacttctttgagtcctaccctcaattttcttatctaagtgaaaccacaatgcctctcatagggggtccatttgagaccagtgcaaagcatactcctggcatttaatcggtggtcaatacatgacaggctccattctcctggagaggagagccactgctcgttaggatggagacccaggccggaactccatccctcaccctggttcctgtctcttagaaaaggcaccagcgcccctgcccaagagcccctccaggctcctgctaccccctcattctctactagctcttttgcaccgccctcctgtcccccttagtcccgcccctctcggcctgcggtagtggaaggagaccagccccttccaggggacctggccctctgggttttggggccctaagatgcccgcccttatgtgccgcaggcctccgcttctgcaaccccggctgggacgccttccagggcgcctgctacaagcacttttccacacgaaggagctgggaggaggcagagacccagtgccggatgtacggcgcgcatctggccagcatcagcacacccgaggaacaggacttcatcaacagtgggctgggagacagggcgggaggggcccccgccatatgctctcactctctctcactcgcctaaccgccttcctcattaacccatgcacttattccttggttttctcaagcgtgcattccctcactcattcgttcactccccttctcattctctctcccttcccaccctacgcttaggcagtggccttcgggaacggagagtggaggttcgcgcagtagagtgcgcctgtgtgggccgggccgccgtgcagggggccgcctccaatccctccaacctccctgctctccgacctccgtcggcctcctccaactccaactccaatcttgttgaaagttttgactctttttccaaaactccccttttctagcctgggttgatatcttccttattctcccacccccattcccctgctttccatctggcccttgagcagaggctggggtagaagaacccgacaagggcgggtgctggatcgcggggaagggtttccaaggcagtcaccgcagaccgcccgggagcggggaacggccgccatctgctggcggctgcgctcactgcacgccttcgtctccctagaccggtaccgggagtaccagtggatcggactcaacgacaggaccatcgaaggcgacttcttgtggtcggatggcgtccccctgctctatgagaactggaaccctgggcagcctgacagctacttcctgtctggagagaactgcgtggtcatggtgtggcatgatcagggacaatggagtgacgtgccctgcaactaccacctgtcctacacctgcaagatggggctggtgtcctgtgggccgccaccggagctgcccctggctcaagtgttcggccgcccacggctgcgctatgaggtggacactgtgcttcgctaccggtgccgggaaggactggcccagcgcaatctgccgctgatccgatgccaagagaacggtcgttgggaggccccccagatctcctgtgtgcccagaagacctgcccgagctctgcacccagaggaggacccagaaggacgtcaggggaggctactgggacgctggaaggcgctgttgatccccccttccagccccatgccaggtccctagggggcaaggccttgaacactgccggccacagcactgccctgtcacccaaattttccctcacaccctgcgctcccgccaccacaggaagtgacaacatgacgaggggtggtgctggagtccaggtgacagttcctgaaggggcttctgggaaatacctaggaggctccagcccagcccaggccctctccccctaccctgggcaccagatcttccatcagggccggagtaaatccctaagtgcctcaactgccctctccctggcagccatcttgtcccctctattcctctagggagcactgtgcccactctttctgggttttccaagggaatgggcttgcaggatggagtgtctgtaaaatcaacaggaaataaaactgtgtatgagccc

SEQ ID NO: 733216 - DNA, 5712 bp, Homo sapiens
  misc_feature (5417)..(5417): n is a, c, g, or t
gccctaaggccctgcttatattgtgtaggctcatgttgctcctcatgaagccgttaagggggtagcagagagcttccctcctgctatagccaaagctctggcttcttgtgcctccctgctgaccctgctgagtgctggagctcagttcctatgggacagaccttggttgccggctgatgggcattcagcatggaggtggtgggtgttgttagatgtgtgtacacacgtgcatgcctacacacacaacacacacacacagagagagagagagagagagagagagagagagagagacctggtcttaactctctgggttgggtctatgaagactgtgagggagatggacatcccgggtcagacagaaatgatgtgacaagaggaaagtttcctgaacagctcaagaaattcaaaacaagggcagagatacagacgctggagctgaaacagagagggggatgttgtggcgtcaagggaacggaccgcatgactgctgagctctcagggttagagttggaggaagtagaggagagggtgggctcaggagaagctgtgcttacttgcgttcggtctaggaggccctcctggaaaaggccaggtgagtatggtgtccctggaggcagggacagtctagaaggcagaagaggctaaagagatactatgggagaaggctctgggttcgaggaaggagtctggcactgggaggagcagatggaattctgagtataagagcacccaccattcatgctgtaaactgagctcctactgtctgcctggtgctatgcatttgtacaggagttttaagatactaaacactctcaaagcacatggtcctatctcaactcatgagatagtaatgatgatgcttttttataagtaagaaaataaaggctcagagaaggtaaggagcttggcttaggtcacacagtgagttgactaggactcgggttttggttctgagaagaaatcacttgctgggaagatggggatcagaaacagagagtccatggtgatgtgaaggtaggggacttctggagccaggatatgtgtgaacccacatgggtgtggtagggagcaggggggaagtccatcctgaagtctaaccccatctttccttctcatgtccctctgtcagcctgcagcatggcccagctgttcctgcccctgctggcagccctggtcctggcccaggctcctgcagctttagcagatgttctggaaggagacagctcagaggaccgcgcttttcgcgtgcgcatcgcgggcgacgcgccactgcagggcgtgctcggcggcgccctcaccatcccttgccacgtccactacctgcggccaccgccgagccgccgggctgtgctgggctctccgcgggtcaagtggactttcctgtcccggggccgggaggcagaggtgctggtggcgcggggagtgcgcgtcaaggtgaacgaggcctaccggttccgcgtggcactgcctgcgtacccagcgtcgctcaccgacgtctccctggcgctgagcgagctgcgccccaacgactcaggtatctatcgctgtgaggtccagcacggcatcgatgacagcagcgacgctgtggaggtcaaggtcaaaggggtcgtctttctctaccgagagggctctgcccgctatgctttctccttttctggggcccaggaggcctgtgcccgcattggagcccacatcgccaccccggagcagctctatgccgcctaccttgggggctatgagcaatgtgatgctggctggctgtcggatcagaccgtgaggtatcccatccagaccccacgagaggcctgttacggagacatggatggcttccccggggtccggaactatggtgtggtggacccggatgacctctatgatgtgtactgttatgctgaagacctaaatggagaactgttcctgggtgaccctccagagaagctgacattggaggaagcacgggcgtactgccaggagcggggtgcagagattgccaccacgggccaactgtatgcagcctgggatggtggcctggaccactgcagcccagggtggctagctgatggcagtgtgcgctaccccatcgtcacacccagccagcgctgtggtgggggcttgcctggtgtcaagactctcttcctcttccccaaccagactggcttccccaataagcacagccgcttcaacgtctactgcttccgagactcggcccagccttctgccatccctgaggcctccaacccagcctccaacccagcctctgatggactagaggctatcgtcacagtgacagagaccctggaggaactgcagctgcctcaggaagccacagagagtgaatcccgtggggccatctactccatccccatcatggaggacggaggaggtggaagctccactccagaagacccagcagaggcccctaggacgctcctagaatttgaaacacaatccatggtaccgcccacggggttctcagaagaggaaggtaaggcattggaggaagaagagaaatatgaagatgaagaagagaaagaggaggaagaagaagaggaggaggtggaggatgaggctctgtgggcatggcccagcgagctcagcagcccgggccctgaggcctctctccccactgagccagcagcccaggaggagtcactctcccaggcgccagcaagggcagtcctgcagcctggtgcatcaccacttcctgatggagagtcagaagcttccaggcctccaagggtccatggaccacctactgagactctgcccactcccagggagaggaacctagcatccccatcaccttccactctggttgaggcaagagaggtgggggaggcaactggtggtcctgagctatctggggtccctcgaggagagagcgaggagacaggaagctccgagggtgccccttccctgcttccagccacacgggcccctgagggtaccagggagctggaggccccctctgaagataattctggaagaactgccccagcagggacctcagtgcaggcccagccagtgctgcccactgacagcgccagccgaggtggagtggccgtggtccccgcatcaggtgactgtgtccccagcccctgccacaatggtgggacatgcttggaggaggaggaaggggtccgctgcctatgtctgcctggctatgggggggacctgtgcgatgttggtgagtgttgagggacggggggcaggtttgaagcctggaccctgccacaacgtgctacttctggaggggggagggagaacattggttttggccttgtcattaatgagtccctgttttaggcaagttgcataacttctttgagtcctaccctcaattttcttatctaagtgaaaccacaatgcctctcatagggggtccatttgagaccagtgcaaagcatactcctggcatttaatcggtggtcaatacatgacaggctccattctcctggagaggagagccactgctcgttaggatggagacccaggccggaactccatccctcaccctggttcctgtctcttagaaaaggcaccagcgcccctgcccaagagcccctccaggctcctgctaccccctcattctctactagctcttttgcaccgccctcctgtcccccttagtcccgcccctctcggcctgcggtagtggaaggagaccagccccttccaggggacctggccctctgggttttggggccctaagatgcccgcccttatgtgccgcaggcctccgcttctgcaaccccggctgggacgccttccagggcgcctgctacaagcacttttccacacgaaggagctgggaggaggcagagacccagtgccggatgtacggcgcgcatctggccagcatcagcacacccgaggaacaggacttcatcaacagtgggctgggagacagggcgggaggggcccccgccatatgctctcactctctctcactcgcctaaccgccttcctcattaacccatgcacttattccttggttttctcaagcgtgcattccctcactcattcgttcactccccttctcattctctctcccttcccaccctacgcttaggcagtggccttcgggaacggagagtggaggttcgcgcagtagagtgcgcctgtgtgggccgggccgccgtgcagggggccgcctccaatccctccaacctccctgctctccgacctccgtcggcctcctccaactccaactccaatcttgttgaaagttttgactctttttccaaaactccccttttctagcctgggttgatatcttccttattctcccacccccattcccctgctttccatctggcccttgagcagaggctggggtagaagaacccgacaagggcgggtgctggatcgcggggaagggtttccaaggcagtcaccgcagaccgcccgggagcggggaacggccgccatctgctggcggctgcgctcactgcacgccttcgtctccctagaccggtaccgggagtaccagtggatcggactcaacgacaggaccatcgaaggcgacttcttgtggtcggatggcgtccccctgctctatgagaactggaaccctgggcagcctgacagctacttcctgtctggagagaactgcgtggtcatggtgtggcatgatcagggacaatggagtgacgtgccctgcaactaccacctgtcctacacctgcaagatggggctggtgtcctgtgggccgccaccggagctgcccctggctcaagtgttcggccgcccacggctgcgctatgaggtggacactgtgcttcgctaccggtgccgggaaggactggcccagcgcaatctgccgctgatccgatgccaagagaacggtcgttgggaggccccccagatctcctgtgtgcccagaagacctgcccgagctctgcacccagaggaggacccagaaggacgtcaggggaggctactgggacgctggaaggcgctgttgatccccccttccagccccatgccaggtccctagggggcaaggccttgaacactgccggccacagcactgccctgtcacccaaattttccctcacaccctgcgctcccgccaccacaggaagtgacaacatgacgaggggtggtgctggagtccaggtgacagttcctgaaggggcttctgggaaatacctaggaggctccagcccagcccaggccctctccccctaccctgggcaccagatcttccatcagggccggagtaaatccctaagtgcctcaactgccctctccctggcagccatcttgtcccctctattcctctagggagcactgtgcccactctttctgggttttccaagggaatgggcttgcaggatggagtgtctgtaaaatcaacaggaaataaaactgtgtatgagcccagaaagaaaaaaaagaaacaacaaaanaaaaccaaaaacaaaaaaagggggcgccccccaaaaaaacaccccccgggggaccccaaagtagcgacccccactttttttgcaaaggggggcccccacaagagggcagcacgattataaaagaccggcgccggccaccgaggcataaaacaccgcggtgtgtgggaacaacgcgtgccagtggaacatctgcgggaggaaccaccactgcgagggcgggaaaaatgggcacgacacacgcgaaaattagcccacgcgaacacaggggacttaacgcacacaggacagaggccgg

SEQ ID NO: 733217 - DNA, 3661 bp, Homo sapiens
gccctaaggccctgcttatattgtgtaggctcatgttgctcctcatgaagccgttaagggggtagcagagagcttccctcctgctatagccaaagctctggcttcttgtgcctccctgctgaccctgctgagtgctggagctcagttcctatgggacagaccttggttgccggctgatgggcattcagcatggaggtggtgggtgttgttagatgtgtgtacacacgtgcatgcctacacacacaacacacacacacagagagagagagagagagagagagagagagagagagacctggtcttaactctctgggttgggtctatgaagactgtgagggagatggacatcccgggtcagacagaaatgatgtgacaagaggaaagtttcctgaacagctcaagaaattcaaaacaagggcagagatacagacgctggagctgaaacagagagggggatgttgtggcgtcaagggaacggaccgcatgactgctgagctctcagggttagagttggaggaagtagaggagagggtgggctcaggagaagctgtgcttacttgcgttcggtctaggaggccctcctggaaaaggccaggtgagtatggtgtccctggaggcagggacagtctagaaggcagaagaggctaaagagatactatgggagaaggctctgggttcgaggaaggagtctggcactgggaggagcagatggaattctgagtataagagcacccaccattcatgctgtaaactgagctcctactgtctgcctggtgctatgcatttgtacaggagttttaagatactaaacactctcaaagcacatggtcctatctcaactcatgagatagtaatgatgatgcttttttataagtaagaaaataaaggctcagagaaggtaaggagcttggcttaggtcacacagtgagttgactaggactcgggttttggttctgagaagaaatcacttgctgggaagatggggatcagaaacagagagtccatggtgatgtgaaggtaggggacttctggagccaggatatgtgtgaacccacatgggtgtggtagggagcaggggggaagtccatcctgaagtctaaccccatctttccttctcatgtccctctgtcagcctgcagcatggcccagctgttcctgcccctgctggcagccctggtcctggcccaggctcctgcagctttagcagatgttctggaaggagacagctcagaggaccgcgcttttcgcgtgcgcatcgcgggcgacgcgccactgcagggcgtgctcggcggcgccctcaccatcccttgccacgtccactacctgcggccaccgccgagccgccgggctgtgctgggctctccgcgggtcaagtggactttcctgtcccggggccgggaggcagaggtgctggtggcgcggggagtgcgcgtcaaggtgaacgaggcctaccggttccgcgtggcactgcctgcgtacccagcgtcgctcaccgacgtctccctggcgctgagcgagctgcgccccaacgactcaggtatctatcgctgtgaggtccagcacggcatcgatgacagcagcgacgctgtggaggtcaaggtcaaaggggtcgtctttctctaccgagagggctctgcccgctatgctttctccttttctggggcccaggaggcctgtgcccgcattggagcccacatcgccaccccggagcagctctatgccgcctaccttgggggctatgagcaatgtgatgctggctggctgtcggatcagaccgtgaggtatcccatccagaccccacgagaggcctgttacggagacatggatggcttccccggggtccggaactatggtgtggtggacccggatgacctctatgatgtgtactgttatgctgaagacctaaatggagaactgttcctgggtgaccctccagagaagctgacattggaggaagcacgggcgtactgccaggagcggggtgcagagattgccaccacgggccaactgtatgcagcctgggatggtggcctggaccactgcagcccagggtggctagctgatggcagtgtgcgctaccccatcgtcacacccagccagcgctgtggtgggggcttgcctggtgtcaagactctcttcctcttccccaaccagactggcttccccaataagcacagccgcttcaacgtctactgcttccgagactcggcccagccttctgccatccctgaggcctccaacccagcctccaacccagcctctgatggactagaggctatcgtcacagtgacagagaccctggaggaactgcagctgcctcaggaagccacagagagtgaatcccgtggggccatctactccatccccatcatggaggacggaggaggtggaagctccactccagaagacccagcagaggcccctaggacgctcctagaatttgaaacacaatccatggtaccgcccacggggttctcagaagaggaaggtaaggcattggaggaagaagagaaatatgaagatgaagaagagaaagaggaggaagaagaagaggaggaggtggaggatgaggctctgtgggcatggcccagcgagctcagcagcccgggccctgaggcctctctccccactgagccagcagcccaggaggagtcactctcccaggcgccagcaagggcagtcctgcagcctggtgcatcaccacttcctgatggagagtcagaagcttccaggcctccaagggtccatggaccacctactgagactctgcccactcccagggagaggaacctagcatccccatcaccttccactctggttgaggcaagagaggtgggggaggcaactggtggtcctgagctatctggggtccctcgaggagagagcgaggagacaggaagctccgagggtgccccttccctgcttccagccacacgggcccctgagggtaccagggagctggaggccccctctgaagataattctggaagaactgccccagcagggacctcagtgcaggcccagccagtgctgcccactgacagcgccagccgaggtggagtggccgtggtccccgcatcaggtaattctgcccaaggctcaactgccctctctatcctactccttttcttccccctgcagctctgggtcacctgacctgtagtcctttaacccaccatcatcccaaactctcctgtcctttgccttcattctcttacccacctctacctatgggtctccaatctcggatatccaccttgtgggtatctcagctctccgcgtctttaccctgtgatcccagccccgccactgaccatctgtgacccttccctgccattgggccctccacctgtggctcacatctcgccagccccacagagcatcctcaggcctctccaagggtcctcatcacctattgcagccttcagggctcggcctattttccactactcccttcatccgcctgtgtgccgtcccctttagctgcctcctattgatctcagggaagcctgggagtcccttctcacccctcaacctccggagtccaggagaacccgtacccccacagagccttaagcaactacttctgtgaagtattttttgactgtttcatggaaaacaagccttggaaataaatctctattaaaccgctttgtaacca

SEQ ID NO: 733218 - DNA, 1451 bp, Homo sapiens
ccagcctctcctcacgctcgcgcagtctccgccgcagtctcagctgcagctgcaggactgagccgtgcacccggaggagacaggaagctccgagggtgccccttccctgcttccagccacacgggcccctgagggtaccagggagctggaggccccctctgaagataattctggaagaactgccccagcagggacctcagtgcaggcccagccagtgctgcccactgacagcgccagccgaggtggagtggccgtggtccccgcatcaggtgactgtgtccccagcccctgccacaatggtgggacatgcttggaggaggaggaaggggtccgctgcctatgtctgcctggctatgggggggacctgtgcgatgttggcctccgcttctgcaaccccggctgggacgccttccagggcgcctgctacaagcacttttccacacgaaggagctgggaggaggcagagacccagtgccggatgtacggcgcgcatctggccagcatcagcacacccgaggaacaggacttcatcaacaaccggtaccgggagtaccagtggatcggactcaacgacaggaccatcgaaggcgacttcttgtggtcggatggcgtccccctgctctatgagaactggaaccctgggcagcctgacagctacttcctgtctggagagaactgcgtggtcatggtgtggcatgatcagggacaatggagtgacgtgccctgcaactaccacctgtcctacacctgcaagatggggctggtgtcctgtgggccgccaccggagctgcccctggctcaagtgttcggccgcccacggctgcgctatgaggtggacactgtgcttcgctaccggtgccgggaaggactggcccagcgcaatctgccgctgatccgatgccaagagaacggtcgttgggaggccccccagatctcctgtgtgcccagaagacctgcccgagctctgcacccagaggaggacccagaaggacgtcaggggaggctactgggacgctggaaggcgctgttgatccccccttccagccccatgccaggtccctagggggcaaggccttgaacactgccggccacagcactgccctgtcacccaaattttccctcacaccctgcgctcccgccaccacaggaagtgacaacatgacgaggggtggtgctggagtccaggtgacagttcctgaaggggcttctgggaaatacctaggaggctccagcccagcccaggccctctccccctaccctgggcaccagatcttccatcagggccggagtaaatccctaagtgcctcaactgccctctccctggcagccatcttgtcccctctattcctctagggagcactgtgcccactctttctgggttttccaagggaatgggcttgcaggatggagtgtctgtaaaatcaacaggaaataaaactgtgtatgagccc

SEQ ID NO: 733219 - DNA, 1502 bp, Homo sapiens
ccagcctctcctcacgctcgcgcagtctccgccgcagtctcagctgcagctgcaggactgagccgtgcacccggaggagacaggaagctccgagggtgccccttccctgcttccagccacacgggcccctgagggtaccagggagctggaggccccctctgaagataattctggaagaactgccccagcagggacctcagtgcaggcccagccagtgctgcccactgacagcgccagccgaggtggagtggccgtggtccccgcatcaggtgactgtgtccccagcccctgccacaatggtgggacatgcttggaggaggaggaaggggtccgctgcctatgtctgcctggctatgggggggacctgtgcgatgttggcctccgcttctgcaaccccggctgggacgccttccagggcgcctgctacaagcacttttccacacgaaggagctgggaggaggcagagacccagtgccggatgtacggcgcgcatctggccagcatcagcacacccgaggaacaggacttcatcaacaaccggtaccgggagtaccagtggatcggactcaacgacaggaccatcgaaggcgacttcttgtggtcggatggcgtccccctgctctatgagaactggaaccctgggcagcctgacagctacttcctgtctggagagaactgcgtggtcatggtgtggcatgatcagggacaatggagtgacgtgccctgcaactaccacctgtcctacacctgcaagatggggctggtgtcctgtgggccgccaccggagctgcccctggctcaagtgttcggccgcccacggctgcgctatgaggtggacactgtgcttcgctaccggtgccgggaaggactggcccagcgcaatctgccgctgatccgatgccaagagaacggtcgttgggaggccccccagatctcctgtgtgcccagaagacctgcccgagctctgcacccagaggaggacccagaaggacgtcaggggaggctactgggacgctggaaggcgctgttgatccccccttccagccccatgccaggtccctagggggcaaggccttgaacactgccggccacagcactgccctgtcacccaaattttccctcacaccctgcgctcccgccaccacaggaagtgacaacatgacgaggggtggtgctggagtccaggtgacagttcctgaaggggcttctgggaaatacctaggaggctccagcccagcccaggccctctccccctaccctgggcaccagatcttccatcagggccggagtaaatccctaagtgcctcaactgccctctccctggcagccatcttgtcccctctattcctctagggagcactgtgcccactctttctgggttttccaagggaatgggcttgcaggatggagtgtctgtaaaatcaacaggaaataaaactgtgtatgagccccaaaaaaaacacaaaacaaaaaaaaaaaaaaaaaaaaaaaacaaaaaaaaa

SEQ ID NO: 733220 - DNA, 1773 bp, Homo sapiens
  misc_feature (1478)..(1478): n is a, c, g, or t
ccagcctctcctcacgctcgcgcagtctccgccgcagtctcagctgcagctgcaggactgagccgtgcacccggaggagacaggaagctccgagggtgccccttccctgcttccagccacacgggcccctgagggtaccagggagctggaggccccctctgaagataattctggaagaactgccccagcagggacctcagtgcaggcccagccagtgctgcccactgacagcgccagccgaggtggagtggccgtggtccccgcatcaggtgactgtgtccccagcccctgccacaatggtgggacatgcttggaggaggaggaaggggtccgctgcctatgtctgcctggctatgggggggacctgtgcgatgttggcctccgcttctgcaaccccggctgggacgccttccagggcgcctgctacaagcacttttccacacgaaggagctgggaggaggcagagacccagtgccggatgtacggcgcgcatctggccagcatcagcacacccgaggaacaggacttcatcaacaaccggtaccgggagtaccagtggatcggactcaacgacaggaccatcgaaggcgacttcttgtggtcggatggcgtccccctgctctatgagaactggaaccctgggcagcctgacagctacttcctgtctggagagaactgcgtggtcatggtgtggcatgatcagggacaatggagtgacgtgccctgcaactaccacctgtcctacacctgcaagatggggctggtgtcctgtgggccgccaccggagctgcccctggctcaagtgttcggccgcccacggctgcgctatgaggtggacactgtgcttcgctaccggtgccgggaaggactggcccagcgcaatctgccgctgatccgatgccaagagaacggtcgttgggaggccccccagatctcctgtgtgcccagaagacctgcccgagctctgcacccagaggaggacccagaaggacgtcaggggaggctactgggacgctggaaggcgctgttgatccccccttccagccccatgccaggtccctagggggcaaggccttgaacactgccggccacagcactgccctgtcacccaaattttccctcacaccctgcgctcccgccaccacaggaagtgacaacatgacgaggggtggtgctggagtccaggtgacagttcctgaaggggcttctgggaaatacctaggaggctccagcccagcccaggccctctccccctaccctgggcaccagatcttccatcagggccggagtaaatccctaagtgcctcaactgccctctccctggcagccatcttgtcccctctattcctctagggagcactgtgcccactctttctgggttttccaagggaatgggcttgcaggatggagtgtctgtaaaatcaacaggaaataaaactgtgtatgagcccagaaagaaaaaaaagaaacaacaaaanaaaaccaaaaacaaaaaaagggggcgccccccaaaaaaacaccccccgggggaccccaaagtagcgacccccactttttttgcaaaggggggcccccacaagagggcagcacgattataaaagaccggcgccggccaccgaggcataaaacaccgcggtgtgtgggaacaacgcgtgccagtggaacatctgcgggaggaaccaccactgcgagggcgggaaaaatgggcacgacacacgcgaaaattagcccacgcgaacacaggggacttaacgcacacaggacagaggccgg

SEQ ID NO: 733221 - DNA, 2298 bp, Homo sapiens
ccagcctctcctcacgctcgcgcagtctccgccgcagtctcagctttagcagatgttctggaaggagacagctcagaggaccgcgcttttcgcgtgcgcatcgcgggcgacgcgccactgcagggcgtgctcggcggcgccctcaccatcccttgccacgtccactacctgcggccaccgccgagccgccgggctgtgctgggctctccgcgggtcaagtggactttcctgtcccggggccgggaggcagaggtgctggtggcgcggggagtgcgcgtcaaggtgaacgaggcctaccggttccgcgtggcactgcctgcgtacccagcgtcgctcaccgacgtctccctggcgctgagcgagctgcgccccaacgactcaggtatctatcgctgtgaggtccagcacggcatcgatgacagcagcgacgctgtggaggtcaaggtcaaaggggtcgtctttctctaccgagagggctctgcccgctatgctttctccttttctggggcccaggaggcctgtgcccgcattggagcccacatcgccaccccggagcagctctatgccgcctaccttgggggctatgagcaatgtgatgctggctggctgtcggatcagaccgtgaggtatcccatccagaccccacgagaggctctctccccactgagccagcagcccaggaggagtcactctcccaggcgccagcaagggcagtcctgcagcctggtgcatcaccacttcctgatggagagtcagaagcttccaggcctccaagggtccatggaccacctactgagactctgcccactcccagggagaggaacctagcatccccatcaccttccactctggttgaggcaagagaggtgggggaggcaactggtggtcctgagctatctggggtccctcgaggagagagcgaggagacaggaagctccgagggtgccccttccctgcttccagccacacgggcccctgagggtaccagggagctggaggccccctctgaagataattctggaagaactgccccagcagggacctcagtgcaggcccagccagtgctgcccactgacagcgccagccgaggtggagtggccgtggtccccgcatcaggtgactgtgtccccagcccctgccacaatggtgggacatgcttggaggaggaggaaggggtccgctgcctatgtctgcctggctatgggggggacctgtgcgatgttggcctccgcttctgcaaccccggctgggacgccttccagggcgcctgctacaagcacttttccacacgaaggagctgggaggaggcagagacccagtgccggatgtacggcgcgcatctggccagcatcagcacacccgaggaacaggacttcatcaacaaccggtaccgggagtaccagtggatcggactcaacgacaggaccatcgaaggcgacttcttgtggtcggatggcgtccccctgctctatgagaactggaaccctgggcagcctgacagctacttcctgtctggagagaactgcgtggtcatggtgtggcatgatcagggacaatggagtgacgtgccctgcaactaccacctgtcctacacctgcaagatggggctggtgtcctgtgggccgccaccggagctgcccctggctcaagtgttcggccgcccacggctgcgctatgaggtggacactgtgcttcgctaccggtgccgggaaggactggcccagcgcaatctgccgctgatccgatgccaagagaacggtcgttgggaggccccccagatctcctgtgtgcccagaagacctgcccgagctctgcacccagaggaggacccagaaggacgtcaggggaggctactgggacgctggaaggcgctgttgatccccccttccagccccatgccaggtccctagggggcaaggccttgaacactgccggccacagcactgccctgtcacccaaattttccctcacaccctgcgctcccgccaccacaggaagtgacaacatgacgaggggtggtgctggagtccaggtgacagttcctgaaggggcttctgggaaatacctaggaggctccagcccagcccaggccctctccccctaccctgggcaccagatcttccatcagggccggagtaaatccctaagtgcctcaactgccctctccctggcagccatcttgtcccctctattcctctagggagcactgtgcccactctttctgggttttccaagggaatgggcttgcaggatggagtgtctgtaaaatcaacaggaaataaaactgtgtatgagccc

SEQ ID NO: 733222 - DNA, 2349 bp, Homo sapiens
ccagcctctcctcacgctcgcgcagtctccgccgcagtctcagctttagcagatgttctggaaggagacagctcagaggaccgcgcttttcgcgtgcgcatcgcgggcgacgcgccactgcagggcgtgctcggcggcgccctcaccatcccttgccacgtccactacctgcggccaccgccgagccgccgggctgtgctgggctctccgcgggtcaagtggactttcctgtcccggggccgggaggcagaggtgctggtggcgcggggagtgcgcgtcaaggtgaacgaggcctaccggttccgcgtggcactgcctgcgtacccagcgtcgctcaccgacgtctccctggcgctgagcgagctgcgccccaacgactcaggtatctatcgctgtgaggtccagcacggcatcgatgacagcagcgacgctgtggaggtcaaggtcaaaggggtcgtctttctctaccgagagggctctgcccgctatgctttctccttttctggggcccaggaggcctgtgcccgcattggagcccacatcgccaccccggagcagctctatgccgcctaccttgggggctatgagcaatgtgatgctggctggctgtcggatcagaccgtgaggtatcccatccagaccccacgagaggctctctccccactgagccagcagcccaggaggagtcactctcccaggcgccagcaagggcagtcctgcagcctggtgcatcaccacttcctgatggagagtcagaagcttccaggcctccaagggtccatggaccacctactgagactctgcccactcccagggagaggaacctagcatccccatcaccttccactctggttgaggcaagagaggtgggggaggcaactggtggtcctgagctatctggggtccctcgaggagagagcgaggagacaggaagctccgagggtgccccttccctgcttccagccacacgggcccctgagggtaccagggagctggaggccccctctgaagataattctggaagaactgccccagcagggacctcagtgcaggcccagccagtgctgcccactgacagcgccagccgaggtggagtggccgtggtccccgcatcaggtgactgtgtccccagcccctgccacaatggtgggacatgcttggaggaggaggaaggggtccgctgcctatgtctgcctggctatgggggggacctgtgcgatgttggcctccgcttctgcaaccccggctgggacgccttccagggcgcctgctacaagcacttttccacacgaaggagctgggaggaggcagagacccagtgccggatgtacggcgcgcatctggccagcatcagcacacccgaggaacaggacttcatcaacaaccggtaccgggagtaccagtggatcggactcaacgacaggaccatcgaaggcgacttcttgtggtcggatggcgtccccctgctctatgagaactggaaccctgggcagcctgacagctacttcctgtctggagagaactgcgtggtcatggtgtggcatgatcagggacaatggagtgacgtgccctgcaactaccacctgtcctacacctgcaagatggggctggtgtcctgtgggccgccaccggagctgcccctggctcaagtgttcggccgcccacggctgcgctatgaggtggacactgtgcttcgctaccggtgccgggaaggactggcccagcgcaatctgccgctgatccgatgccaagagaacggtcgttgggaggccccccagatctcctgtgtgcccagaagacctgcccgagctctgcacccagaggaggacccagaaggacgtcaggggaggctactgggacgctggaaggcgctgttgatccccccttccagccccatgccaggtccctagggggcaaggccttgaacactgccggccacagcactgccctgtcacccaaattttccctcacaccctgcgctcccgccaccacaggaagtgacaacatgacgaggggtggtgctggagtccaggtgacagttcctgaaggggcttctgggaaatacctaggaggctccagcccagcccaggccctctccccctaccctgggcaccagatcttccatcagggccggagtaaatccctaagtgcctcaactgccctctccctggcagccatcttgtcccctctattcctctagggagcactgtgcccactctttctgggttttccaagggaatgggcttgcaggatggagtgtctgtaaaatcaacaggaaataaaactgtgtatgagccccaaaaaaaacacaaaacaaaaaaaaaaaaaaaaaaaaaaaacaaaaaaaaa

SEQ ID NO: 733223 - DNA, 2620 bp, Homo sapiens
  misc_feature (2325)..(2325): n is a, c, g, or t
ccagcctctcctcacgctcgcgcagtctccgccgcagtctcagctttagcagatgttctggaaggagacagctcagaggaccgcgcttttcgcgtgcgcatcgcgggcgacgcgccactgcagggcgtgctcggcggcgccctcaccatcccttgccacgtccactacctgcggccaccgccgagccgccgggctgtgctgggctctccgcgggtcaagtggactttcctgtcccggggccgggaggcagaggtgctggtggcgcggggagtgcgcgtcaaggtgaacgaggcctaccggttccgcgtggcactgcctgcgtacccagcgtcgctcaccgacgtctccctggcgctgagcgagctgcgccccaacgactcaggtatctatcgctgtgaggtccagcacggcatcgatgacagcagcgacgctgtggaggtcaaggtcaaaggggtcgtctttctctaccgagagggctctgcccgctatgctttctccttttctggggcccaggaggcctgtgcccgcattggagcccacatcgccaccccggagcagctctatgccgcctaccttgggggctatgagcaatgtgatgctggctggctgtcggatcagaccgtgaggtatcccatccagaccccacgagaggctctctccccactgagccagcagcccaggaggagtcactctcccaggcgccagcaagggcagtcctgcagcctggtgcatcaccacttcctgatggagagtcagaagcttccaggcctccaagggtccatggaccacctactgagactctgcccactcccagggagaggaacctagcatccccatcaccttccactctggttgaggcaagagaggtgggggaggcaactggtggtcctgagctatctggggtccctcgaggagagagcgaggagacaggaagctccgagggtgccccttccctgcttccagccacacgggcccctgagggtaccagggagctggaggccccctctgaagataattctggaagaactgccccagcagggacctcagtgcaggcccagccagtgctgcccactgacagcgccagccgaggtggagtggccgtggtccccgcatcaggtgactgtgtccccagcccctgccacaatggtgggacatgcttggaggaggaggaaggggtccgctgcctatgtctgcctggctatgggggggacctgtgcgatgttggcctccgcttctgcaaccccggctgggacgccttccagggcgcctgctacaagcacttttccacacgaaggagctgggaggaggcagagacccagtgccggatgtacggcgcgcatctggccagcatcagcacacccgaggaacaggacttcatcaacaaccggtaccgggagtaccagtggatcggactcaacgacaggaccatcgaaggcgacttcttgtggtcggatggcgtccccctgctctatgagaactggaaccctgggcagcctgacagctacttcctgtctggagagaactgcgtggtcatggtgtggcatgatcagggacaatggagtgacgtgccctgcaactaccacctgtcctacacctgcaagatggggctggtgtcctgtgggccgccaccggagctgcccctggctcaagtgttcggccgcccacggctgcgctatgaggtggacactgtgcttcgctaccggtgccgggaaggactggcccagcgcaatctgccgctgatccgatgccaagagaacggtcgttgggaggccccccagatctcctgtgtgcccagaagacctgcccgagctctgcacccagaggaggacccagaaggacgtcaggggaggctactgggacgctggaaggcgctgttgatccccccttccagccccatgccaggtccctagggggcaaggccttgaacactgccggccacagcactgccctgtcacccaaattttccctcacaccctgcgctcccgccaccacaggaagtgacaacatgacgaggggtggtgctggagtccaggtgacagttcctgaaggggcttctgggaaatacctaggaggctccagcccagcccaggccctctccccctaccctgggcaccagatcttccatcagggccggagtaaatccctaagtgcctcaactgccctctccctggcagccatcttgtcccctctattcctctagggagcactgtgcccactctttctgggttttccaagggaatgggcttgcaggatggagtgtctgtaaaatcaacaggaaataaaactgtgtatgagcccagaaagaaaaaaaagaaacaacaaaanaaaaccaaaaacaaaaaaagggggcgccccccaaaaaaacaccccccgggggaccccaaagtagcgacccccactttttttgcaaaggggggcccccacaagagggcagcacgattataaaagaccggcgccggccaccgaggcataaaacaccgcggtgtgtgggaacaacgcgtgccagtggaacatctgcgggaggaaccaccactgcgagggcgggaaaaatgggcacgacacacgcgaaaattagcccacgcgaacacaggggacttaacgcacacaggacagaggccgg

SEQ ID NO: 733224 - DNA, 1720 bp, Homo sapiens
cctacttcgctcgtccttgctctcgccgctgctgccggagccgaagcagagaaggcagcgggtcccgtgaccgtcccgagagccccgcgctcccgaccagggggcgggggcggccccggggagggcggggcaggggcggggggaagaaagggggttttgtgctgcgccgggagggccggcgccctcttccgaatgtcctgcggccccagcctctcctcacgctcgcgcagtctccgccgcagtctcagctgcagctgcaggactgagccgtgcacccggaggagacccccggaggaggcgacaaacttcgcagtgccgcgacccaaccccagccctgggtagcctgcagcatggcccagctgttcctgcccctgctggcagccctggtcctggcccaggctcctgcagctttagcagatgttctggaaggagacagctcagaggaccgcgcttttcgcgtgcgcatcgcgggcgacgcgccactgcagggcgtgctcggcggcgccctcaccatcccttgccacgtccactacctgcggccaccgccgagccgccgggctgtgctgggctctccgcgggtcaagtggactttcctgtcccggggccgggaggcagaggtgctggtggcgcggggagtgcgcgtcaaggtgaacgaggcctaccggttccgcgtggcactgcctgcgtacccagcgtcgctcaccgacgtctccctggcgctgagcgagctgcgccccaacgactcaggtatctatcgctgtgaggtccagcacggcatcgatgacagcagcgacgctgtggaggtcaaggtcaaaggggtcgtctttctctaccgagagggctctgcccgctatgctttctccttttctggggcccaggaggcctgtgcccgcattggagcccacatcgccaccccggagcagctctatgccgcctaccttgggggctatgagcaatgtgatgctggctggctgtcggatcagaccgtgaggtatcccatccagaccccacgagaggcctgttacggagacatggatggcttccccggggtccggaactatggtgtggtggacccggatgacctctatgatgtgtactgttatgctgaagacctaaatggagaactgttcctgggtgaccctccagagaagctgacattggaggaagcacgggcgtactgccaggagcggggtgcagagattgccaccacgggccaactgtatgcagcctgggatggtggcctggaccactgcagcccagggtggctagctgatggcagtgtgcgctaccccatcgtcacacccagccagcgctgtggtgggggcttgcctggtgtcaagactctcttcctcttccccaaccagactggcttccccaataagcacagccgcttcaacgtctactgcttccgagactcggcccagccttctgccatccctgaggcctccaacccagcccaggccctctccccctaccctgggcaccagatcttccatcagggccggagtaaatccctaagtgcctcaactgccctctccctggcagccatcttgtcccctctattcctctagggagcactgtgcccactctttctgggttttccaagggaatgggcttgcaggatggagtgtctgtaaaatcaacaggaaataaaactgtgtatgagccccaaaaaaaacacaaaacaaaaaaaaaaaaaaaaaaaaaaaacaaaaaaaaa

SEQ ID NO: 733225 - DNA, 3213 bp, Homo sapiens
cctacttcgctcgtccttgctctcgccgctgctgccggagccgaagcagagaaggcagcgggtcccgtgaccgtcccgagagccccgcgctcccgaccagggggcgggggcggccccggggagggcggggcaggggcggggggaagaaagggggttttgtgctgcgccgggagggccggcgccctcttccgaatgtcctgcggccccagcctctcctcacgctcgcgcagtctccgccgcagtctcagctgcagctgcaggactgagccgtgcacccggaggagacccccggaggaggcgacaaacttcgcagtgccgcgacccaaccccagccctgggtagcctgcagcatggcccagctgttcctgcccctgctggcagccctggtcctggcccaggctcctgcagctttagcagatgttctggaaggagacagctcagaggaccgcgcttttcgcgtgcgcatcgcgggcgacgcgccactgcagggcgtgctcggcggcgccctcaccatcccttgccacgtccactacctgcggccaccgccgagccgccgggctgtgctgggctctccgcgggtcaagtggactttcctgtcccggggccgggaggcagaggtgctggtggcgcggggagtgcgcgtcaaggtgaacgaggcctaccggttccgcgtggcactgcctgcgtacccagcgtcgctcaccgacgtctccctggcgctgagcgagctgcgccccaacgactcaggtatctatcgctgtgaggtccagcacggcatcgatgacagcagcgacgctgtggaggtcaaggtcaaaggggtcgtctttctctaccgagagggctctgcccgctatgctttctccttttctggggcccaggaggcctgtgcccgcattggagcccacatcgccaccccggagcagctctatgccgcctaccttgggggctatgagcaatgtgatgctggctggctgtcggatcagaccgtgaggtatcccatccagaccccacgagaggcctgttacggagacatggatggcttccccggggtccggaactatggtgtggtggacccggatgacctctatgatgtgtactgttatgctgaagacctaaatggagaactgttcctgggtgaccctccagagaagctgacattggaggaagcacgggcgtactgccaggagcggggtgcagagattgccaccacgggccaactgtatgcagcctgggatggtggcctggaccactgcagcccagggtggctagctgatggcagtgtgcgctaccccatcgtcacacccagccagcgctgtggtgggggcttgcctggtgtcaagactctcttcctcttccccaaccagactggcttccccaataagcacagccgcttcaacgtctactgcttccgagactcggcccagccttctgccatccctgaggcctccaacccagcctccaacccagcctctgatggactagaggctatcgtcacagtgacagagaccctggaggaactgcagctgcctcaggaagccacagagagtgaatcccgtggggccatctactccatccccatcatggaggacggaggaggtggaagctccactccagaagacccagcagaggcccctaggacgctcctagaatttgaaacacaatccatggtaccgcccacggggttctcagaagaggaaggtaaggcattggaggaagaagagaaatatgaagatgaagaagagaaagaggaggaagaagaagaggaggaggtggaggatgaggctctgtgggcatggcccagcgagctcagcagcccgggccctgaggcctctctccccactgagccagcagcccaggaggagtcactctcccaggcgccagcaagggcagtcctgcagcctggtgcatcaccacttcctgatggagagtcagaagcttccaggcctccaagggtccatggaccacctactgagactctgcccactcccagggagaggaacctagcatccccatcaccttccactctggttgaggactgtgtccccagcccctgccacaatggtgggacatgcttggaggaggaggaaggggtccgctgcctatgtctgcctggctatgggggggacctgtgcgatgttggcctccgcttctgcaaccccggctgggacgccttccagggcgcctgctacaagcacttttccacacgaaggagctgggaggaggcagagacccagtgccggatgtacggcgcgcatctggccagcatcagcacacccgaggaacaggacttcatcaacaaccggtaccgggagtaccagtggatcggactcaacgacaggaccatcgaaggcgacttcttgtggtcggatggcgtccccctgctctatgagaactggaaccctgggcagcctgacagctacttcctgtctggagagaactgcgtggtcatggtgtggcatgatcagggacaatggagtgacgtgccctgcaactaccacctgtcctacacctgcaagatggggctggtgtcctgtgggccgccaccggagctgcccctggctcaagtgttcggccgcccacggctgcgctatgaggtggacactgtgcttcgctaccggtgccgggaaggactggcccagcgcaatctgccgctgatccgatgccaagagaacggtcgttgggaggccccccagatctcctgtgtgcccagaagacctgcccgagctctgcacccagaggaggacccagaaggacgtcaggggaggctactgggacgctggaaggcgctgttgatccccccttccagccccatgccaggtccctagggggcaaggccttgaacactgccggccacagcactgccctgtcacccaaattttccctcacaccctgcgctcccgccaccacaggaagtgacaacatgacgaggggtggtgctggagtccaggtgacagttcctgaaggggcttctgggaaatacctaggaggctccagcccagcccaggccctctccccctaccctgggcaccagatcttccatcagggccggagtaaatccctaagtgcctcaactgccctctccctggcagccatcttgtcccctctattcctctagggagcactgtgcccactctttctgggttttccaagggaatgggcttgcaggatggagtgtctgtaaaatcaacaggaaataaaactgtgtatgagccc

SEQ ID NO: 733226 - DNA, 3264 bp, Homo sapiens
cctacttcgctcgtccttgctctcgccgctgctgccggagccgaagcagagaaggcagcgggtcccgtgaccgtcccgagagccccgcgctcccgaccagggggcgggggcggccccggggagggcggggcaggggcggggggaagaaagggggttttgtgctgcgccgggagggccggcgccctcttccgaatgtcctgcggccccagcctctcctcacgctcgcgcagtctccgccgcagtctcagctgcagctgcaggactgagccgtgcacccggaggagacccccggaggaggcgacaaacttcgcagtgccgcgacccaaccccagccctgggtagcctgcagcatggcccagctgttcctgcccctgctggcagccctggtcctggcccaggctcctgcagctttagcagatgttctggaaggagacagctcagaggaccgcgcttttcgcgtgcgcatcgcgggcgacgcgccactgcagggcgtgctcggcggcgccctcaccatcccttgccacgtccactacctgcggccaccgccgagccgccgggctgtgctgggctctccgcgggtcaagtggactttcctgtcccggggccgggaggcagaggtgctggtggcgcggggagtgcgcgtcaaggtgaacgaggcctaccggttccgcgtggcactgcctgcgtacccagcgtcgctcaccgacgtctccctggcgctgagcgagctgcgccccaacgactcaggtatctatcgctgtgaggtccagcacggcatcgatgacagcagcgacgctgtggaggtcaaggtcaaaggggtcgtctttctctaccgagagggctctgcccgctatgctttctccttttctggggcccaggaggcctgtgcccgcattggagcccacatcgccaccccggagcagctctatgccgcctaccttgggggctatgagcaatgtgatgctggctggctgtcggatcagaccgtgaggtatcccatccagaccccacgagaggcctgttacggagacatggatggcttccccggggtccggaactatggtgtggtggacccggatgacctctatgatgtgtactgttatgctgaagacctaaatggagaactgttcctgggtgaccctccagagaagctgacattggaggaagcacgggcgtactgccaggagcggggtgcagagattgccaccacgggccaactgtatgcagcctgggatggtggcctggaccactgcagcccagggtggctagctgatggcagtgtgcgctaccccatcgtcacacccagccagcgctgtggtgggggcttgcctggtgtcaagactctcttcctcttccccaaccagactggcttccccaataagcacagccgcttcaacgtctactgcttccgagactcggcccagccttctgccatccctgaggcctccaacccagcctccaacccagcctctgatggactagaggctatcgtcacagtgacagagaccctggaggaactgcagctgcctcaggaagccacagagagtgaatcccgtggggccatctactccatccccatcatggaggacggaggaggtggaagctccactccagaagacccagcagaggcccctaggacgctcctagaatttgaaacacaatccatggtaccgcccacggggttctcagaagaggaaggtaaggcattggaggaagaagagaaatatgaagatgaagaagagaaagaggaggaagaagaagaggaggaggtggaggatgaggctctgtgggcatggcccagcgagctcagcagcccgggccctgaggcctctctccccactgagccagcagcccaggaggagtcactctcccaggcgccagcaagggcagtcctgcagcctggtgcatcaccacttcctgatggagagtcagaagcttccaggcctccaagggtccatggaccacctactgagactctgcccactcccagggagaggaacctagcatccccatcaccttccactctggttgaggactgtgtccccagcccctgccacaatggtgggacatgcttggaggaggaggaaggggtccgctgcctatgtctgcctggctatgggggggacctgtgcgatgttggcctccgcttctgcaaccccggctgggacgccttccagggcgcctgctacaagcacttttccacacgaaggagctgggaggaggcagagacccagtgccggatgtacggcgcgcatctggccagcatcagcacacccgaggaacaggacttcatcaacaaccggtaccgggagtaccagtggatcggactcaacgacaggaccatcgaaggcgacttcttgtggtcggatggcgtccccctgctctatgagaactggaaccctgggcagcctgacagctacttcctgtctggagagaactgcgtggtcatggtgtggcatgatcagggacaatggagtgacgtgccctgcaactaccacctgtcctacacctgcaagatggggctggtgtcctgtgggccgccaccggagctgcccctggctcaagtgttcggccgcccacggctgcgctatgaggtggacactgtgcttcgctaccggtgccgggaaggactggcccagcgcaatctgccgctgatccgatgccaagagaacggtcgttgggaggccccccagatctcctgtgtgcccagaagacctgcccgagctctgcacccagaggaggacccagaaggacgtcaggggaggctactgggacgctggaaggcgctgttgatccccccttccagccccatgccaggtccctagggggcaaggccttgaacactgccggccacagcactgccctgtcacccaaattttccctcacaccctgcgctcccgccaccacaggaagtgacaacatgacgaggggtggtgctggagtccaggtgacagttcctgaaggggcttctgggaaatacctaggaggctccagcccagcccaggccctctccccctaccctgggcaccagatcttccatcagggccggagtaaatccctaagtgcctcaactgccctctccctggcagccatcttgtcccctctattcctctagggagcactgtgcccactctttctgggttttccaagggaatgggcttgcaggatggagtgtctgtaaaatcaacaggaaataaaactgtgtatgagccccaaaaaaaacacaaaacaaaaaaaaaaaaaaaaaaaaaaaacaaaaaaaaa

SEQ ID NO: 733227 - DNA, 3535 bp, Homo sapiens
  misc_feature (3240)..(3240): n is a, c, g, or t
cctacttcgctcgtccttgctctcgccgctgctgccggagccgaagcagagaaggcagcgggtcccgtgaccgtcccgagagccccgcgctcccgaccagggggcgggggcggccccggggagggcggggcaggggcggggggaagaaagggggttttgtgctgcgccgggagggccggcgccctcttccgaatgtcctgcggccccagcctctcctcacgctcgcgcagtctccgccgcagtctcagctgcagctgcaggactgagccgtgcacccggaggagacccccggaggaggcgacaaacttcgcagtgccgcgacccaaccccagccctgggtagcctgcagcatggcccagctgttcctgcccctgctggcagccctggtcctggcccaggctcctgcagctttagcagatgttctggaaggagacagctcagaggaccgcgcttttcgcgtgcgcatcgcgggcgacgcgccactgcagggcgtgctcggcggcgccctcaccatcccttgccacgtccactacctgcggccaccgccgagccgccgggctgtgctgggctctccgcgggtcaagtggactttcctgtcccggggccgggaggcagaggtgctggtggcgcggggagtgcgcgtcaaggtgaacgaggcctaccggttccgcgtggcactgcctgcgtacccagcgtcgctcaccgacgtctccctggcgctgagcgagctgcgccccaacgactcaggtatctatcgctgtgaggtccagcacggcatcgatgacagcagcgacgctgtggaggtcaaggtcaaaggggtcgtctttctctaccgagagggctctgcccgctatgctttctccttttctggggcccaggaggcctgtgcccgcattggagcccacatcgccaccccggagcagctctatgccgcctaccttgggggctatgagcaatgtgatgctggctggctgtcggatcagaccgtgaggtatcccatccagaccccacgagaggcctgttacggagacatggatggcttccccggggtccggaactatggtgtggtggacccggatgacctctatgatgtgtactgttatgctgaagacctaaatggagaactgttcctgggtgaccctccagagaagctgacattggaggaagcacgggcgtactgccaggagcggggtgcagagattgccaccacgggccaactgtatgcagcctgggatggtggcctggaccactgcagcccagggtggctagctgatggcagtgtgcgctaccccatcgtcacacccagccagcgctgtggtgggggcttgcctggtgtcaagactctcttcctcttccccaaccagactggcttccccaataagcacagccgcttcaacgtctactgcttccgagactcggcccagccttctgccatccctgaggcctccaacccagcctccaacccagcctctgatggactagaggctatcgtcacagtgacagagaccctggaggaactgcagctgcctcaggaagccacagagagtgaatcccgtggggccatctactccatccccatcatggaggacggaggaggtggaagctccactccagaagacccagcagaggcccctaggacgctcctagaatttgaaacacaatccatggtaccgcccacggggttctcagaagaggaaggtaaggcattggaggaagaagagaaatatgaagatgaagaagagaaagaggaggaagaagaagaggaggaggtggaggatgaggctctgtgggcatggcccagcgagctcagcagcccgggccctgaggcctctctccccactgagccagcagcccaggaggagtcactctcccaggcgccagcaagggcagtcctgcagcctggtgcatcaccacttcctgatggagagtcagaagcttccaggcctccaagggtccatggaccacctactgagactctgcccactcccagggagaggaacctagcatccccatcaccttccactctggttgaggactgtgtccccagcccctgccacaatggtgggacatgcttggaggaggaggaaggggtccgctgcctatgtctgcctggctatgggggggacctgtgcgatgttggcctccgcttctgcaaccccggctgggacgccttccagggcgcctgctacaagcacttttccacacgaaggagctgggaggaggcagagacccagtgccggatgtacggcgcgcatctggccagcatcagcacacccgaggaacaggacttcatcaacaaccggtaccgggagtaccagtggatcggactcaacgacaggaccatcgaaggcgacttcttgtggtcggatggcgtccccctgctctatgagaactggaaccctgggcagcctgacagctacttcctgtctggagagaactgcgtggtcatggtgtggcatgatcagggacaatggagtgacgtgccctgcaactaccacctgtcctacacctgcaagatggggctggtgtcctgtgggccgccaccggagctgcccctggctcaagtgttcggccgcccacggctgcgctatgaggtggacactgtgcttcgctaccggtgccgggaaggactggcccagcgcaatctgccgctgatccgatgccaagagaacggtcgttgggaggccccccagatctcctgtgtgcccagaagacctgcccgagctctgcacccagaggaggacccagaaggacgtcaggggaggctactgggacgctggaaggcgctgttgatccccccttccagccccatgccaggtccctagggggcaaggccttgaacactgccggccacagcactgccctgtcacccaaattttccctcacaccctgcgctcccgccaccacaggaagtgacaacatgacgaggggtggtgctggagtccaggtgacagttcctgaaggggcttctgggaaatacctaggaggctccagcccagcccaggccctctccccctaccctgggcaccagatcttccatcagggccggagtaaatccctaagtgcctcaactgccctctccctggcagccatcttgtcccctctattcctctagggagcactgtgcccactctttctgggttttccaagggaatgggcttgcaggatggagtgtctgtaaaatcaacaggaaataaaactgtgtatgagcccagaaagaaaaaaaagaaacaacaaaanaaaaccaaaaacaaaaaaagggggcgccccccaaaaaaacaccccccgggggaccccaaagtagcgacccccactttttttgcaaaggggggcccccacaagagggcagcacgattataaaagaccggcgccggccaccgaggcataaaacaccgcggtgtgtgggaacaacgcgtgccagtggaacatctgcgggaggaaccaccactgcgagggcgggaaaaatgggcacgacacacgcgaaaattagcccacgcgaacacaggggacttaacgcacacaggacagaggccgg

SEQ ID NO: 733228 - DNA, 3209 bp, Homo sapiens
cctacttcgctcgtccttgctctcgccgctgctgccggagccgaagcagagaaggcagcgggtcccgtgaccgtcccgagagccccgcgctcccgaccagggggcgggggcggccccggggagggcggggcaggggcggggggaagaaagggggttttgtgctgcgccgggagggccggcgccctcttccgaatgtcctgcggccccagcctctcctcacgctcgcgcagtctccgccgcagtctcagctgcagctgcaggactgagccgtgcacccggaggagacccccggaggaggcgacaaacttcgcagtgccgcgacccaaccccagccctgggtagcctgcagcatggcccagctgttcctgcccctgctggcagccctggtcctggcccaggctcctgcagctttagcagatgttctggaaggagacagctcagaggaccgcgcttttcgcgtgcgcatcgcgggcgacgcgccactgcagggcgtgctcggcggcgccctcaccatcccttgccacgtccactacctgcggccaccgccgagccgccgggctgtgctgggctctccgcgggtcaagtggactttcctgtcccggggccgggaggcagaggtgctggtggcgcggggagtgcgcgtcaaggtgaacgaggcctaccggttccgcgtggcactgcctgcgtacccagcgtcgctcaccgacgtctccctggcgctgagcgagctgcgccccaacgactcaggtatctatcgctgtgaggtccagcacggcatcgatgacagcagcgacgctgtggaggtcaaggtcaaaggggtcgtctttctctaccgagagggctctgcccgctatgctttctccttttctggggcccaggaggcctgtgcccgcattggagcccacatcgccaccccggagcagctctatgccgcctaccttgggggctatgagcaatgtgatgctggctggctgtcggatcagaccgtgaggtatcccatccagaccccacgagaggcctgttacggagacatggatggcttccccggggtccggaactatggtgtggtggacccggatgacctctatgatgtgtactgttatgctgaagacctaaatggagaactgttcctgggtgaccctccagagaagctgacattggaggaagcacgggcgtactgccaggagcggggtgcagagattgccaccacgggccaactgtatgcagcctgggatggtggcctggaccactgcagcccagggtggctagctgatggcagtgtgcgctaccccatcgtcacacccagccagcgctgtggtgggggcttgcctggtgtcaagactctcttcctcttccccaaccagactggcttccccaataagcacagccgcttcaacgtctactgcttccgagactcggcccagccttctgccatccctgaggcctccaacccagcctccaacccagcctctgatggactagaggctatcgtcacagtgacagagaccctggaggaactgcagctgcctcaggaagccacagagagtgaatcccgtggggccatctactccatccccatcatggaggacggaggaggtggaagctccactccagaagacccagcagaggcccctaggacgctcctagaatttgaaacacaatccatggtaccgcccacggggttctcagaagaggaaggtaaggcattggaggaagaagagaaatatgaagatgaagaagagaaagaggaggaagaagaagaggaggaggtggaggatgaggctctgtgggcatggcccagcgagctcagcagcccgggccctgaggcctctctccccactgagccagcagcccaggaggagtcactctcccaggcgccagcaagggcagtcctgcagcctggtgcatcaccacttcctgatggagagtcagaagcttccaggcctccaagggtccatggaccacctactgagactctgcccactcccagggagaggaacctagcatccccatcaccttccactctggttgaggcaagagaggtgggggaggcaactggtggtcctgagctatctggggtccctcgaggagagagcgaggagacaggaagctccgagggtgccccttccctgcttccagccacacgggcccctgagggtaccagggagctggaggccccctctgaagataattctggaagaactgccccagcagggacctcagtgcaggcccagccagtgctgcccactgacagcgccagccgaggtggagtggccgtggtccccgcatcaggtaccggtaccgggagtaccagtggatcggactcaacgacaggaccatcgaaggcgacttcttgtggtcggatggcgtccccctgctctatgagaactggaaccctgggcagcctgacagctacttcctgtctggagagaactgcgtggtcatggtgtggcatgatcagggacaatggagtgacgtgccctgcaactaccacctgtcctacacctgcaagatggggctggtgtcctgtgggccgccaccggagctgcccctggctcaagtgttcggccgcccacggctgcgctatgaggtggacactgtgcttcgctaccggtgccgggaaggactggcccagcgcaatctgccgctgatccgatgccaagagaacggtcgttgggaggccccccagatctcctgtgtgcccagaagacctgcccgagctctgcacccagaggaggacccagaaggacgtcaggggaggctactgggacgctggaaggcgctgttgatccccccttccagccccatgccaggtccctagggggcaaggccttgaacactgccggccacagcactgccctgtcacccaaattttccctcacaccctgcgctcccgccaccacaggaagtgacaacatgacgaggggtggtgctggagtccaggtgacagttcctgaaggggcttctgggaaatacctaggaggctccagcccagcccaggccctctccccctaccctgggcaccagatcttccatcagggccggagtaaatccctaagtgcctcaactgccctctccctggcagccatcttgtcccctctattcctctagggagcactgtgcccactctttctgggttttccaagggaatgggcttgcaggatggagtgtctgtaaaatcaacaggaaataaaactgtgtatgagccc

SEQ ID NO: 733229 - DNA, 3260 bp, Homo sapiens
cctacttcgctcgtccttgctctcgccgctgctgccggagccgaagcagagaaggcagcgggtcccgtgaccgtcccgagagccccgcgctcccgaccagggggcgggggcggccccggggagggcggggcaggggcggggggaagaaagggggttttgtgctgcgccgggagggccggcgccctcttccgaatgtcctgcggccccagcctctcctcacgctcgcgcagtctccgccgcagtctcagctgcagctgcaggactgagccgtgcacccggaggagacccccggaggaggcgacaaacttcgcagtgccgcgacccaaccccagccctgggtagcctgcagcatggcccagctgttcctgcccctgctggcagccctggtcctggcccaggctcctgcagctttagcagatgttctggaaggagacagctcagaggaccgcgcttttcgcgtgcgcatcgcgggcgacgcgccactgcagggcgtgctcggcggcgccctcaccatcccttgccacgtccactacctgcggccaccgccgagccgccgggctgtgctgggctctccgcgggtcaagtggactttcctgtcccggggccgggaggcagaggtgctggtggcgcggggagtgcgcgtcaaggtgaacgaggcctaccggttccgcgtggcactgcctgcgtacccagcgtcgctcaccgacgtctccctggcgctgagcgagctgcgccccaacgactcaggtatctatcgctgtgaggtccagcacggcatcgatgacagcagcgacgctgtggaggtcaaggtcaaaggggtcgtctttctctaccgagagggctctgcccgctatgctttctccttttctggggcccaggaggcctgtgcccgcattggagcccacatcgccaccccggagcagctctatgccgcctaccttgggggctatgagcaatgtgatgctggctggctgtcggatcagaccgtgaggtatcccatccagaccccacgagaggcctgttacggagacatggatggcttccccggggtccggaactatggtgtggtggacccggatgacctctatgatgtgtactgttatgctgaagacctaaatggagaactgttcctgggtgaccctccagagaagctgacattggaggaagcacgggcgtactgccaggagcggggtgcagagattgccaccacgggccaactgtatgcagcctgggatggtggcctggaccactgcagcccagggtggctagctgatggcagtgtgcgctaccccatcgtcacacccagccagcgctgtggtgggggcttgcctggtgtcaagactctcttcctcttccccaaccagactggcttccccaataagcacagccgcttcaacgtctactgcttccgagactcggcccagccttctgccatccctgaggcctccaacccagcctccaacccagcctctgatggactagaggctatcgtcacagtgacagagaccctggaggaactgcagctgcctcaggaagccacagagagtgaatcccgtggggccatctactccatccccatcatggaggacggaggaggtggaagctccactccagaagacccagcagaggcccctaggacgctcctagaatttgaaacacaatccatggtaccgcccacggggttctcagaagaggaaggtaaggcattggaggaagaagagaaatatgaagatgaagaagagaaagaggaggaagaagaagaggaggaggtggaggatgaggctctgtgggcatggcccagcgagctcagcagcccgggccctgaggcctctctccccactgagccagcagcccaggaggagtcactctcccaggcgccagcaagggcagtcctgcagcctggtgcatcaccacttcctgatggagagtcagaagcttccaggcctccaagggtccatggaccacctactgagactctgcccactcccagggagaggaacctagcatccccatcaccttccactctggttgaggcaagagaggtgggggaggcaactggtggtcctgagctatctggggtccctcgaggagagagcgaggagacaggaagctccgagggtgccccttccctgcttccagccacacgggcccctgagggtaccagggagctggaggccccctctgaagataattctggaagaactgccccagcagggacctcagtgcaggcccagccagtgctgcccactgacagcgccagccgaggtggagtggccgtggtccccgcatcaggtaccggtaccgggagtaccagtggatcggactcaacgacaggaccatcgaaggcgacttcttgtggtcggatggcgtccccctgctctatgagaactggaaccctgggcagcctgacagctacttcctgtctggagagaactgcgtggtcatggtgtggcatgatcagggacaatggagtgacgtgccctgcaactaccacctgtcctacacctgcaagatggggctggtgtcctgtgggccgccaccggagctgcccctggctcaagtgttcggccgcccacggctgcgctatgaggtggacactgtgcttcgctaccggtgccgggaaggactggcccagcgcaatctgccgctgatccgatgccaagagaacggtcgttgggaggccccccagatctcctgtgtgcccagaagacctgcccgagctctgcacccagaggaggacccagaaggacgtcaggggaggctactgggacgctggaaggcgctgttgatccccccttccagccccatgccaggtccctagggggcaaggccttgaacactgccggccacagcactgccctgtcacccaaattttccctcacaccctgcgctcccgccaccacaggaagtgacaacatgacgaggggtggtgctggagtccaggtgacagttcctgaaggggcttctgggaaatacctaggaggctccagcccagcccaggccctctccccctaccctgggcaccagatcttccatcagggccggagtaaatccctaagtgcctcaactgccctctccctggcagccatcttgtcccctctattcctctagggagcactgtgcccactctttctgggttttccaagggaatgggcttgcaggatggagtgtctgtaaaatcaacaggaaataaaactgtgtatgagccccaaaaaaaacacaaaacaaaaaaaaaaaaaaaaaaaaaaaacaaaaaaaaa

SEQ ID NO: 733230 - DNA, 3531 bp, Homo sapiens
  misc_feature (3236)..(3236): n is a, c, g, or t
cctacttcgctcgtccttgctctcgccgctgctgccggagccgaagcagagaaggcagcgggtcccgtgaccgtcccgagagccccgcgctcccgaccagggggcgggggcggccccggggagggcggggcaggggcggggggaagaaagggggttttgtgctgcgccgggagggccggcgccctcttccgaatgtcctgcggccccagcctctcctcacgctcgcgcagtctccgccgcagtctcagctgcagctgcaggactgagccgtgcacccggaggagacccccggaggaggcgacaaacttcgcagtgccgcgacccaaccccagccctgggtagcctgcagcatggcccagctgttcctgcccctgctggcagccctggtcctggcccaggctcctgcagctttagcagatgttctggaaggagacagctcagaggaccgcgcttttcgcgtgcgcatcgcgggcgacgcgccactgcagggcgtgctcggcggcgccctcaccatcccttgccacgtccactacctgcggccaccgccgagccgccgggctgtgctgggctctccgcgggtcaagtggactttcctgtcccggggccgggaggcagaggtgctggtggcgcggggagtgcgcgtcaaggtgaacgaggcctaccggttccgcgtggcactgcctgcgtacccagcgtcgctcaccgacgtctccctggcgctgagcgagctgcgccccaacgactcaggtatctatcgctgtgaggtccagcacggcatcgatgacagcagcgacgctgtggaggtcaaggtcaaaggggtcgtctttctctaccgagagggctctgcccgctatgctttctccttttctggggcccaggaggcctgtgcccgcattggagcccacatcgccaccccggagcagctctatgccgcctaccttgggggctatgagcaatgtgatgctggctggctgtcggatcagaccgtgaggtatcccatccagaccccacgagaggcctgttacggagacatggatggcttccccggggtccggaactatggtgtggtggacccggatgacctctatgatgtgtactgttatgctgaagacctaaatggagaactgttcctgggtgaccctccagagaagctgacattggaggaagcacgggcgtactgccaggagcggggtgcagagattgccaccacgggccaactgtatgcagcctgggatggtggcctggaccactgcagcccagggtggctagctgatggcagtgtgcgctaccccatcgtcacacccagccagcgctgtggtgggggcttgcctggtgtcaagactctcttcctcttccccaaccagactggcttccccaataagcacagccgcttcaacgtctactgcttccgagactcggcccagccttctgccatccctgaggcctccaacccagcctccaacccagcctctgatggactagaggctatcgtcacagtgacagagaccctggaggaactgcagctgcctcaggaagccacagagagtgaatcccgtggggccatctactccatccccatcatggaggacggaggaggtggaagctccactccagaagacccagcagaggcccctaggacgctcctagaatttgaaacacaatccatggtaccgcccacggggttctcagaagaggaaggtaaggcattggaggaagaagagaaatatgaagatgaagaagagaaagaggaggaagaagaagaggaggaggtggaggatgaggctctgtgggcatggcccagcgagctcagcagcccgggccctgaggcctctctccccactgagccagcagcccaggaggagtcactctcccaggcgccagcaagggcagtcctgcagcctggtgcatcaccacttcctgatggagagtcagaagcttccaggcctccaagggtccatggaccacctactgagactctgcccactcccagggagaggaacctagcatccccatcaccttccactctggttgaggcaagagaggtgggggaggcaactggtggtcctgagctatctggggtccctcgaggagagagcgaggagacaggaagctccgagggtgccccttccctgcttccagccacacgggcccctgagggtaccagggagctggaggccccctctgaagataattctggaagaactgccccagcagggacctcagtgcaggcccagccagtgctgcccactgacagcgccagccgaggtggagtggccgtggtccccgcatcaggtaccggtaccgggagtaccagtggatcggactcaacgacaggaccatcgaaggcgacttcttgtggtcggatggcgtccccctgctctatgagaactggaaccctgggcagcctgacagctacttcctgtctggagagaactgcgtggtcatggtgtggcatgatcagggacaatggagtgacgtgccctgcaactaccacctgtcctacacctgcaagatggggctggtgtcctgtgggccgccaccggagctgcccctggctcaagtgttcggccgcccacggctgcgctatgaggtggacactgtgcttcgctaccggtgccgggaaggactggcccagcgcaatctgccgctgatccgatgccaagagaacggtcgttgggaggccccccagatctcctgtgtgcccagaagacctgcccgagctctgcacccagaggaggacccagaaggacgtcaggggaggctactgggacgctggaaggcgctgttgatccccccttccagccccatgccaggtccctagggggcaaggccttgaacactgccggccacagcactgccctgtcacccaaattttccctcacaccctgcgctcccgccaccacaggaagtgacaacatgacgaggggtggtgctggagtccaggtgacagttcctgaaggggcttctgggaaatacctaggaggctccagcccagcccaggccctctccccctaccctgggcaccagatcttccatcagggccggagtaaatccctaagtgcctcaactgccctctccctggcagccatcttgtcccctctattcctctagggagcactgtgcccactctttctgggttttccaagggaatgggcttgcaggatggagtgtctgtaaaatcaacaggaaataaaactgtgtatgagcccagaaagaaaaaaaagaaacaacaaaanaaaaccaaaaacaaaaaaagggggcgccccccaaaaaaacaccccccgggggaccccaaagtagcgacccccactttttttgcaaaggggggcccccacaagagggcagcacgattataaaagaccggcgccggccaccgaggcataaaacaccgcggtgtgtgggaacaacgcgtgccagtggaacatctgcgggaggaaccaccactgcgagggcgggaaaaatgggcacgacacacgcgaaaattagcccacgcgaacacaggggacttaacgcacacaggacagaggccgg

SEQ ID NO: 733231 - DNA, 1779 bp, Homo sapiens
cctacttcgctcgtccttgctctcgccgctgctgccggagccgaagcagagaaggcagcgggtcccgtgaccgtcccgagagccccgcgctcccgaccagggggcgggggcggccccggggagggcggggcaggggcggggggaagaaagggggttttgtgctgcgccgggagggccggcgccctcttccgaatgtcctgcggccccagcctctcctcacgctcgcgcagtctccgccgcagtctcagctgcagctgcaggactgagccgtgcacccggaggagacccccggaggaggcgacaaacttcgcagtgccgcgacccaaccccagccctgggtagcctgcagcatggcccagctgttcctgcccctgctggcagccctggtcctggcccaggctcctgcagctttagcagatgttctggaaggagacagctcagaggaccgcgcttttcgcgtgcgcatcgcgggcgacgcgccactgcagggcgtgctcggcggcgccctcaccatcccttgccacgtccactacctgcggccaccgccgagccgccgggctgtgctgggctctccgcgggtcaagtggactttcctgtcccggggccgggaggcagaggtgctggtggcgcggggagtgcgcgtcaaggtgaacgaggcctaccggttccgcgtggcactgcctgcgtacccagcgtcgctcaccgacgtctccctggcgctgagcgagctgcgccccaacgactcaggtatctatcgctgtgaggtccagcacggcatcgatgacagcagcgacgctgtggaggtcaaggtcaaaggggtcgtctttctctaccgagagggctctgcccgctatgctttctccttttctggggcccaggaggcctgtgcccgcattggagcccacatcgccaccccggagcagctctatgccgcctaccttgggggctatgagcaatgtgatgctggctggctgtcggatcagaccgtgaggtatcccatccagaccccacgagaggcctgttacggagacatggatggcttccccggggtccggaactatggtgtggtggacccggatgacctctatgatgtgtactgttatgctgaagacctaaatggagaactgttcctgggtgaccctccagagaagctgacattggaggaagcacgggcgtactgccaggagcggggtgcagagattgccaccacgggccaactgtatgcagcctgggatggtggccttttcttccccctgcagctctgggtcacctgacctgtagtcctttaacccaccatcatcccaaactctcctgtcctttgccttcattctcttacccacctctacctatgggtctccaatctcggatatccaccttgtgggtatctcagctctccgcgtctttaccctgtgatcccagccccgccactgaccatctgtgacccttccctgccattgggccctccacctgtggctcacatctcgccagccccacagagcatcctcaggcctctccaagggtcctcatcacctattgcagccttcagggctcggcctattttccactactcccttcatccgcctgtgtgccgtcccctttagctgcctcctattgatctcagggaagcctgggagtcccttctcacccctcaacctccggagtccaggagaacccgtacccccacagagccttaagcaactacttctgtgaagtattttttgactgtttcatggaaaacaagccttggaaataaatctctattaaaccgctttgtaacca

SEQ ID NO: 733232 - DNA, 2662 bp, Homo sapiens
cctacttcgctcgtccttgctctcgccgctgctgccggagccgaagcagagaaggcagcgggtcccgtgaccgtcccgagagccccgcgctcccgaccagggggcgggggcggccccggggagggcggggcaggggcggggggaagaaagggggttttgtgctgcgccgggagggccggcgccctcttccgaatgtcctgcggccccagcctctcctcacgctcgcgcagtctccgccgcagtctcagctgcagctgcaggactgagccgtgcacccggaggagacccccggaggaggcgacaaacttcgcagtgccgcgacccaaccccagccctgggtagcctgcagcatggcccagctgttcctgcccctgctggcagccctggtcctggcccaggctcctgcagctttagcagatgttctggaaggagacagctcagaggaccgcgcttttcgcgtgcgcatcgcgggcgacgcgccactgcagggcgtgctcggcggcgccctcaccatcccttgccacgtccactacctgcggccaccgccgagccgccgggctgtgctgggctctccgcgggtcaagtggactttcctgtcccggggccgggaggcagaggtgctggtggcgcggggagtgcgcgtcaaggtgaacgaggcctaccggttccgcgtggcactgcctgcgtacccagcgtcgctcaccgacgtctccctggcgctgagcgagctgcgccccaacgactcaggtatctatcgctgtgaggtccagcacggcatcgatgacagcagcgacgctgtggaggtcaaggtcaaaggggtcgtctttctctaccgagagggctctgcccgctatgctttctccttttctggggcccaggaggcctgtgcccgcattggagcccacatcgccaccccggagcagctctatgccgcctaccttgggggctatgagcaatgtgatgctggctggctgtcggatcagaccgtgaggtatcccatccagaccccacgagaggcctgttacggagacatggatggcttccccggggtccggaactatggtgtggtggacccggatgacctctatgatgtgtactgttatgctgaagacctaaatggagaactgttcctgggtgaccctccagagaagctgacattggaggaagcacgggcgtactgccaggagcggggtgcagagattgccaccacgggccaactgtatgcagcctgggatggtggcctggaccactgcagcccagggtggctagctgatggcagtgtgcgctaccccatcgtcacacccagccagcgctgtggtgggggcttgcctggtgtcaagactctcttcctcttccccaaccagactggccctagaatttgaaacacaatccatggtaccgcccacggggttctcagaagaggaaggtaaggcattggaggaagaagagaaatatgaagatgaagaagagaaagaggaggaagaagaagaggaggaggtggaggatgaggctctgtgggcatggcccagcgagctcagcagcccgggccctgaggcctctctccccactgagccagcagcccaggaggagtcactctcccaggcgccagcaagggcagtcctgcagcctggtgcatcaccacttcctgatggagagtcagaagcttccaggcctccaagggtccatggaccacctactgagactctgcccactcccagggagaggaacctagcatccccatcaccttccactctggttgaggcaagagaggtgggggaggcaactggtggtcctgagctatctggggtccctcgaggagagagcgaggagacaggaagctccgagggtgccccttccctgcttccagccacacgggcccctgagggtaccagggagctggaggccccctctgaagataattctggaagaactgccccagcagggacctcagtgcaggcccagccagtgctgcccactgacagcgccagccgaggtggagtggccgtggtccccgcatcaggtgactgtgtccccagcccctgccacaatggtgggacatgcttggaggaggaggaaggggtccgctgcctatgtctgcctggctatgggggggacctgtgcgatgttggcctccgcttctgcaaccccggctgggacgccttccagggcgcctgctacaagcacttttccacacgaaggagctgggaggaggcagagacccagtgccggatgtacggcgcgcatctggccagcatcagcacacccgaggaacaggacttcatcaacagtgggctgggagacagggcgggaggggcccccgccatatgctctcactctctctcactcgcctaaccgccttcctcattaacccatgcacttattccttggttttctcaagcgtgcattccctcactcattcgttcactccccttctcattctctctcccttcccaccctacgcttaggcagtggccttcgggaacggagagtggaggttcgcgcagtagagtgcgcctgtgtgggccgggccgccgtgcagggggccgcctccaatccctccaacctccctgctctccgacctccgtcggcctcctccaactccaactccaatcttgttgaaagttttgactctttttccaaaactccccttttctagcctggg

SEQ ID NO: 733233 - DNA, 3202 bp, Homo sapiens
cctacttcgctcgtccttgctctcgccgctgctgccggagccgaagcagagaaggcagcgggtcccgtgaccgtcccgagagccccgcgctcccgaccagggggcgggggcggccccggggagggcggggcaggggcggggggaagaaagggggttttgtgctgcgccgggagggccggcgccctcttccgaatgtcctgcggccccagcctctcctcacgctcgcgcagtctccgccgcagtctcagctgcagctgcaggactgagccgtgcacccggaggagacccccggaggaggcgacaaacttcgcagtgccgcgacccaaccccagccctgggtagcctgcagcatggcccagctgttcctgcccctgctggcagccctggtcctggcccaggctcctgcagctttagcagatgttctggaaggagacagctcagaggaccgcgcttttcgcgtgcgcatcgcgggcgacgcgccactgcagggcgtgctcggcggcgccctcaccatcccttgccacgtccactacctgcggccaccgccgagccgccgggctgtgctgggctctccgcgggtcaagtggactttcctgtcccggggccgggaggcagaggtgctggtggcgcggggagtgcgcgtcaaggtgaacgaggcctaccggttccgcgtggcactgcctgcgtacccagcgtcgctcaccgacgtctccctggcgctgagcgagctgcgccccaacgactcaggtatctatcgctgtgaggtccagcacggcatcgatgacagcagcgacgctgtggaggtcaaggtcaaaggggtcgtctttctctaccgagagggctctgcccgctatgctttctccttttctggggcccaggaggcctgtgcccgcattggagcccacatcgccaccccggagcagctctatgccgcctaccttgggggctatgagcaatgtgatgctggctggctgtcggatcagaccgtgaggtatcccatccagaccccacgagaggcctgttacggagacatggatggcttccccggggtccggaactatggtgtggtggacccggatgacctctatgatgtgtactgttatgctgaagacctaaatggagaactgttcctgggtgaccctccagagaagctgacattggaggaagcacgggcgtactgccaggagcggggtgcagagattgccaccacgggccaactgtatgcagcctgggatggtggcctggaccactgcagcccagggtggctagctgatggcagtgtgcgctaccccatcgtcacacccagccagcgctgtggtgggggcttgcctggtgtcaagactctcttcctcttccccaaccagactggccctagaatttgaaacacaatccatggtaccgcccacggggttctcagaagaggaaggtaaggcattggaggaagaagagaaatatgaagatgaagaagagaaagaggaggaagaagaagaggaggaggtggaggatgaggctctgtgggcatggcccagcgagctcagcagcccgggccctgaggcctctctccccactgagccagcagcccaggaggagtcactctcccaggcgccagcaagggcagtcctgcagcctggtgcatcaccacttcctgatggagagtcagaagcttccaggcctccaagggtccatggaccacctactgagactctgcccactcccagggagaggaacctagcatccccatcaccttccactctggttgaggcaagagaggtgggggaggcaactggtggtcctgagctatctggggtccctcgaggagagagcgaggagacaggaagctccgagggtgccccttccctgcttccagccacacgggcccctgagggtaccagggagctggaggccccctctgaagataattctggaagaactgccccagcagggacctcagtgcaggcccagccagtgctgcccactgacagcgccagccgaggtggagtggccgtggtccccgcatcaggtgactgtgtccccagcccctgccacaatggtgggacatgcttggaggaggaggaaggggtccgctgcctatgtctgcctggctatgggggggacctgtgcgatgttggcctccgcttctgcaaccccggctgggacgccttccagggcgcctgctacaagcacttttccacacgaaggagctgggaggaggcagagacccagtgccggatgtacggcgcgcatctggccagcatcagcacacccgaggaacaggacttcatcaacaaccggtaccgggagtaccagtggatcggactcaacgacaggaccatcgaaggcgacttcttgtggtcggatggcgtccccctgctctatgagaactggaaccctgggcagcctgacagctacttcctgtctggagagaactgcgtggtcatggtgtggcatgatcagggacaatggagtgacgtgccctgcaactaccacctgtcctacacctgcaagatggggctggtgtcctgtgggccgccaccggagctgcccctggctcaagtgttcggccgcccacggctgcgctatgaggtggacactgtgcttcgctaccggtgccgggaaggactggcccagcgcaatctgccgctgatccgatgccaagagaacggtcgttgggaggccccccagatctcctgtgtgcccagaagacctgcccgagctctgcacccagaggaggacccagaaggacgtcaggggaggctactgggacgctggaaggcgctgttgatccccccttccagccccatgccaggtccctagggggcaaggccttgaacactgccggccacagcactgccctgtcacccaaattttccctcacaccctgcgctcccgccaccacaggaagtgacaacatgacgaggggtggtgctggagtccaggtgacagttcctgaaggggcttctgggaaatacctaggaggctccagcccagcccaggccctctccccctaccctgggcaccagatcttccatcagggccggagtaaatccctaagtgcctcaactgccctctccctggcagccatcttgtcccctctattcctctagggagcactgtgcccactctttctgggttttccaagggaatgggcttgcaggatggagtgtctgtaaaatcaacaggaaataaaactgtgtatgagccc

SEQ ID NO: 733234 - DNA, 3253 bp, Homo sapiens
cctacttcgctcgtccttgctctcgccgctgctgccggagccgaagcagagaaggcagcgggtcccgtgaccgtcccgagagccccgcgctcccgaccagggggcgggggcggccccggggagggcggggcaggggcggggggaagaaagggggttttgtgctgcgccgggagggccggcgccctcttccgaatgtcctgcggccccagcctctcctcacgctcgcgcagtctccgccgcagtctcagctgcagctgcaggactgagccgtgcacccggaggagacccccggaggaggcgacaaacttcgcagtgccgcgacccaaccccagccctgggtagcctgcagcatggcccagctgttcctgcccctgctggcagccctggtcctggcccaggctcctgcagctttagcagatgttctggaaggagacagctcagaggaccgcgcttttcgcgtgcgcatcgcgggcgacgcgccactgcagggcgtgctcggcggcgccctcaccatcccttgccacgtccactacctgcggccaccgccgagccgccgggctgtgctgggctctccgcgggtcaagtggactttcctgtcccggggccgggaggcagaggtgctggtggcgcggggagtgcgcgtcaaggtgaacgaggcctaccggttccgcgtggcactgcctgcgtacccagcgtcgctcaccgacgtctccctggcgctgagcgagctgcgccccaacgactcaggtatctatcgctgtgaggtccagcacggcatcgatgacagcagcgacgctgtggaggtcaaggtcaaaggggtcgtctttctctaccgagagggctctgcccgctatgctttctccttttctggggcccaggaggcctgtgcccgcattggagcccacatcgccaccccggagcagctctatgccgcctaccttgggggctatgagcaatgtgatgctggctggctgtcggatcagaccgtgaggtatcccatccagaccccacgagaggcctgttacggagacatggatggcttccccggggtccggaactatggtgtggtggacccggatgacctctatgatgtgtactgttatgctgaagacctaaatggagaactgttcctgggtgaccctccagagaagctgacattggaggaagcacgggcgtactgccaggagcggggtgcagagattgccaccacgggccaactgtatgcagcctgggatggtggcctggaccactgcagcccagggtggctagctgatggcagtgtgcgctaccccatcgtcacacccagccagcgctgtggtgggggcttgcctggtgtcaagactctcttcctcttccccaaccagactggccctagaatttgaaacacaatccatggtaccgcccacggggttctcagaagaggaaggtaaggcattggaggaagaagagaaatatgaagatgaagaagagaaagaggaggaagaagaagaggaggaggtggaggatgaggctctgtgggcatggcccagcgagctcagcagcccgggccctgaggcctctctccccactgagccagcagcccaggaggagtcactctcccaggcgccagcaagggcagtcctgcagcctggtgcatcaccacttcctgatggagagtcagaagcttccaggcctccaagggtccatggaccacctactgagactctgcccactcccagggagaggaacctagcatccccatcaccttccactctggttgaggcaagagaggtgggggaggcaactggtggtcctgagctatctggggtccctcgaggagagagcgaggagacaggaagctccgagggtgccccttccctgcttccagccacacgggcccctgagggtaccagggagctggaggccccctctgaagataattctggaagaactgccccagcagggacctcagtgcaggcccagccagtgctgcccactgacagcgccagccgaggtggagtggccgtggtccccgcatcaggtgactgtgtccccagcccctgccacaatggtgggacatgcttggaggaggaggaaggggtccgctgcctatgtctgcctggctatgggggggacctgtgcgatgttggcctccgcttctgcaaccccggctgggacgccttccagggcgcctgctacaagcacttttccacacgaaggagctgggaggaggcagagacccagtgccggatgtacggcgcgcatctggccagcatcagcacacccgaggaacaggacttcatcaacaaccggtaccgggagtaccagtggatcggactcaacgacaggaccatcgaaggcgacttcttgtggtcggatggcgtccccctgctctatgagaactggaaccctgggcagcctgacagctacttcctgtctggagagaactgcgtggtcatggtgtggcatgatcagggacaatggagtgacgtgccctgcaactaccacctgtcctacacctgcaagatggggctggtgtcctgtgggccgccaccggagctgcccctggctcaagtgttcggccgcccacggctgcgctatgaggtggacactgtgcttcgctaccggtgccgggaaggactggcccagcgcaatctgccgctgatccgatgccaagagaacggtcgttgggaggccccccagatctcctgtgtgcccagaagacctgcccgagctctgcacccagaggaggacccagaaggacgtcaggggaggctactgggacgctggaaggcgctgttgatccccccttccagccccatgccaggtccctagggggcaaggccttgaacactgccggccacagcactgccctgtcacccaaattttccctcacaccctgcgctcccgccaccacaggaagtgacaacatgacgaggggtggtgctggagtccaggtgacagttcctgaaggggcttctgggaaatacctaggaggctccagcccagcccaggccctctccccctaccctgggcaccagatcttccatcagggccggagtaaatccctaagtgcctcaactgccctctccctggcagccatcttgtcccctctattcctctagggagcactgtgcccactctttctgggttttccaagggaatgggcttgcaggatggagtgtctgtaaaatcaacaggaaataaaactgtgtatgagccccaaaaaaaacacaaaacaaaaaaaaaaaaaaaaaaaaaaaacaaaaaaaaa

SEQ ID NO: 733235 - DNA, 3524 bp, Homo sapiens
  misc_feature (3229)..(3229): n is a, c, g, or t
cctacttcgctcgtccttgctctcgccgctgctgccggagccgaagcagagaaggcagcgggtcccgtgaccgtcccgagagccccgcgctcccgaccagggggcgggggcggccccggggagggcggggcaggggcggggggaagaaagggggttttgtgctgcgccgggagggccggcgccctcttccgaatgtcctgcggccccagcctctcctcacgctcgcgcagtctccgccgcagtctcagctgcagctgcaggactgagccgtgcacccggaggagacccccggaggaggcgacaaacttcgcagtgccgcgacccaaccccagccctgggtagcctgcagcatggcccagctgttcctgcccctgctggcagccctggtcctggcccaggctcctgcagctttagcagatgttctggaaggagacagctcagaggaccgcgcttttcgcgtgcgcatcgcgggcgacgcgccactgcagggcgtgctcggcggcgccctcaccatcccttgccacgtccactacctgcggccaccgccgagccgccgggctgtgctgggctctccgcgggtcaagtggactttcctgtcccggggccgggaggcagaggtgctggtggcgcggggagtgcgcgtcaaggtgaacgaggcctaccggttccgcgtggcactgcctgcgtacccagcgtcgctcaccgacgtctccctggcgctgagcgagctgcgccccaacgactcaggtatctatcgctgtgaggtccagcacggcatcgatgacagcagcgacgctgtggaggtcaaggtcaaaggggtcgtctttctctaccgagagggctctgcccgctatgctttctccttttctggggcccaggaggcctgtgcccgcattggagcccacatcgccaccccggagcagctctatgccgcctaccttgggggctatgagcaatgtgatgctggctggctgtcggatcagaccgtgaggtatcccatccagaccccacgagaggcctgttacggagacatggatggcttccccggggtccggaactatggtgtggtggacccggatgacctctatgatgtgtactgttatgctgaagacctaaatggagaactgttcctgggtgaccctccagagaagctgacattggaggaagcacgggcgtactgccaggagcggggtgcagagattgccaccacgggccaactgtatgcagcctgggatggtggcctggaccactgcagcccagggtggctagctgatggcagtgtgcgctaccccatcgtcacacccagccagcgctgtggtgggggcttgcctggtgtcaagactctcttcctcttccccaaccagactggccctagaatttgaaacacaatccatggtaccgcccacggggttctcagaagaggaaggtaaggcattggaggaagaagagaaatatgaagatgaagaagagaaagaggaggaagaagaagaggaggaggtggaggatgaggctctgtgggcatggcccagcgagctcagcagcccgggccctgaggcctctctccccactgagccagcagcccaggaggagtcactctcccaggcgccagcaagggcagtcctgcagcctggtgcatcaccacttcctgatggagagtcagaagcttccaggcctccaagggtccatggaccacctactgagactctgcccactcccagggagaggaacctagcatccccatcaccttccactctggttgaggcaagagaggtgggggaggcaactggtggtcctgagctatctggggtccctcgaggagagagcgaggagacaggaagctccgagggtgccccttccctgcttccagccacacgggcccctgagggtaccagggagctggaggccccctctgaagataattctggaagaactgccccagcagggacctcagtgcaggcccagccagtgctgcccactgacagcgccagccgaggtggagtggccgtggtccccgcatcaggtgactgtgtccccagcccctgccacaatggtgggacatgcttggaggaggaggaaggggtccgctgcctatgtctgcctggctatgggggggacctgtgcgatgttggcctccgcttctgcaaccccggctgggacgccttccagggcgcctgctacaagcacttttccacacgaaggagctgggaggaggcagagacccagtgccggatgtacggcgcgcatctggccagcatcagcacacccgaggaacaggacttcatcaacaaccggtaccgggagtaccagtggatcggactcaacgacaggaccatcgaaggcgacttcttgtggtcggatggcgtccccctgctctatgagaactggaaccctgggcagcctgacagctacttcctgtctggagagaactgcgtggtcatggtgtggcatgatcagggacaatggagtgacgtgccctgcaactaccacctgtcctacacctgcaagatggggctggtgtcctgtgggccgccaccggagctgcccctggctcaagtgttcggccgcccacggctgcgctatgaggtggacactgtgcttcgctaccggtgccgggaaggactggcccagcgcaatctgccgctgatccgatgccaagagaacggtcgttgggaggccccccagatctcctgtgtgcccagaagacctgcccgagctctgcacccagaggaggacccagaaggacgtcaggggaggctactgggacgctggaaggcgctgttgatccccccttccagccccatgccaggtccctagggggcaaggccttgaacactgccggccacagcactgccctgtcacccaaattttccctcacaccctgcgctcccgccaccacaggaagtgacaacatgacgaggggtggtgctggagtccaggtgacagttcctgaaggggcttctgggaaatacctaggaggctccagcccagcccaggccctctccccctaccctgggcaccagatcttccatcagggccggagtaaatccctaagtgcctcaactgccctctccctggcagccatcttgtcccctctattcctctagggagcactgtgcccactctttctgggttttccaagggaatgggcttgcaggatggagtgtctgtaaaatcaacaggaaataaaactgtgtatgagcccagaaagaaaaaaaagaaacaacaaaanaaaaccaaaaacaaaaaaagggggcgccccccaaaaaaacaccccccgggggaccccaaagtagcgacccccactttttttgcaaaggggggcccccacaagagggcagcacgattataaaagaccggcgccggccaccgaggcataaaacaccgcggtgtgtgggaacaacgcgtgccagtggaacatctgcgggaggaaccaccactgcgagggcgggaaaaatgggcacgacacacgcgaaaattagcccacgcgaacacaggggacttaacgcacacaggacagaggccgg

SEQ ID NO: 733236 - DNA, 4379 bp, Homo sapiens
cctacttcgctcgtccttgctctcgccgctgctgccggagccgaagcagagaaggcagcgggtcccgtgaccgtcccgagagccccgcgctcccgaccagggggcgggggcggccccggggagggcggggcaggggcggggggaagaaagggggttttgtgctgcgccgggagggccggcgccctcttccgaatgtcctgcggccccagcctctcctcacgctcgcgcagtctccgccgcagtctcagctgcagctgcaggactgagccgtgcacccggaggagacccccggaggaggcgacaaacttcgcagtgccgcgacccaaccccagccctgggtagcctgcagcatggcccagctgttcctgcccctgctggcagccctggtcctggcccaggctcctgcagctttagcagatgttctggaaggagacagctcagaggaccgcgcttttcgcgtgcgcatcgcgggcgacgcgccactgcagggcgtgctcggcggcgccctcaccatcccttgccacgtccactacctgcggccaccgccgagccgccgggctgtgctgggctctccgcgggtcaagtggactttcctgtcccggggccgggaggcagaggtgctggtggcgcggggagtgcgcgtcaaggtgaacgaggcctaccggttccgcgtggcactgcctgcgtacccagcgtcgctcaccgacgtctccctggcgctgagcgagctgcgccccaacgactcaggtatctatcgctgtgaggtccagcacggcatcgatgacagcagcgacgctgtggaggtcaaggtcaaaggggtcgtctttctctaccgagagggctctgcccgctatgctttctccttttctggggcccaggaggcctgtgcccgcattggagcccacatcgccaccccggagcagctctatgccgcctaccttgggggctatgagcaatgtgatgctggctggctgtcggatcagaccgtgaggtatcccatccagaccccacgagaggcctgttacggagacatggatggcttccccggggtccggaactatggtgtggtggacccggatgacctctatgatgtgtactgttatgctgaagacctaaatggagaactgttcctgggtgaccctccagagaagctgacattggaggaagcacgggcgtactgccaggagcggggtgcagagattgccaccacgggccaactgtatgcagcctgggatggtggcctggaccactgcagcccagggtggctagctgatggcagtgtgcgctaccccatcgtcacacccagccagcgctgtggtgggggcttgcctggtgtcaagactctcttcctcttccccaaccagactggccctagaatttgaaacacaatccatggtaccgcccacggggttctcagaagaggaaggtaaggcattggaggaagaagagaaatatgaagatgaagaagagaaagaggaggaagaagaagaggaggaggtggaggatgaggctctgtgggcatggcccagcgagctcagcagcccgggccctgaggcctctctccccactgagccagcagcccaggaggagtcactctcccaggcgccagcaagggcagtcctgcagcctggtgcatcaccacttcctgatggagagtcagaagcttccaggcctccaagggtccatggaccacctactgagactctgcccactcccagggagaggaacctagcatccccatcaccttccactctggttgaggcaagagaggtgggggaggcaactggtggtcctgagctatctggggtccctcgaggagagagcgaggagacaggaagctccgagggtgccccttccctgcttccagccacacgggcccctgagggtaccagggagctggaggccccctctgaagataattctggaagaactgccccagcagggacctcagtgcaggcccagccagtgctgcccactgacagcgccagccgaggtggagtggccgtggtccccgcatcaggtgactgtgtccccagcccctgccacaatggtgggacatgcttggaggaggaggaaggggtccgctgcctatgtctgcctggctatgggggggacctgtgcgatgttggtgagtgttgagggacggggggcaggtttgaagcctggaccctgccacaacgtgctacttctggaggggggagggagaacattggttttggccttgtcattaatgagtccctgttttaggcaagttgcataacttctttgagtcctaccctcaattttcttatctaagtgaaaccacaatgcctctcatagggggtccatttgagaccagtgcaaagcatactcctggcatttaatcggtggtcaatacatgacaggctccattctcctggagaggagagccactgctcgttaggatggagacccaggccggaactccatccctcaccctggttcctgtctcttagaaaaggcaccagcgcccctgcccaagagcccctccaggctcctgctaccccctcattctctactagctcttttgcaccgccctcctgtcccccttagtcccgcccctctcggcctgcggtagtggaaggagaccagccccttccaggggacctggccctctgggttttggggccctaagatgcccgcccttatgtgccgcaggcctccgcttctgcaaccccggctgggacgccttccagggcgcctgctacaagcacttttccacacgaaggagctgggaggaggcagagacccagtgccggatgtacggcgcgcatctggccagcatcagcacacccgaggaacaggacttcatcaacagtgggctgggagacagggcgggaggggcccccgccatatgctctcactctctctcactcgcctaaccgccttcctcattaacccatgcacttattccttggttttctcaagcgtgcattccctcactcattcgttcactccccttctcattctctctcccttcccaccctacgcttaggcagtggccttcgggaacggagagtggaggttcgcgcagtagagtgcgcctgtgtgggccgggccgccgtgcagggggccgcctccaatccctccaacctccctgctctccgacctccgtcggcctcctccaactccaactccaatcttgttgaaagttttgactctttttccaaaactccccttttctagcctgggttgatatcttccttattctcccacccccattcccctgctttccatctggcccttgagcagaggctggggtagaagaacccgacaagggcgggtgctggatcgcggggaagggtttccaaggcagtcaccgcagaccgcccgggagcggggaacggccgccatctgctggcggctgcgctcactgcacgccttcgtctccctagaccggtaccgggagtaccagtggatcggactcaacgacaggaccatcgaaggcgacttcttgtggtcggatggcgtccccctgctctatgagaactggaaccctgggcagcctgacagctacttcctgtctggagagaactgcgtggtcatggtgtggcatgatcagggacaatggagtgacgtgccctgcaactaccacctgtcctacacctgcaagatggggctggtgtcctgtgggccgccaccggagctgcccctggctcaagtgttcggccgcccacggctgcgctatgaggtggacactgtgcttcgctaccggtgccgggaaggactggcccagcgcaatctgccgctgatccgatgccaagagaacggtcgttgggaggccccccagatctcctgtgtgcccagaagacctgcccgagctctgcacccagaggaggacccagaaggacgtcaggggaggctactgggacgctggaaggcgctgttgatccccccttccagccccatgccaggtccctagggggcaaggccttgaacactgccggccacagcactgccctgtcacccaaattttccctcacaccctgcgctcccgccaccacaggaagtgacaacatgacgaggggtggtgctggagtccaggtgacagttcctgaaggggcttctgggaaatacctaggaggctccagcccagcccaggccctctccccctaccctgggcaccagatcttccatcagggccggagtaaatccctaagtgcctcaactgccctctccctggcagccatcttgtcccctctattcctctagggagcactgtgcccactctttctgggttttccaagggaatgggcttgcaggatggagtgtctgtaaaatcaacaggaaataaaactgtgtatgagccccaaaaaaaacacaaaacaaaaaaaaaaaaaaaaaaaaaaaacaaaaaaaaa

SEQ ID NO: 733237 - DNA, 4328 bp, Homo sapiens
cctacttcgctcgtccttgctctcgccgctgctgccggagccgaagcagagaaggcagcgggtcccgtgaccgtcccgagagccccgcgctcccgaccagggggcgggggcggccccggggagggcggggcaggggcggggggaagaaagggggttttgtgctgcgccgggagggccggcgccctcttccgaatgtcctgcggccccagcctctcctcacgctcgcgcagtctccgccgcagtctcagctgcagctgcaggactgagccgtgcacccggaggagacccccggaggaggcgacaaacttcgcagtgccgcgacccaaccccagccctgggtagcctgcagcatggcccagctgttcctgcccctgctggcagccctggtcctggcccaggctcctgcagctttagcagatgttctggaaggagacagctcagaggaccgcgcttttcgcgtgcgcatcgcgggcgacgcgccactgcagggcgtgctcggcggcgccctcaccatcccttgccacgtccactacctgcggccaccgccgagccgccgggctgtgctgggctctccgcgggtcaagtggactttcctgtcccggggccgggaggcagaggtgctggtggcgcggggagtgcgcgtcaaggtgaacgaggcctaccggttccgcgtggcactgcctgcgtacccagcgtcgctcaccgacgtctccctggcgctgagcgagctgcgccccaacgactcaggtatctatcgctgtgaggtccagcacggcatcgatgacagcagcgacgctgtggaggtcaaggtcaaaggggtcgtctttctctaccgagagggctctgcccgctatgctttctccttttctggggcccaggaggcctgtgcccgcattggagcccacatcgccaccccggagcagctctatgccgcctaccttgggggctatgagcaatgtgatgctggctggctgtcggatcagaccgtgaggtatcccatccagaccccacgagaggcctgttacggagacatggatggcttccccggggtccggaactatggtgtggtggacccggatgacctctatgatgtgtactgttatgctgaagacctaaatggagaactgttcctgggtgaccctccagagaagctgacattggaggaagcacgggcgtactgccaggagcggggtgcagagattgccaccacgggccaactgtatgcagcctgggatggtggcctggaccactgcagcccagggtggctagctgatggcagtgtgcgctaccccatcgtcacacccagccagcgctgtggtgggggcttgcctggtgtcaagactctcttcctcttccccaaccagactggccctagaatttgaaacacaatccatggtaccgcccacggggttctcagaagaggaaggtaaggcattggaggaagaagagaaatatgaagatgaagaagagaaagaggaggaagaagaagaggaggaggtggaggatgaggctctgtgggcatggcccagcgagctcagcagcccgggccctgaggcctctctccccactgagccagcagcccaggaggagtcactctcccaggcgccagcaagggcagtcctgcagcctggtgcatcaccacttcctgatggagagtcagaagcttccaggcctccaagggtccatggaccacctactgagactctgcccactcccagggagaggaacctagcatccccatcaccttccactctggttgaggcaagagaggtgggggaggcaactggtggtcctgagctatctggggtccctcgaggagagagcgaggagacaggaagctccgagggtgccccttccctgcttccagccacacgggcccctgagggtaccagggagctggaggccccctctgaagataattctggaagaactgccccagcagggacctcagtgcaggcccagccagtgctgcccactgacagcgccagccgaggtggagtggccgtggtccccgcatcaggtgactgtgtccccagcccctgccacaatggtgggacatgcttggaggaggaggaaggggtccgctgcctatgtctgcctggctatgggggggacctgtgcgatgttggtgagtgttgagggacggggggcaggtttgaagcctggaccctgccacaacgtgctacttctggaggggggagggagaacattggttttggccttgtcattaatgagtccctgttttaggcaagttgcataacttctttgagtcctaccctcaattttcttatctaagtgaaaccacaatgcctctcatagggggtccatttgagaccagtgcaaagcatactcctggcatttaatcggtggtcaatacatgacaggctccattctcctggagaggagagccactgctcgttaggatggagacccaggccggaactccatccctcaccctggttcctgtctcttagaaaaggcaccagcgcccctgcccaagagcccctccaggctcctgctaccccctcattctctactagctcttttgcaccgccctcctgtcccccttagtcccgcccctctcggcctgcggtagtggaaggagaccagccccttccaggggacctggccctctgggttttggggccctaagatgcccgcccttatgtgccgcaggcctccgcttctgcaaccccggctgggacgccttccagggcgcctgctacaagcacttttccacacgaaggagctgggaggaggcagagacccagtgccggatgtacggcgcgcatctggccagcatcagcacacccgaggaacaggacttcatcaacagtgggctgggagacagggcgggaggggcccccgccatatgctctcactctctctcactcgcctaaccgccttcctcattaacccatgcacttattccttggttttctcaagcgtgcattccctcactcattcgttcactccccttctcattctctctcccttcccaccctacgcttaggcagtggccttcgggaacggagagtggaggttcgcgcagtagagtgcgcctgtgtgggccgggccgccgtgcagggggccgcctccaatccctccaacctccctgctctccgacctccgtcggcctcctccaactccaactccaatcttgttgaaagttttgactctttttccaaaactccccttttctagcctgggttgatatcttccttattctcccacccccattcccctgctttccatctggcccttgagcagaggctggggtagaagaacccgacaagggcgggtgctggatcgcggggaagggtttccaaggcagtcaccgcagaccgcccgggagcggggaacggccgccatctgctggcggctgcgctcactgcacgccttcgtctccctagaccggtaccgggagtaccagtggatcggactcaacgacaggaccatcgaaggcgacttcttgtggtcggatggcgtccccctgctctatgagaactggaaccctgggcagcctgacagctacttcctgtctggagagaactgcgtggtcatggtgtggcatgatcagggacaatggagtgacgtgccctgcaactaccacctgtcctacacctgcaagatggggctggtgtcctgtgggccgccaccggagctgcccctggctcaagtgttcggccgcccacggctgcgctatgaggtggacactgtgcttcgctaccggtgccgggaaggactggcccagcgcaatctgccgctgatccgatgccaagagaacggtcgttgggaggccccccagatctcctgtgtgcccagaagacctgcccgagctctgcacccagaggaggacccagaaggacgtcaggggaggctactgggacgctggaaggcgctgttgatccccccttccagccccatgccaggtccctagggggcaaggccttgaacactgccggccacagcactgccctgtcacccaaattttccctcacaccctgcgctcccgccaccacaggaagtgacaacatgacgaggggtggtgctggagtccaggtgacagttcctgaaggggcttctgggaaatacctaggaggctccagcccagcccaggccctctccccctaccctgggcaccagatcttccatcagggccggagtaaatccctaagtgcctcaactgccctctccctggcagccatcttgtcccctctattcctctagggagcactgtgcccactctttctgggttttccaagggaatgggcttgcaggatggagtgtctgtaaaatcaacaggaaataaaactgtgtatgagccc

SEQ ID NO: 733238 - DNA, 4650 bp, Homo sapiens
  misc_feature (4355)..(4355): n is a, c, g, or t
cctacttcgctcgtccttgctctcgccgctgctgccggagccgaagcagagaaggcagcgggtcccgtgaccgtcccgagagccccgcgctcccgaccagggggcgggggcggccccggggagggcggggcaggggcggggggaagaaagggggttttgtgctgcgccgggagggccggcgccctcttccgaatgtcctgcggccccagcctctcctcacgctcgcgcagtctccgccgcagtctcagctgcagctgcaggactgagccgtgcacccggaggagacccccggaggaggcgacaaacttcgcagtgccgcgacccaaccccagccctgggtagcctgcagcatggcccagctgttcctgcccctgctggcagccctggtcctggcccaggctcctgcagctttagcagatgttctggaaggagacagctcagaggaccgcgcttttcgcgtgcgcatcgcgggcgacgcgccactgcagggcgtgctcggcggcgccctcaccatcccttgccacgtccactacctgcggccaccgccgagccgccgggctgtgctgggctctccgcgggtcaagtggactttcctgtcccggggccgggaggcagaggtgctggtggcgcggggagtgcgcgtcaaggtgaacgaggcctaccggttccgcgtggcactgcctgcgtacccagcgtcgctcaccgacgtctccctggcgctgagcgagctgcgccccaacgactcaggtatctatcgctgtgaggtccagcacggcatcgatgacagcagcgacgctgtggaggtcaaggtcaaaggggtcgtctttctctaccgagagggctctgcccgctatgctttctccttttctggggcccaggaggcctgtgcccgcattggagcccacatcgccaccccggagcagctctatgccgcctaccttgggggctatgagcaatgtgatgctggctggctgtcggatcagaccgtgaggtatcccatccagaccccacgagaggcctgttacggagacatggatggcttccccggggtccggaactatggtgtggtggacccggatgacctctatgatgtgtactgttatgctgaagacctaaatggagaactgttcctgggtgaccctccagagaagctgacattggaggaagcacgggcgtactgccaggagcggggtgcagagattgccaccacgggccaactgtatgcagcctgggatggtggcctggaccactgcagcccagggtggctagctgatggcagtgtgcgctaccccatcgtcacacccagccagcgctgtggtgggggcttgcctggtgtcaagactctcttcctcttccccaaccagactggccctagaatttgaaacacaatccatggtaccgcccacggggttctcagaagaggaaggtaaggcattggaggaagaagagaaatatgaagatgaagaagagaaagaggaggaagaagaagaggaggaggtggaggatgaggctctgtgggcatggcccagcgagctcagcagcccgggccctgaggcctctctccccactgagccagcagcccaggaggagtcactctcccaggcgccagcaagggcagtcctgcagcctggtgcatcaccacttcctgatggagagtcagaagcttccaggcctccaagggtccatggaccacctactgagactctgcccactcccagggagaggaacctagcatccccatcaccttccactctggttgaggcaagagaggtgggggaggcaactggtggtcctgagctatctggggtccctcgaggagagagcgaggagacaggaagctccgagggtgccccttccctgcttccagccacacgggcccctgagggtaccagggagctggaggccccctctgaagataattctggaagaactgccccagcagggacctcagtgcaggcccagccagtgctgcccactgacagcgccagccgaggtggagtggccgtggtccccgcatcaggtgactgtgtccccagcccctgccacaatggtgggacatgcttggaggaggaggaaggggtccgctgcctatgtctgcctggctatgggggggacctgtgcgatgttggtgagtgttgagggacggggggcaggtttgaagcctggaccctgccacaacgtgctacttctggaggggggagggagaacattggttttggccttgtcattaatgagtccctgttttaggcaagttgcataacttctttgagtcctaccctcaattttcttatctaagtgaaaccacaatgcctctcatagggggtccatttgagaccagtgcaaagcatactcctggcatttaatcggtggtcaatacatgacaggctccattctcctggagaggagagccactgctcgttaggatggagacccaggccggaactccatccctcaccctggttcctgtctcttagaaaaggcaccagcgcccctgcccaagagcccctccaggctcctgctaccccctcattctctactagctcttttgcaccgccctcctgtcccccttagtcccgcccctctcggcctgcggtagtggaaggagaccagccccttccaggggacctggccctctgggttttggggccctaagatgcccgcccttatgtgccgcaggcctccgcttctgcaaccccggctgggacgccttccagggcgcctgctacaagcacttttccacacgaaggagctgggaggaggcagagacccagtgccggatgtacggcgcgcatctggccagcatcagcacacccgaggaacaggacttcatcaacagtgggctgggagacagggcgggaggggcccccgccatatgctctcactctctctcactcgcctaaccgccttcctcattaacccatgcacttattccttggttttctcaagcgtgcattccctcactcattcgttcactccccttctcattctctctcccttcccaccctacgcttaggcagtggccttcgggaacggagagtggaggttcgcgcagtagagtgcgcctgtgtgggccgggccgccgtgcagggggccgcctccaatccctccaacctccctgctctccgacctccgtcggcctcctccaactccaactccaatcttgttgaaagttttgactctttttccaaaactccccttttctagcctgggttgatatcttccttattctcccacccccattcccctgctttccatctggcccttgagcagaggctggggtagaagaacccgacaagggcgggtgctggatcgcggggaagggtttccaaggcagtcaccgcagaccgcccgggagcggggaacggccgccatctgctggcggctgcgctcactgcacgccttcgtctccctagaccggtaccgggagtaccagtggatcggactcaacgacaggaccatcgaaggcgacttcttgtggtcggatggcgtccccctgctctatgagaactggaaccctgggcagcctgacagctacttcctgtctggagagaactgcgtggtcatggtgtggcatgatcagggacaatggagtgacgtgccctgcaactaccacctgtcctacacctgcaagatggggctggtgtcctgtgggccgccaccggagctgcccctggctcaagtgttcggccgcccacggctgcgctatgaggtggacactgtgcttcgctaccggtgccgggaaggactggcccagcgcaatctgccgctgatccgatgccaagagaacggtcgttgggaggccccccagatctcctgtgtgcccagaagacctgcccgagctctgcacccagaggaggacccagaaggacgtcaggggaggctactgggacgctggaaggcgctgttgatccccccttccagccccatgccaggtccctagggggcaaggccttgaacactgccggccacagcactgccctgtcacccaaattttccctcacaccctgcgctcccgccaccacaggaagtgacaacatgacgaggggtggtgctggagtccaggtgacagttcctgaaggggcttctgggaaatacctaggaggctccagcccagcccaggccctctccccctaccctgggcaccagatcttccatcagggccggagtaaatccctaagtgcctcaactgccctctccctggcagccatcttgtcccctctattcctctagggagcactgtgcccactctttctgggttttccaagggaatgggcttgcaggatggagtgtctgtaaaatcaacaggaaataaaactgtgtatgagcccagaaagaaaaaaaagaaacaacaaaanaaaaccaaaaacaaaaaaagggggcgccccccaaaaaaacaccccccgggggaccccaaagtagcgacccccactttttttgcaaaggggggcccccacaagagggcagcacgattataaaagaccggcgccggccaccgaggcataaaacaccgcggtgtgtgggaacaacgcgtgccagtggaacatctgcgggaggaaccaccactgcgagggcgggaaaaatgggcacgacacacgcgaaaattagcccacgcgaacacaggggacttaacgcacacaggacagaggccgg

SEQ ID NO: 733239 - DNA, 2599 bp, Homo sapiens
cctacttcgctcgtccttgctctcgccgctgctgccggagccgaagcagagaaggcagcgggtcccgtgaccgtcccgagagccccgcgctcccgaccagggggcgggggcggccccggggagggcggggcaggggcggggggaagaaagggggttttgtgctgcgccgggagggccggcgccctcttccgaatgtcctgcggccccagcctctcctcacgctcgcgcagtctccgccgcagtctcagctgcagctgcaggactgagccgtgcacccggaggagacccccggaggaggcgacaaacttcgcagtgccgcgacccaaccccagccctgggtagcctgcagcatggcccagctgttcctgcccctgctggcagccctggtcctggcccaggctcctgcagctttagcagatgttctggaaggagacagctcagaggaccgcgcttttcgcgtgcgcatcgcgggcgacgcgccactgcagggcgtgctcggcggcgccctcaccatcccttgccacgtccactacctgcggccaccgccgagccgccgggctgtgctgggctctccgcgggtcaagtggactttcctgtcccggggccgggaggcagaggtgctggtggcgcggggagtgcgcgtcaaggtgaacgaggcctaccggttccgcgtggcactgcctgcgtacccagcgtcgctcaccgacgtctccctggcgctgagcgagctgcgccccaacgactcaggtatctatcgctgtgaggtccagcacggcatcgatgacagcagcgacgctgtggaggtcaaggtcaaaggggtcgtctttctctaccgagagggctctgcccgctatgctttctccttttctggggcccaggaggcctgtgcccgcattggagcccacatcgccaccccggagcagctctatgccgcctaccttgggggctatgagcaatgtgatgctggctggctgtcggatcagaccgtgaggtatcccatccagaccccacgagaggcctgttacggagacatggatggcttccccggggtccggaactatggtgtggtggacccggatgacctctatgatgtgtactgttatgctgaagacctaaatggagaactgttcctgggtgaccctccagagaagctgacattggaggaagcacgggcgtactgccaggagcggggtgcagagattgccaccacgggccaactgtatgcagcctgggatggtggcctggaccactgcagcccagggtggctagctgatggcagtgtgcgctaccccatcgtcacacccagccagcgctgtggtgggggcttgcctggtgtcaagactctcttcctcttccccaaccagactggccctagaatttgaaacacaatccatggtaccgcccacggggttctcagaagaggaaggtaaggcattggaggaagaagagaaatatgaagatgaagaagagaaagaggaggaagaagaagaggaggaggtggaggatgaggctctgtgggcatggcccagcgagctcagcagcccgggccctgaggcctctctccccactgagccagcagcccaggaggagtcactctcccaggcgccagcaagggcagtcctgcagcctggtgcatcaccacttcctgatggagagtcagaagcttccaggcctccaagggtccatggaccacctactgagactctgcccactcccagggagaggaacctagcatccccatcaccttccactctggttgaggcaagagaggtgggggaggcaactggtggtcctgagctatctggggtccctcgaggagagagcgaggagacaggaagctccgagggtgccccttccctgcttccagccacacgggcccctgagggtaccagggagctggaggccccctctgaagataattctggaagaactgccccagcagggacctcagtgcaggcccagccagtgctgcccactgacagcgccagccgaggtggagtggccgtggtccccgcatcaggtaattctgcccaaggctcaactgccctctctatcctactccttttcttccccctgcagctctgggtcacctgacctgtagtcctttaacccaccatcatcccaaactctcctgtcctttgccttcattctcttacccacctctacctatgggtctccaatctcggatatccaccttgtgggtatctcagctctccgcgtctttaccctgtgatcccagccccgccactgaccatctgtgacccttccctgccattgggccctccacctgtggctcacatctcgccagccccacagagcatcctcaggcctctccaagggtcctcatcacctattgcagccttcagggctcggcctattttccactactcccttcatccgcctgtgtgccgtcccctttagctgcctcctattgatctcagggaagcctgggagtcccttctcacccctcaacctccggagtccaggagaacccgtacccccacagagccttaagcaactacttctgtgaagtattttttgactgtttcatggaaaacaagccttggaaataaatctctattaaaccgctttgtaacca

SEQ ID NO: 733240 - DNA, 3525 bp, Homo sapiens
cctacttcgctcgtccttgctctcgccgctgctgccggagccgaagcagagaaggcagcgggtcccgtgaccgtcccgagagccccgcgctcccgaccagggggcgggggcggccccggggagggcggggcaggggcggggggaagaaagggggttttgtgctgcgccgggagggccggcgccctcttccgaatgtcctgcggccccagcctctcctcacgctcgcgcagtctccgccgcagtctcagctgcagctgcaggactgagccgtgcacccggaggagacccccggaggaggcgacaaacttcgcagtgccgcgacccaaccccagccctgggtagcctgcagcatggcccagctgttcctgcccctgctggcagccctggtcctggcccaggctcctgcagctttagcagatgttctggaaggagacagctcagaggaccgcgcttttcgcgtgcgcatcgcgggcgacgcgccactgcagggcgtgctcggcggcgccctcaccatcccttgccacgtccactacctgcggccaccgccgagccgccgggctgtgctgggctctccgcgggtcaagtggactttcctgtcccggggccgggaggcagaggtgctggtggcgcggggagtgcgcgtcaaggtgaacgaggcctaccggttccgcgtggcactgcctgcgtacccagcgtcgctcaccgacgtctccctggcgctgagcgagctgcgccccaacgactcaggtatctatcgctgtgaggtccagcacggcatcgatgacagcagcgacgctgtggaggtcaaggtcaaaggggtcgtctttaggtggaggacattctacccacaatctaacttaagtccctcatgctgtagactctaccgagagggctctgcccgctatgctttctccttttctggggcccaggaggcctgtgcccgcattggagcccacatcgccaccccggagcagctctatgccgcctaccttgggggctatgagcaatgtgatgctggctggctgtcggatcagaccgtgaggtatcccatccagaccccacgagaggcctgttacggagacatggatggcttccccggggtccggaactatggtgtggtggacccggatgacctctatgatgtgtactgttatgctgaagacctaaatggagaactgttcctgggtgaccctccagagaagctgacattggaggaagcacgggcgtactgccaggagcggggtgcagagattgccaccacgggccaactgtatgcagcctgggatggtggcctggaccactgcagcccagggtggctagctgatggcagtgtgcgctaccccatcgtcacacccagccagcgctgtggtgggggcttgcctggtgtcaagactctcttcctcttccccaaccagactggcttccccaataagcacagccgcttcaacgtctactgcttccgagactcggcccagccttctgccatccctgaggcctccaacccagcctccaacccagcctctgatggactagaggctatcgtcacagtgacagagaccctggaggaactgcagctgcctcaggaagccacagagagtgaatcccgtggggccatctactccatccccatcatggaggacggaggaggtggaagctccactccagaagacccagcagaggcccctaggacgctcctagaatttgaaacacaatccatggtaccgcccacggggttctcagaagaggaaggtaaggcattggaggaagaagagaaatatgaagatgaagaagagaaagaggaggaagaagaagaggaggaggtggaggatgaggctctgtgggcatggcccagcgagctcagcagcccgggccctgaggcctctctccccactgagccagcagcccaggaggagtcactctcccaggcgccagcaagggcagtcctgcagcctggtgcatcaccacttcctgatggagagtcagaagcttccaggcctccaagggtccatggaccacctactgagactctgcccactcccagggagaggaacctagcatccccatcaccttccactctggttgaggcaagagaggtgggggaggcaactggtggtcctgagctatctggggtccctcgaggagagagcgaggagacaggaagctccgagggtgccccttccctgcttccagccacacgggcccctgagggtaccagggagctggaggccccctctgaagataattctggaagaactgccccagcagggacctcagtgcaggcccagccagtgctgcccactgacagcgccagccgaggtggagtggccgtggtccccgcatcaggtgactgtgtccccagcccctgccacaatggtgggacatgcttggaggaggaggaaggggtccgctgcctatgtctgcctggctatgggggggacctgtgcgatgttggcctccgcttctgcaaccccggctgggacgccttccagggcgcctgctacaagcacttttccacacgaaggagctgggaggaggcagagacccagtgccggatgtacggcgcgcatctggccagcatcagcacacccgaggaacaggacttcatcaacaaccggtaccgggagtaccagtggatcggactcaacgacaggaccatcgaaggcgacttcttgtggtcggatggcgtccccctgctctatgagaactggaaccctgggcagcctgacagctacttcctgtctggagagaactgcgtggtcatggtgtggcatgatcagggacaatggagtgacgtgccctgcaactaccacctgtcctacacctgcaagatggggctggtgtcctgtgggccgccaccggagctgcccctggctcaagtgttcggccgcccacggctgcgctatgaggtggacactgtgcttcgctaccggtgccgggaaggactggcccagcgcaatctgccgctgatccgatgccaagagaacggtcgttgggaggccccccagatctcctgtgtgcccagaagacctgcccgagctctgcacccagaggaggacccagaaggacgtcaggggaggctactgggacgctggaaggcgctgttgatccccccttccagccccatgccaggtccctagggggcaaggccttgaacactgccggccacagcactgccctgtcacccaaattttccctcacaccctgcgctcccgccaccacaggaagtgacaacatgacgaggggtggtgctggagtccaggtgacagttcctgaaggggcttctgggaaatacctaggaggctccagcccagcccaggccctctccccctaccctgggcaccagatcttccatcagggccggagtaaatccctaagtgcctcaactgccctctccctggcagccatcttgtcccctctattcctctagggagcactgtgcccactctttctgggttttccaagggaatgggcttgcaggatggagtgtctgtaaaatcaacaggaaataaaactgtgtatgagccc

SEQ ID NO: 733241 - DNA, 3576 bp, Homo sapiens
cctacttcgctcgtccttgctctcgccgctgctgccggagccgaagcagagaaggcagcgggtcccgtgaccgtcccgagagccccgcgctcccgaccagggggcgggggcggccccggggagggcggggcaggggcggggggaagaaagggggttttgtgctgcgccgggagggccggcgccctcttccgaatgtcctgcggccccagcctctcctcacgctcgcgcagtctccgccgcagtctcagctgcagctgcaggactgagccgtgcacccggaggagacccccggaggaggcgacaaacttcgcagtgccgcgacccaaccccagccctgggtagcctgcagcatggcccagctgttcctgcccctgctggcagccctggtcctggcccaggctcctgcagctttagcagatgttctggaaggagacagctcagaggaccgcgcttttcgcgtgcgcatcgcgggcgacgcgccactgcagggcgtgctcggcggcgccctcaccatcccttgccacgtccactacctgcggccaccgccgagccgccgggctgtgctgggctctccgcgggtcaagtggactttcctgtcccggggccgggaggcagaggtgctggtggcgcggggagtgcgcgtcaaggtgaacgaggcctaccggttccgcgtggcactgcctgcgtacccagcgtcgctcaccgacgtctccctggcgctgagcgagctgcgccccaacgactcaggtatctatcgctgtgaggtccagcacggcatcgatgacagcagcgacgctgtggaggtcaaggtcaaaggggtcgtctttaggtggaggacattctacccacaatctaacttaagtccctcatgctgtagactctaccgagagggctctgcccgctatgctttctccttttctggggcccaggaggcctgtgcccgcattggagcccacatcgccaccccggagcagctctatgccgcctaccttgggggctatgagcaatgtgatgctggctggctgtcggatcagaccgtgaggtatcccatccagaccccacgagaggcctgttacggagacatggatggcttccccggggtccggaactatggtgtggtggacccggatgacctctatgatgtgtactgttatgctgaagacctaaatggagaactgttcctgggtgaccctccagagaagctgacattggaggaagcacgggcgtactgccaggagcggggtgcagagattgccaccacgggccaactgtatgcagcctgggatggtggcctggaccactgcagcccagggtggctagctgatggcagtgtgcgctaccccatcgtcacacccagccagcgctgtggtgggggcttgcctggtgtcaagactctcttcctcttccccaaccagactggcttccccaataagcacagccgcttcaacgtctactgcttccgagactcggcccagccttctgccatccctgaggcctccaacccagcctccaacccagcctctgatggactagaggctatcgtcacagtgacagagaccctggaggaactgcagctgcctcaggaagccacagagagtgaatcccgtggggccatctactccatccccatcatggaggacggaggaggtggaagctccactccagaagacccagcagaggcccctaggacgctcctagaatttgaaacacaatccatggtaccgcccacggggttctcagaagaggaaggtaaggcattggaggaagaagagaaatatgaagatgaagaagagaaagaggaggaagaagaagaggaggaggtggaggatgaggctctgtgggcatggcccagcgagctcagcagcccgggccctgaggcctctctccccactgagccagcagcccaggaggagtcactctcccaggcgccagcaagggcagtcctgcagcctggtgcatcaccacttcctgatggagagtcagaagcttccaggcctccaagggtccatggaccacctactgagactctgcccactcccagggagaggaacctagcatccccatcaccttccactctggttgaggcaagagaggtgggggaggcaactggtggtcctgagctatctggggtccctcgaggagagagcgaggagacaggaagctccgagggtgccccttccctgcttccagccacacgggcccctgagggtaccagggagctggaggccccctctgaagataattctggaagaactgccccagcagggacctcagtgcaggcccagccagtgctgcccactgacagcgccagccgaggtggagtggccgtggtccccgcatcaggtgactgtgtccccagcccctgccacaatggtgggacatgcttggaggaggaggaaggggtccgctgcctatgtctgcctggctatgggggggacctgtgcgatgttggcctccgcttctgcaaccccggctgggacgccttccagggcgcctgctacaagcacttttccacacgaaggagctgggaggaggcagagacccagtgccggatgtacggcgcgcatctggccagcatcagcacacccgaggaacaggacttcatcaacaaccggtaccgggagtaccagtggatcggactcaacgacaggaccatcgaaggcgacttcttgtggtcggatggcgtccccctgctctatgagaactggaaccctgggcagcctgacagctacttcctgtctggagagaactgcgtggtcatggtgtggcatgatcagggacaatggagtgacgtgccctgcaactaccacctgtcctacacctgcaagatggggctggtgtcctgtgggccgccaccggagctgcccctggctcaagtgttcggccgcccacggctgcgctatgaggtggacactgtgcttcgctaccggtgccgggaaggactggcccagcgcaatctgccgctgatccgatgccaagagaacggtcgttgggaggccccccagatctcctgtgtgcccagaagacctgcccgagctctgcacccagaggaggacccagaaggacgtcaggggaggctactgggacgctggaaggcgctgttgatccccccttccagccccatgccaggtccctagggggcaaggccttgaacactgccggccacagcactgccctgtcacccaaattttccctcacaccctgcgctcccgccaccacaggaagtgacaacatgacgaggggtggtgctggagtccaggtgacagttcctgaaggggcttctgggaaatacctaggaggctccagcccagcccaggccctctccccctaccctgggcaccagatcttccatcagggccggagtaaatccctaagtgcctcaactgccctctccctggcagccatcttgtcccctctattcctctagggagcactgtgcccactctttctgggttttccaagggaatgggcttgcaggatggagtgtctgtaaaatcaacaggaaataaaactgtgtatgagccccaaaaaaaacacaaaacaaaaaaaaaaaaaaaaaaaaaaaacaaaaaaaaa

SEQ ID NO: 733242 - DNA, 3847 bp, Homo sapiens
  misc_feature (3552)..(3552): n is a, c, g, or t
cctacttcgctcgtccttgctctcgccgctgctgccggagccgaagcagagaaggcagcgggtcccgtgaccgtcccgagagccccgcgctcccgaccagggggcgggggcggccccggggagggcggggcaggggcggggggaagaaagggggttttgtgctgcgccgggagggccggcgccctcttccgaatgtcctgcggccccagcctctcctcacgctcgcgcagtctccgccgcagtctcagctgcagctgcaggactgagccgtgcacccggaggagacccccggaggaggcgacaaacttcgcagtgccgcgacccaaccccagccctgggtagcctgcagcatggcccagctgttcctgcccctgctggcagccctggtcctggcccaggctcctgcagctttagcagatgttctggaaggagacagctcagaggaccgcgcttttcgcgtgcgcatcgcgggcgacgcgccactgcagggcgtgctcggcggcgccctcaccatcccttgccacgtccactacctgcggccaccgccgagccgccgggctgtgctgggctctccgcgggtcaagtggactttcctgtcccggggccgggaggcagaggtgctggtggcgcggggagtgcgcgtcaaggtgaacgaggcctaccggttccgcgtggcactgcctgcgtacccagcgtcgctcaccgacgtctccctggcgctgagcgagctgcgccccaacgactcaggtatctatcgctgtgaggtccagcacggcatcgatgacagcagcgacgctgtggaggtcaaggtcaaaggggtcgtctttaggtggaggacattctacccacaatctaacttaagtccctcatgctgtagactctaccgagagggctctgcccgctatgctttctccttttctggggcccaggaggcctgtgcccgcattggagcccacatcgccaccccggagcagctctatgccgcctaccttgggggctatgagcaatgtgatgctggctggctgtcggatcagaccgtgaggtatcccatccagaccccacgagaggcctgttacggagacatggatggcttccccggggtccggaactatggtgtggtggacccggatgacctctatgatgtgtactgttatgctgaagacctaaatggagaactgttcctgggtgaccctccagagaagctgacattggaggaagcacgggcgtactgccaggagcggggtgcagagattgccaccacgggccaactgtatgcagcctgggatggtggcctggaccactgcagcccagggtggctagctgatggcagtgtgcgctaccccatcgtcacacccagccagcgctgtggtgggggcttgcctggtgtcaagactctcttcctcttccccaaccagactggcttccccaataagcacagccgcttcaacgtctactgcttccgagactcggcccagccttctgccatccctgaggcctccaacccagcctccaacccagcctctgatggactagaggctatcgtcacagtgacagagaccctggaggaactgcagctgcctcaggaagccacagagagtgaatcccgtggggccatctactccatccccatcatggaggacggaggaggtggaagctccactccagaagacccagcagaggcccctaggacgctcctagaatttgaaacacaatccatggtaccgcccacggggttctcagaagaggaaggtaaggcattggaggaagaagagaaatatgaagatgaagaagagaaagaggaggaagaagaagaggaggaggtggaggatgaggctctgtgggcatggcccagcgagctcagcagcccgggccctgaggcctctctccccactgagccagcagcccaggaggagtcactctcccaggcgccagcaagggcagtcctgcagcctggtgcatcaccacttcctgatggagagtcagaagcttccaggcctccaagggtccatggaccacctactgagactctgcccactcccagggagaggaacctagcatccccatcaccttccactctggttgaggcaagagaggtgggggaggcaactggtggtcctgagctatctggggtccctcgaggagagagcgaggagacaggaagctccgagggtgccccttccctgcttccagccacacgggcccctgagggtaccagggagctggaggccccctctgaagataattctggaagaactgccccagcagggacctcagtgcaggcccagccagtgctgcccactgacagcgccagccgaggtggagtggccgtggtccccgcatcaggtgactgtgtccccagcccctgccacaatggtgggacatgcttggaggaggaggaaggggtccgctgcctatgtctgcctggctatgggggggacctgtgcgatgttggcctccgcttctgcaaccccggctgggacgccttccagggcgcctgctacaagcacttttccacacgaaggagctgggaggaggcagagacccagtgccggatgtacggcgcgcatctggccagcatcagcacacccgaggaacaggacttcatcaacaaccggtaccgggagtaccagtggatcggactcaacgacaggaccatcgaaggcgacttcttgtggtcggatggcgtccccctgctctatgagaactggaaccctgggcagcctgacagctacttcctgtctggagagaactgcgtggtcatggtgtggcatgatcagggacaatggagtgacgtgccctgcaactaccacctgtcctacacctgcaagatggggctggtgtcctgtgggccgccaccggagctgcccctggctcaagtgttcggccgcccacggctgcgctatgaggtggacactgtgcttcgctaccggtgccgggaaggactggcccagcgcaatctgccgctgatccgatgccaagagaacggtcgttgggaggccccccagatctcctgtgtgcccagaagacctgcccgagctctgcacccagaggaggacccagaaggacgtcaggggaggctactgggacgctggaaggcgctgttgatccccccttccagccccatgccaggtccctagggggcaaggccttgaacactgccggccacagcactgccctgtcacccaaattttccctcacaccctgcgctcccgccaccacaggaagtgacaacatgacgaggggtggtgctggagtccaggtgacagttcctgaaggggcttctgggaaatacctaggaggctccagcccagcccaggccctctccccctaccctgggcaccagatcttccatcagggccggagtaaatccctaagtgcctcaactgccctctccctggcagccatcttgtcccctctattcctctagggagcactgtgcccactctttctgggttttccaagggaatgggcttgcaggatggagtgtctgtaaaatcaacaggaaataaaactgtgtatgagcccagaaagaaaaaaaagaaacaacaaaanaaaaccaaaaacaaaaaaagggggcgccccccaaaaaaacaccccccgggggaccccaaagtagcgacccccactttttttgcaaaggggggcccccacaagagggcagcacgattataaaagaccggcgccggccaccgaggcataaaacaccgcggtgtgtgggaacaacgcgtgccagtggaacatctgcgggaggaaccaccactgcgagggcgggaaaaatgggcacgacacacgcgaaaattagcccacgcgaacacaggggacttaacgcacacaggacagaggccgg

SEQ ID NO: 733243 - DNA, 2985 bp, Homo sapiens
cctacttcgctcgtccttgctctcgccgctgctgccggagccgaagcagagaaggcagcgggtcccgtgaccgtcccgagagccccgcgctcccgaccagggggcgggggcggccccggggagggcggggcaggggcggggggaagaaagggggttttgtgctgcgccgggagggccggcgccctcttccgaatgtcctgcggccccagcctctcctcacgctcgcgcagtctccgccgcagtctcagctgcagctgcaggactgagccgtgcacccggaggagacccccggaggaggcgacaaacttcgcagtgccgcgacccaaccccagccctgggtagcctgcagcatggcccagctgttcctgcccctgctggcagccctggtcctggcccaggctcctgcagctttagcagatgttctggaaggagacagctcagaggaccgcgcttttcgcgtgcgcatcgcgggcgacgcgccactgcagggcgtgctcggcggcgccctcaccatcccttgccacgtccactacctgcggccaccgccgagccgccgggctgtgctgggctctccgcgggtcaagtggactttcctgtcccggggccgggaggcagaggtgctggtggcgcggggagtgcgcgtcaaggtgaacgaggcctaccggttccgcgtggcactgcctgcgtacccagcgtcgctcaccgacgtctccctggcgctgagcgagctgcgccccaacgactcaggtatctatcgctgtgaggtccagcacggcatcgatgacagcagcgacgctgtggaggtcaaggtcaaaggggtcgtctttaggtggaggacattctacccacaatctaacttaagtccctcatgctgtagactctaccgagagggctctgcccgctatgctttctccttttctggggcccaggaggcctgtgcccgcattggagcccacatcgccaccccggagcagctctatgccgcctaccttgggggctatgagcaatgtgatgctggctggctgtcggatcagaccgtgaggtatcccatccagaccccacgagaggcctgttacggagacatggatggcttccccggggtccggaactatggtgtggtggacccggatgacctctatgatgtgtactgttatgctgaagacctaaatggagaactgttcctgggtgaccctccagagaagctgacattggaggaagcacgggcgtactgccaggagcggggtgcagagattgccaccacgggccaactgtatgcagcctgggatggtggcctggaccactgcagcccagggtggctagctgatggcagtgtgcgctaccccatcgtcacacccagccagcgctgtggtgggggcttgcctggtgtcaagactctcttcctcttccccaaccagactggcttccccaataagcacagccgcttcaacgtctactgcttccgagactcggcccagccttctgccatccctgaggcctccaacccagcctccaacccagcctctgatggactagaggctatcgtcacagtgacagagaccctggaggaactgcagctgcctcaggaagccacagagagtgaatcccgtggggccatctactccatccccatcatggaggacggaggaggtggaagctccactccagaagacccagcagaggcccctaggacgctcctagaatttgaaacacaatccatggtaccgcccacggggttctcagaagaggaaggtaaggcattggaggaagaagagaaatatgaagatgaagaagagaaagaggaggaagaagaagaggaggaggtggaggatgaggctctgtgggcatggcccagcgagctcagcagcccgggccctgaggcctctctccccactgagccagcagcccaggaggagtcactctcccaggcgccagcaagggcagtcctgcagcctggtgcatcaccacttcctgatggagagtcagaagcttccaggcctccaagggtccatggaccacctactgagactctgcccactcccagggagaggaacctagcatccccatcaccttccactctggttgaggcaagagaggtgggggaggcaactggtggtcctgagctatctggggtccctcgaggagagagcgaggagacaggaagctccgagggtgccccttccctgcttccagccacacgggcccctgagggtaccagggagctggaggccccctctgaagataattctggaagaactgccccagcagggacctcagtgcaggcccagccagtgctgcccactgacagcgccagccgaggtggagtggccgtggtccccgcatcaggtgactgtgtccccagcccctgccacaatggtgggacatgcttggaggaggaggaaggggtccgctgcctatgtctgcctggctatgggggggacctgtgcgatgttggcctccgcttctgcaaccccggctgggacgccttccagggcgcctgctacaagcacttttccacacgaaggagctgggaggaggcagagacccagtgccggatgtacggcgcgcatctggccagcatcagcacacccgaggaacaggacttcatcaacagtgggctgggagacagggcgggaggggcccccgccatatgctctcactctctctcactcgcctaaccgccttcctcattaacccatgcacttattccttggttttctcaagcgtgcattccctcactcattcgttcactccccttctcattctctctcccttcccaccctacgcttaggcagtggccttcgggaacggagagtggaggttcgcgcagtagagtgcgcctgtgtgggccgggccgccgtgcagggggccgcctccaatccctccaacctccctgctctccgacctccgtcggcctcctccaactccaactccaatcttgttgaaagttttgactctttttccaaaactccccttttctagcctggg

SEQ ID NO: 733244 - DNA, 3264 bp, Homo sapiens
cctacttcgctcgtccttgctctcgccgctgctgccggagccgaagcagagaaggcagcgggtcccgtgaccgtcccgagagccccgcgctcccgaccagggggcgggggcggccccggggagggcggggcaggggcggggggaagaaagggggttttgtgctgcgccgggagggccggcgccctcttccgaatgtcctgcggccccagcctctcctcacgctcgcgcagtctccgccgcagtctcagctgcagctgcaggactgagccgtgcacccggaggagacccccggaggaggcgacaaacttcgcagtgccgcgacccaaccccagccctgggtagcctgcagcatggcccagctgttcctgcccctgctggcagccctggtcctggcccaggctcctgcagctttagcagatgttctggaaggagacagctcagaggaccgcgcttttcgcgtgcgcatcgcgggcgacgcgccactgcagggcgtgctcggcggcgccctcaccatcccttgccacgtccactacctgcggccaccgccgagccgccgggctgtgctgggctctccgcgggtcaagtggactttcctgtcccggggccgggaggcagaggtgctggtggcgcggggagtgcgcgtcaaggtgaacgaggcctaccggttccgcgtggcactgcctgcgtacccagcgtcgctcaccgacgtctccctggcgctgagcgagctgcgccccaacgactcaggtatctatcgctgtgaggtccagcacggcatcgatgacagcagcgacgctgtggaggtcaaggtcaaaggggtcgtctttaggtggaggacattctacccacaatctaacttaagtccctcatgctgtagactctaccgagagggctctgcccgctatgctttctccttttctggggcccaggaggcctgtgcccgcattggagcccacatcgccaccccggagcagctctatgccgcctaccttgggggctatgagcaatgtgatgctggctggctgtcggatcagaccgtgaggtatcccatccagaccccacgagaggcctgttacggagacatggatggcttccccggggtccggaactatggtgtggtggacccggatgacctctatgatgtgtactgttatgctgaagacctaaatggagaactgttcctgggtgaccctccagagaagctgacattggaggaagcacgggcgtactgccaggagcggggtgcagagattgccaccacgggccaactgtatgcagcctgggatggtggcctggaccactgcagcccagggtggctagctgatggcagtgtgcgctaccccatcgtcacacccagccagcgctgtggtgggggcttgcctggtgtcaagactctcttcctcttccccaaccagactggcttccccaataagcacagccgcttcaacgtctactgcttccgagactcggcccagccttctgccatccctgaggcctccaacccagcctccaacccagcctctgatggactagaggctatcgtcacagtgacagagaccctggaggaactgcagctgcctcaggaagccacagagagtgaatcccgtggggccatctactccatccccatcatggaggacggaggaggtggaagctccactccagaagacccagcagaggcccctaggacgctcctagaatttgaaacacaatccatggtaccgcccacggggttctcagaagaggaaggtaaggcattggaggaagaagagaaatatgaagatgaagaagagaaagaggaggaagaagaagaggaggaggtggaggatgaggctctgtgggcatggcccagcgagctcagcagcccgggccctgaggcctctctccccactgagccagcagcccaggaggagtcactctcccaggcgccagcaagggcagtcctgcagcctggtgcatcaccacttcctgatggagagtcagaagcttccaggcctccaagggtccatggaccacctactgagactctgcccactcccagggagaggaacctagcatccccatcaccttccactctggttgaggactgtgtccccagcccctgccacaatggtgggacatgcttggaggaggaggaaggggtccgctgcctatgtctgcctggctatgggggggacctgtgcgatgttggcctccgcttctgcaaccccggctgggacgccttccagggcgcctgctacaagcacttttccacacgaaggagctgggaggaggcagagacccagtgccggatgtacggcgcgcatctggccagcatcagcacacccgaggaacaggacttcatcaacaaccggtaccgggagtaccagtggatcggactcaacgacaggaccatcgaaggcgacttcttgtggtcggatggcgtccccctgctctatgagaactggaaccctgggcagcctgacagctacttcctgtctggagagaactgcgtggtcatggtgtggcatgatcagggacaatggagtgacgtgccctgcaactaccacctgtcctacacctgcaagatggggctggtgtcctgtgggccgccaccggagctgcccctggctcaagtgttcggccgcccacggctgcgctatgaggtggacactgtgcttcgctaccggtgccgggaaggactggcccagcgcaatctgccgctgatccgatgccaagagaacggtcgttgggaggccccccagatctcctgtgtgcccagaagacctgcccgagctctgcacccagaggaggacccagaaggacgtcaggggaggctactgggacgctggaaggcgctgttgatccccccttccagccccatgccaggtccctagggggcaaggccttgaacactgccggccacagcactgccctgtcacccaaattttccctcacaccctgcgctcccgccaccacaggaagtgacaacatgacgaggggtggtgctggagtccaggtgacagttcctgaaggggcttctgggaaatacctaggaggctccagcccagcccaggccctctccccctaccctgggcaccagatcttccatcagggccggagtaaatccctaagtgcctcaactgccctctccctggcagccatcttgtcccctctattcctctagggagcactgtgcccactctttctgggttttccaagggaatgggcttgcaggatggagtgtctgtaaaatcaacaggaaataaaactgtgtatgagccc

SEQ ID NO: 733245 - DNA, 3315 bp, Homo sapiens
cctacttcgctcgtccttgctctcgccgctgctgccggagccgaagcagagaaggcagcgggtcccgtgaccgtcccgagagccccgcgctcccgaccagggggcgggggcggccccggggagggcggggcaggggcggggggaagaaagggggttttgtgctgcgccgggagggccggcgccctcttccgaatgtcctgcggccccagcctctcctcacgctcgcgcagtctccgccgcagtctcagctgcagctgcaggactgagccgtgcacccggaggagacccccggaggaggcgacaaacttcgcagtgccgcgacccaaccccagccctgggtagcctgcagcatggcccagctgttcctgcccctgctggcagccctggtcctggcccaggctcctgcagctttagcagatgttctggaaggagacagctcagaggaccgcgcttttcgcgtgcgcatcgcgggcgacgcgccactgcagggcgtgctcggcggcgccctcaccatcccttgccacgtccactacctgcggccaccgccgagccgccgggctgtgctgggctctccgcgggtcaagtggactttcctgtcccggggccgggaggcagaggtgctggtggcgcggggagtgcgcgtcaaggtgaacgaggcctaccggttccgcgtggcactgcctgcgtacccagcgtcgctcaccgacgtctccctggcgctgagcgagctgcgccccaacgactcaggtatctatcgctgtgaggtccagcacggcatcgatgacagcagcgacgctgtggaggtcaaggtcaaaggggtcgtctttaggtggaggacattctacccacaatctaacttaagtccctcatgctgtagactctaccgagagggctctgcccgctatgctttctccttttctggggcccaggaggcctgtgcccgcattggagcccacatcgccaccccggagcagctctatgccgcctaccttgggggctatgagcaatgtgatgctggctggctgtcggatcagaccgtgaggtatcccatccagaccccacgagaggcctgttacggagacatggatggcttccccggggtccggaactatggtgtggtggacccggatgacctctatgatgtgtactgttatgctgaagacctaaatggagaactgttcctgggtgaccctccagagaagctgacattggaggaagcacgggcgtactgccaggagcggggtgcagagattgccaccacgggccaactgtatgcagcctgggatggtggcctggaccactgcagcccagggtggctagctgatggcagtgtgcgctaccccatcgtcacacccagccagcgctgtggtgggggcttgcctggtgtcaagactctcttcctcttccccaaccagactggcttccccaataagcacagccgcttcaacgtctactgcttccgagactcggcccagccttctgccatccctgaggcctccaacccagcctccaacccagcctctgatggactagaggctatcgtcacagtgacagagaccctggaggaactgcagctgcctcaggaagccacagagagtgaatcccgtggggccatctactccatccccatcatggaggacggaggaggtggaagctccactccagaagacccagcagaggcccctaggacgctcctagaatttgaaacacaatccatggtaccgcccacggggttctcagaagaggaaggtaaggcattggaggaagaagagaaatatgaagatgaagaagagaaagaggaggaagaagaagaggaggaggtggaggatgaggctctgtgggcatggcccagcgagctcagcagcccgggccctgaggcctctctccccactgagccagcagcccaggaggagtcactctcccaggcgccagcaagggcagtcctgcagcctggtgcatcaccacttcctgatggagagtcagaagcttccaggcctccaagggtccatggaccacctactgagactctgcccactcccagggagaggaacctagcatccccatcaccttccactctggttgaggactgtgtccccagcccctgccacaatggtgggacatgcttggaggaggaggaaggggtccgctgcctatgtctgcctggctatgggggggacctgtgcgatgttggcctccgcttctgcaaccccggctgggacgccttccagggcgcctgctacaagcacttttccacacgaaggagctgggaggaggcagagacccagtgccggatgtacggcgcgcatctggccagcatcagcacacccgaggaacaggacttcatcaacaaccggtaccgggagtaccagtggatcggactcaacgacaggaccatcgaaggcgacttcttgtggtcggatggcgtccccctgctctatgagaactggaaccctgggcagcctgacagctacttcctgtctggagagaactgcgtggtcatggtgtggcatgatcagggacaatggagtgacgtgccctgcaactaccacctgtcctacacctgcaagatggggctggtgtcctgtgggccgccaccggagctgcccctggctcaagtgttcggccgcccacggctgcgctatgaggtggacactgtgcttcgctaccggtgccgggaaggactggcccagcgcaatctgccgctgatccgatgccaagagaacggtcgttgggaggccccccagatctcctgtgtgcccagaagacctgcccgagctctgcacccagaggaggacccagaaggacgtcaggggaggctactgggacgctggaaggcgctgttgatccccccttccagccccatgccaggtccctagggggcaaggccttgaacactgccggccacagcactgccctgtcacccaaattttccctcacaccctgcgctcccgccaccacaggaagtgacaacatgacgaggggtggtgctggagtccaggtgacagttcctgaaggggcttctgggaaatacctaggaggctccagcccagcccaggccctctccccctaccctgggcaccagatcttccatcagggccggagtaaatccctaagtgcctcaactgccctctccctggcagccatcttgtcccctctattcctctagggagcactgtgcccactctttctgggttttccaagggaatgggcttgcaggatggagtgtctgtaaaatcaacaggaaataaaactgtgtatgagccccaaaaaaaacacaaaacaaaaaaaaaaaaaaaaaaaaaaaacaaaaaaaaa

SEQ ID NO: 733246 - DNA, 3586 bp, Homo sapiens
  misc_feature (3291)..(3291): n is a, c, g, or t
cctacttcgctcgtccttgctctcgccgctgctgccggagccgaagcagagaaggcagcgggtcccgtgaccgtcccgagagccccgcgctcccgaccagggggcgggggcggccccggggagggcggggcaggggcggggggaagaaagggggttttgtgctgcgccgggagggccggcgccctcttccgaatgtcctgcggccccagcctctcctcacgctcgcgcagtctccgccgcagtctcagctgcagctgcaggactgagccgtgcacccggaggagacccccggaggaggcgacaaacttcgcagtgccgcgacccaaccccagccctgggtagcctgcagcatggcccagctgttcctgcccctgctggcagccctggtcctggcccaggctcctgcagctttagcagatgttctggaaggagacagctcagaggaccgcgcttttcgcgtgcgcatcgcgggcgacgcgccactgcagggcgtgctcggcggcgccctcaccatcccttgccacgtccactacctgcggccaccgccgagccgccgggctgtgctgggctctccgcgggtcaagtggactttcctgtcccggggccgggaggcagaggtgctggtggcgcggggagtgcgcgtcaaggtgaacgaggcctaccggttccgcgtggcactgcctgcgtacccagcgtcgctcaccgacgtctccctggcgctgagcgagctgcgccccaacgactcaggtatctatcgctgtgaggtccagcacggcatcgatgacagcagcgacgctgtggaggtcaaggtcaaaggggtcgtctttaggtggaggacattctacccacaatctaacttaagtccctcatgctgtagactctaccgagagggctctgcccgctatgctttctccttttctggggcccaggaggcctgtgcccgcattggagcccacatcgccaccccggagcagctctatgccgcctaccttgggggctatgagcaatgtgatgctggctggctgtcggatcagaccgtgaggtatcccatccagaccccacgagaggcctgttacggagacatggatggcttccccggggtccggaactatggtgtggtggacccggatgacctctatgatgtgtactgttatgctgaagacctaaatggagaactgttcctgggtgaccctccagagaagctgacattggaggaagcacgggcgtactgccaggagcggggtgcagagattgccaccacgggccaactgtatgcagcctgggatggtggcctggaccactgcagcccagggtggctagctgatggcagtgtgcgctaccccatcgtcacacccagccagcgctgtggtgggggcttgcctggtgtcaagactctcttcctcttccccaaccagactggcttccccaataagcacagccgcttcaacgtctactgcttccgagactcggcccagccttctgccatccctgaggcctccaacccagcctccaacccagcctctgatggactagaggctatcgtcacagtgacagagaccctggaggaactgcagctgcctcaggaagccacagagagtgaatcccgtggggccatctactccatccccatcatggaggacggaggaggtggaagctccactccagaagacccagcagaggcccctaggacgctcctagaatttgaaacacaatccatggtaccgcccacggggttctcagaagaggaaggtaaggcattggaggaagaagagaaatatgaagatgaagaagagaaagaggaggaagaagaagaggaggaggtggaggatgaggctctgtgggcatggcccagcgagctcagcagcccgggccctgaggcctctctccccactgagccagcagcccaggaggagtcactctcccaggcgccagcaagggcagtcctgcagcctggtgcatcaccacttcctgatggagagtcagaagcttccaggcctccaagggtccatggaccacctactgagactctgcccactcccagggagaggaacctagcatccccatcaccttccactctggttgaggactgtgtccccagcccctgccacaatggtgggacatgcttggaggaggaggaaggggtccgctgcctatgtctgcctggctatgggggggacctgtgcgatgttggcctccgcttctgcaaccccggctgggacgccttccagggcgcctgctacaagcacttttccacacgaaggagctgggaggaggcagagacccagtgccggatgtacggcgcgcatctggccagcatcagcacacccgaggaacaggacttcatcaacaaccggtaccgggagtaccagtggatcggactcaacgacaggaccatcgaaggcgacttcttgtggtcggatggcgtccccctgctctatgagaactggaaccctgggcagcctgacagctacttcctgtctggagagaactgcgtggtcatggtgtggcatgatcagggacaatggagtgacgtgccctgcaactaccacctgtcctacacctgcaagatggggctggtgtcctgtgggccgccaccggagctgcccctggctcaagtgttcggccgcccacggctgcgctatgaggtggacactgtgcttcgctaccggtgccgggaaggactggcccagcgcaatctgccgctgatccgatgccaagagaacggtcgttgggaggccccccagatctcctgtgtgcccagaagacctgcccgagctctgcacccagaggaggacccagaaggacgtcaggggaggctactgggacgctggaaggcgctgttgatccccccttccagccccatgccaggtccctagggggcaaggccttgaacactgccggccacagcactgccctgtcacccaaattttccctcacaccctgcgctcccgccaccacaggaagtgacaacatgacgaggggtggtgctggagtccaggtgacagttcctgaaggggcttctgggaaatacctaggaggctccagcccagcccaggccctctccccctaccctgggcaccagatcttccatcagggccggagtaaatccctaagtgcctcaactgccctctccctggcagccatcttgtcccctctattcctctagggagcactgtgcccactctttctgggttttccaagggaatgggcttgcaggatggagtgtctgtaaaatcaacaggaaataaaactgtgtatgagcccagaaagaaaaaaaagaaacaacaaaanaaaaccaaaaacaaaaaaagggggcgccccccaaaaaaacaccccccgggggaccccaaagtagcgacccccactttttttgcaaaggggggcccccacaagagggcagcacgattataaaagaccggcgccggccaccgaggcataaaacaccgcggtgtgtgggaacaacgcgtgccagtggaacatctgcgggaggaaccaccactgcgagggcgggaaaaatgggcacgacacacgcgaaaattagcccacgcgaacacaggggacttaacgcacacaggacagaggccgg

SEQ ID NO: 733247 - DNA, 4702 bp, Homo sapiens
cctacttcgctcgtccttgctctcgccgctgctgccggagccgaagcagagaaggcagcgggtcccgtgaccgtcccgagagccccgcgctcccgaccagggggcgggggcggccccggggagggcggggcaggggcggggggaagaaagggggttttgtgctgcgccgggagggccggcgccctcttccgaatgtcctgcggccccagcctctcctcacgctcgcgcagtctccgccgcagtctcagctgcagctgcaggactgagccgtgcacccggaggagacccccggaggaggcgacaaacttcgcagtgccgcgacccaaccccagccctgggtagcctgcagcatggcccagctgttcctgcccctgctggcagccctggtcctggcccaggctcctgcagctttagcagatgttctggaaggagacagctcagaggaccgcgcttttcgcgtgcgcatcgcgggcgacgcgccactgcagggcgtgctcggcggcgccctcaccatcccttgccacgtccactacctgcggccaccgccgagccgccgggctgtgctgggctctccgcgggtcaagtggactttcctgtcccggggccgggaggcagaggtgctggtggcgcggggagtgcgcgtcaaggtgaacgaggcctaccggttccgcgtggcactgcctgcgtacccagcgtcgctcaccgacgtctccctggcgctgagcgagctgcgccccaacgactcaggtatctatcgctgtgaggtccagcacggcatcgatgacagcagcgacgctgtggaggtcaaggtcaaaggggtcgtctttaggtggaggacattctacccacaatctaacttaagtccctcatgctgtagactctaccgagagggctctgcccgctatgctttctccttttctggggcccaggaggcctgtgcccgcattggagcccacatcgccaccccggagcagctctatgccgcctaccttgggggctatgagcaatgtgatgctggctggctgtcggatcagaccgtgaggtatcccatccagaccccacgagaggcctgttacggagacatggatggcttccccggggtccggaactatggtgtggtggacccggatgacctctatgatgtgtactgttatgctgaagacctaaatggagaactgttcctgggtgaccctccagagaagctgacattggaggaagcacgggcgtactgccaggagcggggtgcagagattgccaccacgggccaactgtatgcagcctgggatggtggcctggaccactgcagcccagggtggctagctgatggcagtgtgcgctaccccatcgtcacacccagccagcgctgtggtgggggcttgcctggtgtcaagactctcttcctcttccccaaccagactggcttccccaataagcacagccgcttcaacgtctactgcttccgagactcggcccagccttctgccatccctgaggcctccaacccagcctccaacccagcctctgatggactagaggctatcgtcacagtgacagagaccctggaggaactgcagctgcctcaggaagccacagagagtgaatcccgtggggccatctactccatccccatcatggaggacggaggaggtggaagctccactccagaagacccagcagaggcccctaggacgctcctagaatttgaaacacaatccatggtaccgcccacggggttctcagaagaggaaggtaaggcattggaggaagaagagaaatatgaagatgaagaagagaaagaggaggaagaagaagaggaggaggtggaggatgaggctctgtgggcatggcccagcgagctcagcagcccgggccctgaggcctctctccccactgagccagcagcccaggaggagtcactctcccaggcgccagcaagggcagtcctgcagcctggtgcatcaccacttcctgatggagagtcagaagcttccaggcctccaagggtccatggaccacctactgagactctgcccactcccagggagaggaacctagcatccccatcaccttccactctggttgaggcaagagaggtgggggaggcaactggtggtcctgagctatctggggtccctcgaggagagagcgaggagacaggaagctccgagggtgccccttccctgcttccagccacacgggcccctgagggtaccagggagctggaggccccctctgaagataattctggaagaactgccccagcagggacctcagtgcaggcccagccagtgctgcccactgacagcgccagccgaggtggagtggccgtggtccccgcatcaggtgactgtgtccccagcccctgccacaatggtgggacatgcttggaggaggaggaaggggtccgctgcctatgtctgcctggctatgggggggacctgtgcgatgttggtgagtgttgagggacggggggcaggtttgaagcctggaccctgccacaacgtgctacttctggaggggggagggagaacattggttttggccttgtcattaatgagtccctgttttaggcaagttgcataacttctttgagtcctaccctcaattttcttatctaagtgaaaccacaatgcctctcatagggggtccatttgagaccagtgcaaagcatactcctggcatttaatcggtggtcaatacatgacaggctccattctcctggagaggagagccactgctcgttaggatggagacccaggccggaactccatccctcaccctggttcctgtctcttagaaaaggcaccagcgcccctgcccaagagcccctccaggctcctgctaccccctcattctctactagctcttttgcaccgccctcctgtcccccttagtcccgcccctctcggcctgcggtagtggaaggagaccagccccttccaggggacctggccctctgggttttggggccctaagatgcccgcccttatgtgccgcaggcctccgcttctgcaaccccggctgggacgccttccagggcgcctgctacaagcacttttccacacgaaggagctgggaggaggcagagacccagtgccggatgtacggcgcgcatctggccagcatcagcacacccgaggaacaggacttcatcaacagtgggctgggagacagggcgggaggggcccccgccatatgctctcactctctctcactcgcctaaccgccttcctcattaacccatgcacttattccttggttttctcaagcgtgcattccctcactcattcgttcactccccttctcattctctctcccttcccaccctacgcttaggcagtggccttcgggaacggagagtggaggttcgcgcagtagagtgcgcctgtgtgggccgggccgccgtgcagggggccgcctccaatccctccaacctccctgctctccgacctccgtcggcctcctccaactccaactccaatcttgttgaaagttttgactctttttccaaaactccccttttctagcctgggttgatatcttccttattctcccacccccattcccctgctttccatctggcccttgagcagaggctggggtagaagaacccgacaagggcgggtgctggatcgcggggaagggtttccaaggcagtcaccgcagaccgcccgggagcggggaacggccgccatctgctggcggctgcgctcactgcacgccttcgtctccctagaccggtaccgggagtaccagtggatcggactcaacgacaggaccatcgaaggcgacttcttgtggtcggatggcgtccccctgctctatgagaactggaaccctgggcagcctgacagctacttcctgtctggagagaactgcgtggtcatggtgtggcatgatcagggacaatggagtgacgtgccctgcaactaccacctgtcctacacctgcaagatggggctggtgtcctgtgggccgccaccggagctgcccctggctcaagtgttcggccgcccacggctgcgctatgaggtggacactgtgcttcgctaccggtgccgggaaggactggcccagcgcaatctgccgctgatccgatgccaagagaacggtcgttgggaggccccccagatctcctgtgtgcccagaagacctgcccgagctctgcacccagaggaggacccagaaggacgtcaggggaggctactgggacgctggaaggcgctgttgatccccccttccagccccatgccaggtccctagggggcaaggccttgaacactgccggccacagcactgccctgtcacccaaattttccctcacaccctgcgctcccgccaccacaggaagtgacaacatgacgaggggtggtgctggagtccaggtgacagttcctgaaggggcttctgggaaatacctaggaggctccagcccagcccaggccctctccccctaccctgggcaccagatcttccatcagggccggagtaaatccctaagtgcctcaactgccctctccctggcagccatcttgtcccctctattcctctagggagcactgtgcccactctttctgggttttccaagggaatgggcttgcaggatggagtgtctgtaaaatcaacaggaaataaaactgtgtatgagccccaaaaaaaacacaaaacaaaaaaaaaaaaaaaaaaaaaaaacaaaaaaaaa

SEQ ID NO: 733248 - DNA, 4651 bp, Homo sapiens
cctacttcgctcgtccttgctctcgccgctgctgccggagccgaagcagagaaggcagcgggtcccgtgaccgtcccgagagccccgcgctcccgaccagggggcgggggcggccccggggagggcggggcaggggcggggggaagaaagggggttttgtgctgcgccgggagggccggcgccctcttccgaatgtcctgcggccccagcctctcctcacgctcgcgcagtctccgccgcagtctcagctgcagctgcaggactgagccgtgcacccggaggagacccccggaggaggcgacaaacttcgcagtgccgcgacccaaccccagccctgggtagcctgcagcatggcccagctgttcctgcccctgctggcagccctggtcctggcccaggctcctgcagctttagcagatgttctggaaggagacagctcagaggaccgcgcttttcgcgtgcgcatcgcgggcgacgcgccactgcagggcgtgctcggcggcgccctcaccatcccttgccacgtccactacctgcggccaccgccgagccgccgggctgtgctgggctctccgcgggtcaagtggactttcctgtcccggggccgggaggcagaggtgctggtggcgcggggagtgcgcgtcaaggtgaacgaggcctaccggttccgcgtggcactgcctgcgtacccagcgtcgctcaccgacgtctccctggcgctgagcgagctgcgccccaacgactcaggtatctatcgctgtgaggtccagcacggcatcgatgacagcagcgacgctgtggaggtcaaggtcaaaggggtcgtctttaggtggaggacattctacccacaatctaacttaagtccctcatgctgtagactctaccgagagggctctgcccgctatgctttctccttttctggggcccaggaggcctgtgcccgcattggagcccacatcgccaccccggagcagctctatgccgcctaccttgggggctatgagcaatgtgatgctggctggctgtcggatcagaccgtgaggtatcccatccagaccccacgagaggcctgttacggagacatggatggcttccccggggtccggaactatggtgtggtggacccggatgacctctatgatgtgtactgttatgctgaagacctaaatggagaactgttcctgggtgaccctccagagaagctgacattggaggaagcacgggcgtactgccaggagcggggtgcagagattgccaccacgggccaactgtatgcagcctgggatggtggcctggaccactgcagcccagggtggctagctgatggcagtgtgcgctaccccatcgtcacacccagccagcgctgtggtgggggcttgcctggtgtcaagactctcttcctcttccccaaccagactggcttccccaataagcacagccgcttcaacgtctactgcttccgagactcggcccagccttctgccatccctgaggcctccaacccagcctccaacccagcctctgatggactagaggctatcgtcacagtgacagagaccctggaggaactgcagctgcctcaggaagccacagagagtgaatcccgtggggccatctactccatccccatcatggaggacggaggaggtggaagctccactccagaagacccagcagaggcccctaggacgctcctagaatttgaaacacaatccatggtaccgcccacggggttctcagaagaggaaggtaaggcattggaggaagaagagaaatatgaagatgaagaagagaaagaggaggaagaagaagaggaggaggtggaggatgaggctctgtgggcatggcccagcgagctcagcagcccgggccctgaggcctctctccccactgagccagcagcccaggaggagtcactctcccaggcgccagcaagggcagtcctgcagcctggtgcatcaccacttcctgatggagagtcagaagcttccaggcctccaagggtccatggaccacctactgagactctgcccactcccagggagaggaacctagcatccccatcaccttccactctggttgaggcaagagaggtgggggaggcaactggtggtcctgagctatctggggtccctcgaggagagagcgaggagacaggaagctccgagggtgccccttccctgcttccagccacacgggcccctgagggtaccagggagctggaggccccctctgaagataattctggaagaactgccccagcagggacctcagtgcaggcccagccagtgctgcccactgacagcgccagccgaggtggagtggccgtggtccccgcatcaggtgactgtgtccccagcccctgccacaatggtgggacatgcttggaggaggaggaaggggtccgctgcctatgtctgcctggctatgggggggacctgtgcgatgttggtgagtgttgagggacggggggcaggtttgaagcctggaccctgccacaacgtgctacttctggaggggggagggagaacattggttttggccttgtcattaatgagtccctgttttaggcaagttgcataacttctttgagtcctaccctcaattttcttatctaagtgaaaccacaatgcctctcatagggggtccatttgagaccagtgcaaagcatactcctggcatttaatcggtggtcaatacatgacaggctccattctcctggagaggagagccactgctcgttaggatggagacccaggccggaactccatccctcaccctggttcctgtctcttagaaaaggcaccagcgcccctgcccaagagcccctccaggctcctgctaccccctcattctctactagctcttttgcaccgccctcctgtcccccttagtcccgcccctctcggcctgcggtagtggaaggagaccagccccttccaggggacctggccctctgggttttggggccctaagatgcccgcccttatgtgccgcaggcctccgcttctgcaaccccggctgggacgccttccagggcgcctgctacaagcacttttccacacgaaggagctgggaggaggcagagacccagtgccggatgtacggcgcgcatctggccagcatcagcacacccgaggaacaggacttcatcaacagtgggctgggagacagggcgggaggggcccccgccatatgctctcactctctctcactcgcctaaccgccttcctcattaacccatgcacttattccttggttttctcaagcgtgcattccctcactcattcgttcactccccttctcattctctctcccttcccaccctacgcttaggcagtggccttcgggaacggagagtggaggttcgcgcagtagagtgcgcctgtgtgggccgggccgccgtgcagggggccgcctccaatccctccaacctccctgctctccgacctccgtcggcctcctccaactccaactccaatcttgttgaaagttttgactctttttccaaaactccccttttctagcctgggttgatatcttccttattctcccacccccattcccctgctttccatctggcccttgagcagaggctggggtagaagaacccgacaagggcgggtgctggatcgcggggaagggtttccaaggcagtcaccgcagaccgcccgggagcggggaacggccgccatctgctggcggctgcgctcactgcacgccttcgtctccctagaccggtaccgggagtaccagtggatcggactcaacgacaggaccatcgaaggcgacttcttgtggtcggatggcgtccccctgctctatgagaactggaaccctgggcagcctgacagctacttcctgtctggagagaactgcgtggtcatggtgtggcatgatcagggacaatggagtgacgtgccctgcaactaccacctgtcctacacctgcaagatggggctggtgtcctgtgggccgccaccggagctgcccctggctcaagtgttcggccgcccacggctgcgctatgaggtggacactgtgcttcgctaccggtgccgggaaggactggcccagcgcaatctgccgctgatccgatgccaagagaacggtcgttgggaggccccccagatctcctgtgtgcccagaagacctgcccgagctctgcacccagaggaggacccagaaggacgtcaggggaggctactgggacgctggaaggcgctgttgatccccccttccagccccatgccaggtccctagggggcaaggccttgaacactgccggccacagcactgccctgtcacccaaattttccctcacaccctgcgctcccgccaccacaggaagtgacaacatgacgaggggtggtgctggagtccaggtgacagttcctgaaggggcttctgggaaatacctaggaggctccagcccagcccaggccctctccccctaccctgggcaccagatcttccatcagggccggagtaaatccctaagtgcctcaactgccctctccctggcagccatcttgtcccctctattcctctagggagcactgtgcccactctttctgggttttccaagggaatgggcttgcaggatggagtgtctgtaaaatcaacaggaaataaaactgtgtatgagccc

SEQ ID NO: 733249 - DNA, 4973 bp, Homo sapiens
  misc_feature (4678)..(4678): n is a, c, g, or t
cctacttcgctcgtccttgctctcgccgctgctgccggagccgaagcagagaaggcagcgggtcccgtgaccgtcccgagagccccgcgctcccgaccagggggcgggggcggccccggggagggcggggcaggggcggggggaagaaagggggttttgtgctgcgccgggagggccggcgccctcttccgaatgtcctgcggccccagcctctcctcacgctcgcgcagtctccgccgcagtctcagctgcagctgcaggactgagccgtgcacccggaggagacccccggaggaggcgacaaacttcgcagtgccgcgacccaaccccagccctgggtagcctgcagcatggcccagctgttcctgcccctgctggcagccctggtcctggcccaggctcctgcagctttagcagatgttctggaaggagacagctcagaggaccgcgcttttcgcgtgcgcatcgcgggcgacgcgccactgcagggcgtgctcggcggcgccctcaccatcccttgccacgtccactacctgcggccaccgccgagccgccgggctgtgctgggctctccgcgggtcaagtggactttcctgtcccggggccgggaggcagaggtgctggtggcgcggggagtgcgcgtcaaggtgaacgaggcctaccggttccgcgtggcactgcctgcgtacccagcgtcgctcaccgacgtctccctggcgctgagcgagctgcgccccaacgactcaggtatctatcgctgtgaggtccagcacggcatcgatgacagcagcgacgctgtggaggtcaaggtcaaaggggtcgtctttaggtggaggacattctacccacaatctaacttaagtccctcatgctgtagactctaccgagagggctctgcccgctatgctttctccttttctggggcccaggaggcctgtgcccgcattggagcccacatcgccaccccggagcagctctatgccgcctaccttgggggctatgagcaatgtgatgctggctggctgtcggatcagaccgtgaggtatcccatccagaccccacgagaggcctgttacggagacatggatggcttccccggggtccggaactatggtgtggtggacccggatgacctctatgatgtgtactgttatgctgaagacctaaatggagaactgttcctgggtgaccctccagagaagctgacattggaggaagcacgggcgtactgccaggagcggggtgcagagattgccaccacgggccaactgtatgcagcctgggatggtggcctggaccactgcagcccagggtggctagctgatggcagtgtgcgctaccccatcgtcacacccagccagcgctgtggtgggggcttgcctggtgtcaagactctcttcctcttccccaaccagactggcttccccaataagcacagccgcttcaacgtctactgcttccgagactcggcccagccttctgccatccctgaggcctccaacccagcctccaacccagcctctgatggactagaggctatcgtcacagtgacagagaccctggaggaactgcagctgcctcaggaagccacagagagtgaatcccgtggggccatctactccatccccatcatggaggacggaggaggtggaagctccactccagaagacccagcagaggcccctaggacgctcctagaatttgaaacacaatccatggtaccgcccacggggttctcagaagaggaaggtaaggcattggaggaagaagagaaatatgaagatgaagaagagaaagaggaggaagaagaagaggaggaggtggaggatgaggctctgtgggcatggcccagcgagctcagcagcccgggccctgaggcctctctccccactgagccagcagcccaggaggagtcactctcccaggcgccagcaagggcagtcctgcagcctggtgcatcaccacttcctgatggagagtcagaagcttccaggcctccaagggtccatggaccacctactgagactctgcccactcccagggagaggaacctagcatccccatcaccttccactctggttgaggcaagagaggtgggggaggcaactggtggtcctgagctatctggggtccctcgaggagagagcgaggagacaggaagctccgagggtgccccttccctgcttccagccacacgggcccctgagggtaccagggagctggaggccccctctgaagataattctggaagaactgccccagcagggacctcagtgcaggcccagccagtgctgcccactgacagcgccagccgaggtggagtggccgtggtccccgcatcaggtgactgtgtccccagcccctgccacaatggtgggacatgcttggaggaggaggaaggggtccgctgcctatgtctgcctggctatgggggggacctgtgcgatgttggtgagtgttgagggacggggggcaggtttgaagcctggaccctgccacaacgtgctacttctggaggggggagggagaacattggttttggccttgtcattaatgagtccctgttttaggcaagttgcataacttctttgagtcctaccctcaattttcttatctaagtgaaaccacaatgcctctcatagggggtccatttgagaccagtgcaaagcatactcctggcatttaatcggtggtcaatacatgacaggctccattctcctggagaggagagccactgctcgttaggatggagacccaggccggaactccatccctcaccctggttcctgtctcttagaaaaggcaccagcgcccctgcccaagagcccctccaggctcctgctaccccctcattctctactagctcttttgcaccgccctcctgtcccccttagtcccgcccctctcggcctgcggtagtggaaggagaccagccccttccaggggacctggccctctgggttttggggccctaagatgcccgcccttatgtgccgcaggcctccgcttctgcaaccccggctgggacgccttccagggcgcctgctacaagcacttttccacacgaaggagctgggaggaggcagagacccagtgccggatgtacggcgcgcatctggccagcatcagcacacccgaggaacaggacttcatcaacagtgggctgggagacagggcgggaggggcccccgccatatgctctcactctctctcactcgcctaaccgccttcctcattaacccatgcacttattccttggttttctcaagcgtgcattccctcactcattcgttcactccccttctcattctctctcccttcccaccctacgcttaggcagtggccttcgggaacggagagtggaggttcgcgcagtagagtgcgcctgtgtgggccgggccgccgtgcagggggccgcctccaatccctccaacctccctgctctccgacctccgtcggcctcctccaactccaactccaatcttgttgaaagttttgactctttttccaaaactccccttttctagcctgggttgatatcttccttattctcccacccccattcccctgctttccatctggcccttgagcagaggctggggtagaagaacccgacaagggcgggtgctggatcgcggggaagggtttccaaggcagtcaccgcagaccgcccgggagcggggaacggccgccatctgctggcggctgcgctcactgcacgccttcgtctccctagaccggtaccgggagtaccagtggatcggactcaacgacaggaccatcgaaggcgacttcttgtggtcggatggcgtccccctgctctatgagaactggaaccctgggcagcctgacagctacttcctgtctggagagaactgcgtggtcatggtgtggcatgatcagggacaatggagtgacgtgccctgcaactaccacctgtcctacacctgcaagatggggctggtgtcctgtgggccgccaccggagctgcccctggctcaagtgttcggccgcccacggctgcgctatgaggtggacactgtgcttcgctaccggtgccgggaaggactggcccagcgcaatctgccgctgatccgatgccaagagaacggtcgttgggaggccccccagatctcctgtgtgcccagaagacctgcccgagctctgcacccagaggaggacccagaaggacgtcaggggaggctactgggacgctggaaggcgctgttgatccccccttccagccccatgccaggtccctagggggcaaggccttgaacactgccggccacagcactgccctgtcacccaaattttccctcacaccctgcgctcccgccaccacaggaagtgacaacatgacgaggggtggtgctggagtccaggtgacagttcctgaaggggcttctgggaaatacctaggaggctccagcccagcccaggccctctccccctaccctgggcaccagatcttccatcagggccggagtaaatccctaagtgcctcaactgccctctccctggcagccatcttgtcccctctattcctctagggagcactgtgcccactctttctgggttttccaagggaatgggcttgcaggatggagtgtctgtaaaatcaacaggaaataaaactgtgtatgagcccagaaagaaaaaaaagaaacaacaaaanaaaaccaaaaacaaaaaaagggggcgccccccaaaaaaacaccccccgggggaccccaaagtagcgacccccactttttttgcaaaggggggcccccacaagagggcagcacgattataaaagaccggcgccggccaccgaggcataaaacaccgcggtgtgtgggaacaacgcgtgccagtggaacatctgcgggaggaaccaccactgcgagggcgggaaaaatgggcacgacacacgcgaaaattagcccacgcgaacacaggggacttaacgcacacaggacagaggccgg

SEQ ID NO: 733250 - DNA, 3260 bp, Homo sapiens
cctacttcgctcgtccttgctctcgccgctgctgccggagccgaagcagagaaggcagcgggtcccgtgaccgtcccgagagccccgcgctcccgaccagggggcgggggcggccccggggagggcggggcaggggcggggggaagaaagggggttttgtgctgcgccgggagggccggcgccctcttccgaatgtcctgcggccccagcctctcctcacgctcgcgcagtctccgccgcagtctcagctgcagctgcaggactgagccgtgcacccggaggagacccccggaggaggcgacaaacttcgcagtgccgcgacccaaccccagccctgggtagcctgcagcatggcccagctgttcctgcccctgctggcagccctggtcctggcccaggctcctgcagctttagcagatgttctggaaggagacagctcagaggaccgcgcttttcgcgtgcgcatcgcgggcgacgcgccactgcagggcgtgctcggcggcgccctcaccatcccttgccacgtccactacctgcggccaccgccgagccgccgggctgtgctgggctctccgcgggtcaagtggactttcctgtcccggggccgggaggcagaggtgctggtggcgcggggagtgcgcgtcaaggtgaacgaggcctaccggttccgcgtggcactgcctgcgtacccagcgtcgctcaccgacgtctccctggcgctgagcgagctgcgccccaacgactcaggtatctatcgctgtgaggtccagcacggcatcgatgacagcagcgacgctgtggaggtcaaggtcaaaggggtcgtctttaggtggaggacattctacccacaatctaacttaagtccctcatgctgtagactctaccgagagggctctgcccgctatgctttctccttttctggggcccaggaggcctgtgcccgcattggagcccacatcgccaccccggagcagctctatgccgcctaccttgggggctatgagcaatgtgatgctggctggctgtcggatcagaccgtgaggtatcccatccagaccccacgagaggcctgttacggagacatggatggcttccccggggtccggaactatggtgtggtggacccggatgacctctatgatgtgtactgttatgctgaagacctaaatggagaactgttcctgggtgaccctccagagaagctgacattggaggaagcacgggcgtactgccaggagcggggtgcagagattgccaccacgggccaactgtatgcagcctgggatggtggcctggaccactgcagcccagggtggctagctgatggcagtgtgcgctaccccatcgtcacacccagccagcgctgtggtgggggcttgcctggtgtcaagactctcttcctcttccccaaccagactggcttccccaataagcacagccgcttcaacgtctactgcttccgagactcggcccagccttctgccatccctgaggcctccaacccagcctccaacccagcctctgatggactagaggctatcgtcacagtgacagagaccctggaggaactgcagctgcctcaggaagccacagagagtgaatcccgtggggccatctactccatccccatcatggaggacggaggaggtggaagctccactccagaagacccagcagaggcccctaggacgctcctagaatttgaaacacaatccatggtaccgcccacggggttctcagaagaggaaggtaaggcattggaggaagaagagaaatatgaagatgaagaagagaaagaggaggaagaagaagaggaggaggtggaggatgaggctctgtgggcatggcccagcgagctcagcagcccgggccctgaggcctctctccccactgagccagcagcccaggaggagtcactctcccaggcgccagcaagggcagtcctgcagcctggtgcatcaccacttcctgatggagagtcagaagcttccaggcctccaagggtccatggaccacctactgagactctgcccactcccagggagaggaacctagcatccccatcaccttccactctggttgaggcaagagaggtgggggaggcaactggtggtcctgagctatctggggtccctcgaggagagagcgaggagacaggaagctccgagggtgccccttccctgcttccagccacacgggcccctgagggtaccagggagctggaggccccctctgaagataattctggaagaactgccccagcagggacctcagtgcaggcccagccagtgctgcccactgacagcgccagccgaggtggagtggccgtggtccccgcatcaggtaccggtaccgggagtaccagtggatcggactcaacgacaggaccatcgaaggcgacttcttgtggtcggatggcgtccccctgctctatgagaactggaaccctgggcagcctgacagctacttcctgtctggagagaactgcgtggtcatggtgtggcatgatcagggacaatggagtgacgtgccctgcaactaccacctgtcctacacctgcaagatggggctggtgtcctgtgggccgccaccggagctgcccctggctcaagtgttcggccgcccacggctgcgctatgaggtggacactgtgcttcgctaccggtgccgggaaggactggcccagcgcaatctgccgctgatccgatgccaagagaacggtcgttgggaggccccccagatctcctgtgtgcccagaagacctgcccgagctctgcacccagaggaggacccagaaggacgtcaggggaggctactgggacgctggaaggcgctgttgatccccccttccagccccatgccaggtccctagggggcaaggccttgaacactgccggccacagcactgccctgtcacccaaattttccctcacaccctgcgctcccgccaccacaggaagtgacaacatgacgaggggtggtgctggagtccaggtgacagttcctgaaggggcttctgggaaatacctaggaggctccagcccagcccaggccctctccccctaccctgggcaccagatcttccatcagggccggagtaaatccctaagtgcctcaactgccctctccctggcagccatcttgtcccctctattcctctagggagcactgtgcccactctttctgggttttccaagggaatgggcttgcaggatggagtgtctgtaaaatcaacaggaaataaaactgtgtatgagccc

SEQ ID NO: 733251 - DNA, 3311 bp, Homo sapiens
cctacttcgctcgtccttgctctcgccgctgctgccggagccgaagcagagaaggcagcgggtcccgtgaccgtcccgagagccccgcgctcccgaccagggggcgggggcggccccggggagggcggggcaggggcggggggaagaaagggggttttgtgctgcgccgggagggccggcgccctcttccgaatgtcctgcggccccagcctctcctcacgctcgcgcagtctccgccgcagtctcagctgcagctgcaggactgagccgtgcacccggaggagacccccggaggaggcgacaaacttcgcagtgccgcgacccaaccccagccctgggtagcctgcagcatggcccagctgttcctgcccctgctggcagccctggtcctggcccaggctcctgcagctttagcagatgttctggaaggagacagctcagaggaccgcgcttttcgcgtgcgcatcgcgggcgacgcgccactgcagggcgtgctcggcggcgccctcaccatcccttgccacgtccactacctgcggccaccgccgagccgccgggctgtgctgggctctccgcgggtcaagtggactttcctgtcccggggccgggaggcagaggtgctggtggcgcggggagtgcgcgtcaaggtgaacgaggcctaccggttccgcgtggcactgcctgcgtacccagcgtcgctcaccgacgtctccctggcgctgagcgagctgcgccccaacgactcaggtatctatcgctgtgaggtccagcacggcatcgatgacagcagcgacgctgtggaggtcaaggtcaaaggggtcgtctttaggtggaggacattctacccacaatctaacttaagtccctcatgctgtagactctaccgagagggctctgcccgctatgctttctccttttctggggcccaggaggcctgtgcccgcattggagcccacatcgccaccccggagcagctctatgccgcctaccttgggggctatgagcaatgtgatgctggctggctgtcggatcagaccgtgaggtatcccatccagaccccacgagaggcctgttacggagacatggatggcttccccggggtccggaactatggtgtggtggacccggatgacctctatgatgtgtactgttatgctgaagacctaaatggagaactgttcctgggtgaccctccagagaagctgacattggaggaagcacgggcgtactgccaggagcggggtgcagagattgccaccacgggccaactgtatgcagcctgggatggtggcctggaccactgcagcccagggtggctagctgatggcagtgtgcgctaccccatcgtcacacccagccagcgctgtggtgggggcttgcctggtgtcaagactctcttcctcttccccaaccagactggcttccccaataagcacagccgcttcaacgtctactgcttccgagactcggcccagccttctgccatccctgaggcctccaacccagcctccaacccagcctctgatggactagaggctatcgtcacagtgacagagaccctggaggaactgcagctgcctcaggaagccacagagagtgaatcccgtggggccatctactccatccccatcatggaggacggaggaggtggaagctccactccagaagacccagcagaggcccctaggacgctcctagaatttgaaacacaatccatggtaccgcccacggggttctcagaagaggaaggtaaggcattggaggaagaagagaaatatgaagatgaagaagagaaagaggaggaagaagaagaggaggaggtggaggatgaggctctgtgggcatggcccagcgagctcagcagcccgggccctgaggcctctctccccactgagccagcagcccaggaggagtcactctcccaggcgccagcaagggcagtcctgcagcctggtgcatcaccacttcctgatggagagtcagaagcttccaggcctccaagggtccatggaccacctactgagactctgcccactcccagggagaggaacctagcatccccatcaccttccactctggttgaggcaagagaggtgggggaggcaactggtggtcctgagctatctggggtccctcgaggagagagcgaggagacaggaagctccgagggtgccccttccctgcttccagccacacgggcccctgagggtaccagggagctggaggccccctctgaagataattctggaagaactgccccagcagggacctcagtgcaggcccagccagtgctgcccactgacagcgccagccgaggtggagtggccgtggtccccgcatcaggtaccggtaccgggagtaccagtggatcggactcaacgacaggaccatcgaaggcgacttcttgtggtcggatggcgtccccctgctctatgagaactggaaccctgggcagcctgacagctacttcctgtctggagagaactgcgtggtcatggtgtggcatgatcagggacaatggagtgacgtgccctgcaactaccacctgtcctacacctgcaagatggggctggtgtcctgtgggccgccaccggagctgcccctggctcaagtgttcggccgcccacggctgcgctatgaggtggacactgtgcttcgctaccggtgccgggaaggactggcccagcgcaatctgccgctgatccgatgccaagagaacggtcgttgggaggccccccagatctcctgtgtgcccagaagacctgcccgagctctgcacccagaggaggacccagaaggacgtcaggggaggctactgggacgctggaaggcgctgttgatccccccttccagccccatgccaggtccctagggggcaaggccttgaacactgccggccacagcactgccctgtcacccaaattttccctcacaccctgcgctcccgccaccacaggaagtgacaacatgacgaggggtggtgctggagtccaggtgacagttcctgaaggggcttctgggaaatacctaggaggctccagcccagcccaggccctctccccctaccctgggcaccagatcttccatcagggccggagtaaatccctaagtgcctcaactgccctctccctggcagccatcttgtcccctctattcctctagggagcactgtgcccactctttctgggttttccaagggaatgggcttgcaggatggagtgtctgtaaaatcaacaggaaataaaactgtgtatgagccccaaaaaaaacacaaaacaaaaaaaaaaaaaaaaaaaaaaaacaaaaaaaaa

SEQ ID NO: 733252 - DNA, 3582 bp, Homo sapiens
  misc_feature (3287)..(3287): n is a, c, g, or t
cctacttcgctcgtccttgctctcgccgctgctgccggagccgaagcagagaaggcagcgggtcccgtgaccgtcccgagagccccgcgctcccgaccagggggcgggggcggccccggggagggcggggcaggggcggggggaagaaagggggttttgtgctgcgccgggagggccggcgccctcttccgaatgtcctgcggccccagcctctcctcacgctcgcgcagtctccgccgcagtctcagctgcagctgcaggactgagccgtgcacccggaggagacccccggaggaggcgacaaacttcgcagtgccgcgacccaaccccagccctgggtagcctgcagcatggcccagctgttcctgcccctgctggcagccctggtcctggcccaggctcctgcagctttagcagatgttctggaaggagacagctcagaggaccgcgcttttcgcgtgcgcatcgcgggcgacgcgccactgcagggcgtgctcggcggcgccctcaccatcccttgccacgtccactacctgcggccaccgccgagccgccgggctgtgctgggctctccgcgggtcaagtggactttcctgtcccggggccgggaggcagaggtgctggtggcgcggggagtgcgcgtcaaggtgaacgaggcctaccggttccgcgtggcactgcctgcgtacccagcgtcgctcaccgacgtctccctggcgctgagcgagctgcgccccaacgactcaggtatctatcgctgtgaggtccagcacggcatcgatgacagcagcgacgctgtggaggtcaaggtcaaaggggtcgtctttaggtggaggacattctacccacaatctaacttaagtccctcatgctgtagactctaccgagagggctctgcccgctatgctttctccttttctggggcccaggaggcctgtgcccgcattggagcccacatcgccaccccggagcagctctatgccgcctaccttgggggctatgagcaatgtgatgctggctggctgtcggatcagaccgtgaggtatcccatccagaccccacgagaggcctgttacggagacatggatggcttccccggggtccggaactatggtgtggtggacccggatgacctctatgatgtgtactgttatgctgaagacctaaatggagaactgttcctgggtgaccctccagagaagctgacattggaggaagcacgggcgtactgccaggagcggggtgcagagattgccaccacgggccaactgtatgcagcctgggatggtggcctggaccactgcagcccagggtggctagctgatggcagtgtgcgctaccccatcgtcacacccagccagcgctgtggtgggggcttgcctggtgtcaagactctcttcctcttccccaaccagactggcttccccaataagcacagccgcttcaacgtctactgcttccgagactcggcccagccttctgccatccctgaggcctccaacccagcctccaacccagcctctgatggactagaggctatcgtcacagtgacagagaccctggaggaactgcagctgcctcaggaagccacagagagtgaatcccgtggggccatctactccatccccatcatggaggacggaggaggtggaagctccactccagaagacccagcagaggcccctaggacgctcctagaatttgaaacacaatccatggtaccgcccacggggttctcagaagaggaaggtaaggcattggaggaagaagagaaatatgaagatgaagaagagaaagaggaggaagaagaagaggaggaggtggaggatgaggctctgtgggcatggcccagcgagctcagcagcccgggccctgaggcctctctccccactgagccagcagcccaggaggagtcactctcccaggcgccagcaagggcagtcctgcagcctggtgcatcaccacttcctgatggagagtcagaagcttccaggcctccaagggtccatggaccacctactgagactctgcccactcccagggagaggaacctagcatccccatcaccttccactctggttgaggcaagagaggtgggggaggcaactggtggtcctgagctatctggggtccctcgaggagagagcgaggagacaggaagctccgagggtgccccttccctgcttccagccacacgggcccctgagggtaccagggagctggaggccccctctgaagataattctggaagaactgccccagcagggacctcagtgcaggcccagccagtgctgcccactgacagcgccagccgaggtggagtggccgtggtccccgcatcaggtaccggtaccgggagtaccagtggatcggactcaacgacaggaccatcgaaggcgacttcttgtggtcggatggcgtccccctgctctatgagaactggaaccctgggcagcctgacagctacttcctgtctggagagaactgcgtggtcatggtgtggcatgatcagggacaatggagtgacgtgccctgcaactaccacctgtcctacacctgcaagatggggctggtgtcctgtgggccgccaccggagctgcccctggctcaagtgttcggccgcccacggctgcgctatgaggtggacactgtgcttcgctaccggtgccgggaaggactggcccagcgcaatctgccgctgatccgatgccaagagaacggtcgttgggaggccccccagatctcctgtgtgcccagaagacctgcccgagctctgcacccagaggaggacccagaaggacgtcaggggaggctactgggacgctggaaggcgctgttgatccccccttccagccccatgccaggtccctagggggcaaggccttgaacactgccggccacagcactgccctgtcacccaaattttccctcacaccctgcgctcccgccaccacaggaagtgacaacatgacgaggggtggtgctggagtccaggtgacagttcctgaaggggcttctgggaaatacctaggaggctccagcccagcccaggccctctccccctaccctgggcaccagatcttccatcagggccggagtaaatccctaagtgcctcaactgccctctccctggcagccatcttgtcccctctattcctctagggagcactgtgcccactctttctgggttttccaagggaatgggcttgcaggatggagtgtctgtaaaatcaacaggaaataaaactgtgtatgagcccagaaagaaaaaaaagaaacaacaaaanaaaaccaaaaacaaaaaaagggggcgccccccaaaaaaacaccccccgggggaccccaaagtagcgacccccactttttttgcaaaggggggcccccacaagagggcagcacgattataaaagaccggcgccggccaccgaggcataaaacaccgcggtgtgtgggaacaacgcgtgccagtggaacatctgcgggaggaaccaccactgcgagggcgggaaaaatgggcacgacacacgcgaaaattagcccacgcgaacacaggggacttaacgcacacaggacagaggccgg

SEQ ID NO: 733253 - DNA, 2922 bp, Homo sapiens
cctacttcgctcgtccttgctctcgccgctgctgccggagccgaagcagagaaggcagcgggtcccgtgaccgtcccgagagccccgcgctcccgaccagggggcgggggcggccccggggagggcggggcaggggcggggggaagaaagggggttttgtgctgcgccgggagggccggcgccctcttccgaatgtcctgcggccccagcctctcctcacgctcgcgcagtctccgccgcagtctcagctgcagctgcaggactgagccgtgcacccggaggagacccccggaggaggcgacaaacttcgcagtgccgcgacccaaccccagccctgggtagcctgcagcatggcccagctgttcctgcccctgctggcagccctggtcctggcccaggctcctgcagctttagcagatgttctggaaggagacagctcagaggaccgcgcttttcgcgtgcgcatcgcgggcgacgcgccactgcagggcgtgctcggcggcgccctcaccatcccttgccacgtccactacctgcggccaccgccgagccgccgggctgtgctgggctctccgcgggtcaagtggactttcctgtcccggggccgggaggcagaggtgctggtggcgcggggagtgcgcgtcaaggtgaacgaggcctaccggttccgcgtggcactgcctgcgtacccagcgtcgctcaccgacgtctccctggcgctgagcgagctgcgccccaacgactcaggtatctatcgctgtgaggtccagcacggcatcgatgacagcagcgacgctgtggaggtcaaggtcaaaggggtcgtctttaggtggaggacattctacccacaatctaacttaagtccctcatgctgtagactctaccgagagggctctgcccgctatgctttctccttttctggggcccaggaggcctgtgcccgcattggagcccacatcgccaccccggagcagctctatgccgcctaccttgggggctatgagcaatgtgatgctggctggctgtcggatcagaccgtgaggtatcccatccagaccccacgagaggcctgttacggagacatggatggcttccccggggtccggaactatggtgtggtggacccggatgacctctatgatgtgtactgttatgctgaagacctaaatggagaactgttcctgggtgaccctccagagaagctgacattggaggaagcacgggcgtactgccaggagcggggtgcagagattgccaccacgggccaactgtatgcagcctgggatggtggcctggaccactgcagcccagggtggctagctgatggcagtgtgcgctaccccatcgtcacacccagccagcgctgtggtgggggcttgcctggtgtcaagactctcttcctcttccccaaccagactggcttccccaataagcacagccgcttcaacgtctactgcttccgagactcggcccagccttctgccatccctgaggcctccaacccagcctccaacccagcctctgatggactagaggctatcgtcacagtgacagagaccctggaggaactgcagctgcctcaggaagccacagagagtgaatcccgtggggccatctactccatccccatcatggaggacggaggaggtggaagctccactccagaagacccagcagaggcccctaggacgctcctagaatttgaaacacaatccatggtaccgcccacggggttctcagaagaggaaggtaaggcattggaggaagaagagaaatatgaagatgaagaagagaaagaggaggaagaagaagaggaggaggtggaggatgaggctctgtgggcatggcccagcgagctcagcagcccgggccctgaggcctctctccccactgagccagcagcccaggaggagtcactctcccaggcgccagcaagggcagtcctgcagcctggtgcatcaccacttcctgatggagagtcagaagcttccaggcctccaagggtccatggaccacctactgagactctgcccactcccagggagaggaacctagcatccccatcaccttccactctggttgaggcaagagaggtgggggaggcaactggtggtcctgagctatctggggtccctcgaggagagagcgaggagacaggaagctccgagggtgccccttccctgcttccagccacacgggcccctgagggtaccagggagctggaggccccctctgaagataattctggaagaactgccccagcagggacctcagtgcaggcccagccagtgctgcccactgacagcgccagccgaggtggagtggccgtggtccccgcatcaggtaattctgcccaaggctcaactgccctctctatcctactccttttcttccccctgcagctctgggtcacctgacctgtagtcctttaacccaccatcatcccaaactctcctgtcctttgccttcattctcttacccacctctacctatgggtctccaatctcggatatccaccttgtgggtatctcagctctccgcgtctttaccctgtgatcccagccccgccactgaccatctgtgacccttccctgccattgggccctccacctgtggctcacatctcgccagccccacagagcatcctcaggcctctccaagggtcctcatcacctattgcagccttcagggctcggcctattttccactactcccttcatccgcctgtgtgccgtcccctttagctgcctcctattgatctcagggaagcctgggagtcccttctcacccctcaacctccggagtccaggagaacccgtacccccacagagccttaagcaactacttctgtgaagtattttttgactgtttcatggaaaacaagccttggaaataaatctctattaaaccgctttgtaacca

SEQ ID NO: 733254 - DNA, 1556 bp, Homo sapiens
  misc_feature (32)..(33): n is a, c, g, or t
ctgtcggccggaagtattggattgtcgacccnncgtcgcgtccagcctctcctcacgctcgcgcagtctccgccgcagtctcagctgcagctgcaggactgagccgtgcacccggaggagacccccggaggaggcgacaaacttcgcagtgccgcgacccaaccccagccctgggtagcctgcagcatggcccagctgttcctgcccctgctggcagccctggtcctggcccaggctcctgcagctttagcagatgttctggaaggagacagctcagaggaccgcgcttttcgcgtgcgcatcgcgggcgacgcgccactgcagggcgtgctcggcggcgccctcaccatcccttgccacgtccactacctgcggccaccgccgagccgccgggctgtgctgggctctccgcgggtcaagtggactttcctgtcccggggccgggaggcagaggtgctggtggcgcggggagtgcgcgtcaaggtgaacgaggcctaccggttccgcgtggcactgcctgcgtacccagcgtcgctcaccgacgtctccctggcgctgagcgagctgcgccccaacgactcaggtatctatcgctgtgaggtccagcacggcatcgatgacagcagcgacgctgtggaggtcaaggtcaaaggggtcgtctttctctaccgagagggctctgcccgctatgctttctccttttctggggcccaggaggcctgtgcccgcattggagcccacatcgccaccccggagcagctctatgccgcctaccttgggggctatgagcaatgtgatgctggctggctgtcggatcagaccgtgaggtatcccatccagaccccacgagaggcctgttacggagacatggatggcttccccggggtccggaactatggtgtggtggacccggatgacctctatgatgtgtactgttatgctgaagacctaaatggagaactgttcctgggtgaccctccagagaagctgacattggaggaagcacgggcgtactgccaggagcggggtgcagagattgccaccacgggccaactgtatgcagcctgggatggtggcctggaccactgcagcccagggtggctagctgatggcagtgtgcgctaccccatcgtcacacccagccagcgctgtggtgggggcttgcctggtgtcaagactctcttcctcttccccaaccagactggcttccccaataagcacagccgcttcaacgtctactgcttccgagactcggcccagccttctgccatccctgaggcctccaacccagcccaggccctctccccctaccctgggcaccagatcttccatcagggccggagtaaatccctaagtgcctcaactgccctctccctggcagccatcttgtcccctctattcctctagggagcactgtgcccactctttctgggttttccaagggaatgggcttgcaggatggagtgtctgtaaaatcaacaggaaataaaactgtgtatgagccccaaaaaaaacacaaaacaaaaaaaaaaaaaaaaaaaaaaaacaaaaaaaaa

SEQ ID NO: 733255 - DNA, 3049 bp, Homo sapiens
  misc_feature (32)..(33): n is a, c, g, or t
ctgtcggccggaagtattggattgtcgacccnncgtcgcgtccagcctctcctcacgctcgcgcagtctccgccgcagtctcagctgcagctgcaggactgagccgtgcacccggaggagacccccggaggaggcgacaaacttcgcagtgccgcgacccaaccccagccctgggtagcctgcagcatggcccagctgttcctgcccctgctggcagccctggtcctggcccaggctcctgcagctttagcagatgttctggaaggagacagctcagaggaccgcgcttttcgcgtgcgcatcgcgggcgacgcgccactgcagggcgtgctcggcggcgccctcaccatcccttgccacgtccactacctgcggccaccgccgagccgccgggctgtgctgggctctccgcgggtcaagtggactttcctgtcccggggccgggaggcagaggtgctggtggcgcggggagtgcgcgtcaaggtgaacgaggcctaccggttccgcgtggcactgcctgcgtacccagcgtcgctcaccgacgtctccctggcgctgagcgagctgcgccccaacgactcaggtatctatcgctgtgaggtccagcacggcatcgatgacagcagcgacgctgtggaggtcaaggtcaaaggggtcgtctttctctaccgagagggctctgcccgctatgctttctccttttctggggcccaggaggcctgtgcccgcattggagcccacatcgccaccccggagcagctctatgccgcctaccttgggggctatgagcaatgtgatgctggctggctgtcggatcagaccgtgaggtatcccatccagaccccacgagaggcctgttacggagacatggatggcttccccggggtccggaactatggtgtggtggacccggatgacctctatgatgtgtactgttatgctgaagacctaaatggagaactgttcctgggtgaccctccagagaagctgacattggaggaagcacgggcgtactgccaggagcggggtgcagagattgccaccacgggccaactgtatgcagcctgggatggtggcctggaccactgcagcccagggtggctagctgatggcagtgtgcgctaccccatcgtcacacccagccagcgctgtggtgggggcttgcctggtgtcaagactctcttcctcttccccaaccagactggcttccccaataagcacagccgcttcaacgtctactgcttccgagactcggcccagccttctgccatccctgaggcctccaacccagcctccaacccagcctctgatggactagaggctatcgtcacagtgacagagaccctggaggaactgcagctgcctcaggaagccacagagagtgaatcccgtggggccatctactccatccccatcatggaggacggaggaggtggaagctccactccagaagacccagcagaggcccctaggacgctcctagaatttgaaacacaatccatggtaccgcccacggggttctcagaagaggaaggtaaggcattggaggaagaagagaaatatgaagatgaagaagagaaagaggaggaagaagaagaggaggaggtggaggatgaggctctgtgggcatggcccagcgagctcagcagcccgggccctgaggcctctctccccactgagccagcagcccaggaggagtcactctcccaggcgccagcaagggcagtcctgcagcctggtgcatcaccacttcctgatggagagtcagaagcttccaggcctccaagggtccatggaccacctactgagactctgcccactcccagggagaggaacctagcatccccatcaccttccactctggttgaggactgtgtccccagcccctgccacaatggtgggacatgcttggaggaggaggaaggggtccgctgcctatgtctgcctggctatgggggggacctgtgcgatgttggcctccgcttctgcaaccccggctgggacgccttccagggcgcctgctacaagcacttttccacacgaaggagctgggaggaggcagagacccagtgccggatgtacggcgcgcatctggccagcatcagcacacccgaggaacaggacttcatcaacaaccggtaccgggagtaccagtggatcggactcaacgacaggaccatcgaaggcgacttcttgtggtcggatggcgtccccctgctctatgagaactggaaccctgggcagcctgacagctacttcctgtctggagagaactgcgtggtcatggtgtggcatgatcagggacaatggagtgacgtgccctgcaactaccacctgtcctacacctgcaagatggggctggtgtcctgtgggccgccaccggagctgcccctggctcaagtgttcggccgcccacggctgcgctatgaggtggacactgtgcttcgctaccggtgccgggaaggactggcccagcgcaatctgccgctgatccgatgccaagagaacggtcgttgggaggccccccagatctcctgtgtgcccagaagacctgcccgagctctgcacccagaggaggacccagaaggacgtcaggggaggctactgggacgctggaaggcgctgttgatccccccttccagccccatgccaggtccctagggggcaaggccttgaacactgccggccacagcactgccctgtcacccaaattttccctcacaccctgcgctcccgccaccacaggaagtgacaacatgacgaggggtggtgctggagtccaggtgacagttcctgaaggggcttctgggaaatacctaggaggctccagcccagcccaggccctctccccctaccctgggcaccagatcttccatcagggccggagtaaatccctaagtgcctcaactgccctctccctggcagccatcttgtcccctctattcctctagggagcactgtgcccactctttctgggttttccaagggaatgggcttgcaggatggagtgtctgtaaaatcaacaggaaataaaactgtgtatgagccc

SEQ ID NO: 733256 - DNA, 3100 bp, Homo sapiens
  misc_feature (32)..(33): n is a, c, g, or t
ctgtcggccggaagtattggattgtcgacccnncgtcgcgtccagcctctcctcacgctcgcgcagtctccgccgcagtctcagctgcagctgcaggactgagccgtgcacccggaggagacccccggaggaggcgacaaacttcgcagtgccgcgacccaaccccagccctgggtagcctgcagcatggcccagctgttcctgcccctgctggcagccctggtcctggcccaggctcctgcagctttagcagatgttctggaaggagacagctcagaggaccgcgcttttcgcgtgcgcatcgcgggcgacgcgccactgcagggcgtgctcggcggcgccctcaccatcccttgccacgtccactacctgcggccaccgccgagccgccgggctgtgctgggctctccgcgggtcaagtggactttcctgtcccggggccgggaggcagaggtgctggtggcgcggggagtgcgcgtcaaggtgaacgaggcctaccggttccgcgtggcactgcctgcgtacccagcgtcgctcaccgacgtctccctggcgctgagcgagctgcgccccaacgactcaggtatctatcgctgtgaggtccagcacggcatcgatgacagcagcgacgctgtggaggtcaaggtcaaaggggtcgtctttctctaccgagagggctctgcccgctatgctttctccttttctggggcccaggaggcctgtgcccgcattggagcccacatcgccaccccggagcagctctatgccgcctaccttgggggctatgagcaatgtgatgctggctggctgtcggatcagaccgtgaggtatcccatccagaccccacgagaggcctgttacggagacatggatggcttccccggggtccggaactatggtgtggtggacccggatgacctctatgatgtgtactgttatgctgaagacctaaatggagaactgttcctgggtgaccctccagagaagctgacattggaggaagcacgggcgtactgccaggagcggggtgcagagattgccaccacgggccaactgtatgcagcctgggatggtggcctggaccactgcagcccagggtggctagctgatggcagtgtgcgctaccccatcgtcacacccagccagcgctgtggtgggggcttgcctggtgtcaagactctcttcctcttccccaaccagactggcttccccaataagcacagccgcttcaacgtctactgcttccgagactcggcccagccttctgccatccctgaggcctccaacccagcctccaacccagcctctgatggactagaggctatcgtcacagtgacagagaccctggaggaactgcagctgcctcaggaagccacagagagtgaatcccgtggggccatctactccatccccatcatggaggacggaggaggtggaagctccactccagaagacccagcagaggcccctaggacgctcctagaatttgaaacacaatccatggtaccgcccacggggttctcagaagaggaaggtaaggcattggaggaagaagagaaatatgaagatgaagaagagaaagaggaggaagaagaagaggaggaggtggaggatgaggctctgtgggcatggcccagcgagctcagcagcccgggccctgaggcctctctccccactgagccagcagcccaggaggagtcactctcccaggcgccagcaagggcagtcctgcagcctggtgcatcaccacttcctgatggagagtcagaagcttccaggcctccaagggtccatggaccacctactgagactctgcccactcccagggagaggaacctagcatccccatcaccttccactctggttgaggactgtgtccccagcccctgccacaatggtgggacatgcttggaggaggaggaaggggtccgctgcctatgtctgcctggctatgggggggacctgtgcgatgttggcctccgcttctgcaaccccggctgggacgccttccagggcgcctgctacaagcacttttccacacgaaggagctgggaggaggcagagacccagtgccggatgtacggcgcgcatctggccagcatcagcacacccgaggaacaggacttcatcaacaaccggtaccgggagtaccagtggatcggactcaacgacaggaccatcgaaggcgacttcttgtggtcggatggcgtccccctgctctatgagaactggaaccctgggcagcctgacagctacttcctgtctggagagaactgcgtggtcatggtgtggcatgatcagggacaatggagtgacgtgccctgcaactaccacctgtcctacacctgcaagatggggctggtgtcctgtgggccgccaccggagctgcccctggctcaagtgttcggccgcccacggctgcgctatgaggtggacactgtgcttcgctaccggtgccgggaaggactggcccagcgcaatctgccgctgatccgatgccaagagaacggtcgttgggaggccccccagatctcctgtgtgcccagaagacctgcccgagctctgcacccagaggaggacccagaaggacgtcaggggaggctactgggacgctggaaggcgctgttgatccccccttccagccccatgccaggtccctagggggcaaggccttgaacactgccggccacagcactgccctgtcacccaaattttccctcacaccctgcgctcccgccaccacaggaagtgacaacatgacgaggggtggtgctggagtccaggtgacagttcctgaaggggcttctgggaaatacctaggaggctccagcccagcccaggccctctccccctaccctgggcaccagatcttccatcagggccggagtaaatccctaagtgcctcaactgccctctccctggcagccatcttgtcccctctattcctctagggagcactgtgcccactctttctgggttttccaagggaatgggcttgcaggatggagtgtctgtaaaatcaacaggaaataaaactgtgtatgagccccaaaaaaaacacaaaacaaaaaaaaaaaaaaaaaaaaaaaacaaaaaaaaa

SEQ ID NO: 733257 - DNA, 3371 bp, Homo sapiens
  misc_feature (32)..(33): n is a, c, g, or t
  misc_feature (3076)..(3076): n is a, c, g, or t
ctgtcggccggaagtattggattgtcgacccnncgtcgcgtccagcctctcctcacgctcgcgcagtctccgccgcagtctcagctgcagctgcaggactgagccgtgcacccggaggagacccccggaggaggcgacaaacttcgcagtgccgcgacccaaccccagccctgggtagcctgcagcatggcccagctgttcctgcccctgctggcagccctggtcctggcccaggctcctgcagctttagcagatgttctggaaggagacagctcagaggaccgcgcttttcgcgtgcgcatcgcgggcgacgcgccactgcagggcgtgctcggcggcgccctcaccatcccttgccacgtccactacctgcggccaccgccgagccgccgggctgtgctgggctctccgcgggtcaagtggactttcctgtcccggggccgggaggcagaggtgctggtggcgcggggagtgcgcgtcaaggtgaacgaggcctaccggttccgcgtggcactgcctgcgtacccagcgtcgctcaccgacgtctccctggcgctgagcgagctgcgccccaacgactcaggtatctatcgctgtgaggtccagcacggcatcgatgacagcagcgacgctgtggaggtcaaggtcaaaggggtcgtctttctctaccgagagggctctgcccgctatgctttctccttttctggggcccaggaggcctgtgcccgcattggagcccacatcgccaccccggagcagctctatgccgcctaccttgggggctatgagcaatgtgatgctggctggctgtcggatcagaccgtgaggtatcccatccagaccccacgagaggcctgttacggagacatggatggcttccccggggtccggaactatggtgtggtggacccggatgacctctatgatgtgtactgttatgctgaagacctaaatggagaactgttcctgggtgaccctccagagaagctgacattggaggaagcacgggcgtactgccaggagcggggtgcagagattgccaccacgggccaactgtatgcagcctgggatggtggcctggaccactgcagcccagggtggctagctgatggcagtgtgcgctaccccatcgtcacacccagccagcgctgtggtgggggcttgcctggtgtcaagactctcttcctcttccccaaccagactggcttccccaataagcacagccgcttcaacgtctactgcttccgagactcggcccagccttctgccatccctgaggcctccaacccagcctccaacccagcctctgatggactagaggctatcgtcacagtgacagagaccctggaggaactgcagctgcctcaggaagccacagagagtgaatcccgtggggccatctactccatccccatcatggaggacggaggaggtggaagctccactccagaagacccagcagaggcccctaggacgctcctagaatttgaaacacaatccatggtaccgcccacggggttctcagaagaggaaggtaaggcattggaggaagaagagaaatatgaagatgaagaagagaaagaggaggaagaagaagaggaggaggtggaggatgaggctctgtgggcatggcccagcgagctcagcagcccgggccctgaggcctctctccccactgagccagcagcccaggaggagtcactctcccaggcgccagcaagggcagtcctgcagcctggtgcatcaccacttcctgatggagagtcagaagcttccaggcctccaagggtccatggaccacctactgagactctgcccactcccagggagaggaacctagcatccccatcaccttccactctggttgaggactgtgtccccagcccctgccacaatggtgggacatgcttggaggaggaggaaggggtccgctgcctatgtctgcctggctatgggggggacctgtgcgatgttggcctccgcttctgcaaccccggctgggacgccttccagggcgcctgctacaagcacttttccacacgaaggagctgggaggaggcagagacccagtgccggatgtacggcgcgcatctggccagcatcagcacacccgaggaacaggacttcatcaacaaccggtaccgggagtaccagtggatcggactcaacgacaggaccatcgaaggcgacttcttgtggtcggatggcgtccccctgctctatgagaactggaaccctgggcagcctgacagctacttcctgtctggagagaactgcgtggtcatggtgtggcatgatcagggacaatggagtgacgtgccctgcaactaccacctgtcctacacctgcaagatggggctggtgtcctgtgggccgccaccggagctgcccctggctcaagtgttcggccgcccacggctgcgctatgaggtggacactgtgcttcgctaccggtgccgggaaggactggcccagcgcaatctgccgctgatccgatgccaagagaacggtcgttgggaggccccccagatctcctgtgtgcccagaagacctgcccgagctctgcacccagaggaggacccagaaggacgtcaggggaggctactgggacgctggaaggcgctgttgatccccccttccagccccatgccaggtccctagggggcaaggccttgaacactgccggccacagcactgccctgtcacccaaattttccctcacaccctgcgctcccgccaccacaggaagtgacaacatgacgaggggtggtgctggagtccaggtgacagttcctgaaggggcttctgggaaatacctaggaggctccagcccagcccaggccctctccccctaccctgggcaccagatcttccatcagggccggagtaaatccctaagtgcctcaactgccctctccctggcagccatcttgtcccctctattcctctagggagcactgtgcccactctttctgggttttccaagggaatgggcttgcaggatggagtgtctgtaaaatcaacaggaaataaaactgtgtatgagcccagaaagaaaaaaaagaaacaacaaaanaaaaccaaaaacaaaaaaagggggcgccccccaaaaaaacaccccccgggggaccccaaagtagcgacccccactttttttgcaaaggggggcccccacaagagggcagcacgattataaaagaccggcgccggccaccgaggcataaaacaccgcggtgtgtgggaacaacgcgtgccagtggaacatctgcgggaggaaccaccactgcgagggcgggaaaaatgggcacgacacacgcgaaaattagcccacgcgaacacaggggacttaacgcacacaggacagaggccgg

SEQ ID NO: 733258 - DNA, 3045 bp, Homo sapiens
  misc_feature (32)..(33): n is a, c, g, or t
ctgtcggccggaagtattggattgtcgacccnncgtcgcgtccagcctctcctcacgctcgcgcagtctccgccgcagtctcagctgcagctgcaggactgagccgtgcacccggaggagacccccggaggaggcgacaaacttcgcagtgccgcgacccaaccccagccctgggtagcctgcagcatggcccagctgttcctgcccctgctggcagccctggtcctggcccaggctcctgcagctttagcagatgttctggaaggagacagctcagaggaccgcgcttttcgcgtgcgcatcgcgggcgacgcgccactgcagggcgtgctcggcggcgccctcaccatcccttgccacgtccactacctgcggccaccgccgagccgccgggctgtgctgggctctccgcgggtcaagtggactttcctgtcccggggccgggaggcagaggtgctggtggcgcggggagtgcgcgtcaaggtgaacgaggcctaccggttccgcgtggcactgcctgcgtacccagcgtcgctcaccgacgtctccctggcgctgagcgagctgcgccccaacgactcaggtatctatcgctgtgaggtccagcacggcatcgatgacagcagcgacgctgtggaggtcaaggtcaaaggggtcgtctttctctaccgagagggctctgcccgctatgctttctccttttctggggcccaggaggcctgtgcccgcattggagcccacatcgccaccccggagcagctctatgccgcctaccttgggggctatgagcaatgtgatgctggctggctgtcggatcagaccgtgaggtatcccatccagaccccacgagaggcctgttacggagacatggatggcttccccggggtccggaactatggtgtggtggacccggatgacctctatgatgtgtactgttatgctgaagacctaaatggagaactgttcctgggtgaccctccagagaagctgacattggaggaagcacgggcgtactgccaggagcggggtgcagagattgccaccacgggccaactgtatgcagcctgggatggtggcctggaccactgcagcccagggtggctagctgatggcagtgtgcgctaccccatcgtcacacccagccagcgctgtggtgggggcttgcctggtgtcaagactctcttcctcttccccaaccagactggcttccccaataagcacagccgcttcaacgtctactgcttccgagactcggcccagccttctgccatccctgaggcctccaacccagcctccaacccagcctctgatggactagaggctatcgtcacagtgacagagaccctggaggaactgcagctgcctcaggaagccacagagagtgaatcccgtggggccatctactccatccccatcatggaggacggaggaggtggaagctccactccagaagacccagcagaggcccctaggacgctcctagaatttgaaacacaatccatggtaccgcccacggggttctcagaagaggaaggtaaggcattggaggaagaagagaaatatgaagatgaagaagagaaagaggaggaagaagaagaggaggaggtggaggatgaggctctgtgggcatggcccagcgagctcagcagcccgggccctgaggcctctctccccactgagccagcagcccaggaggagtcactctcccaggcgccagcaagggcagtcctgcagcctggtgcatcaccacttcctgatggagagtcagaagcttccaggcctccaagggtccatggaccacctactgagactctgcccactcccagggagaggaacctagcatccccatcaccttccactctggttgaggcaagagaggtgggggaggcaactggtggtcctgagctatctggggtccctcgaggagagagcgaggagacaggaagctccgagggtgccccttccctgcttccagccacacgggcccctgagggtaccagggagctggaggccccctctgaagataattctggaagaactgccccagcagggacctcagtgcaggcccagccagtgctgcccactgacagcgccagccgaggtggagtggccgtggtccccgcatcaggtaccggtaccgggagtaccagtggatcggactcaacgacaggaccatcgaaggcgacttcttgtggtcggatggcgtccccctgctctatgagaactggaaccctgggcagcctgacagctacttcctgtctggagagaactgcgtggtcatggtgtggcatgatcagggacaatggagtgacgtgccctgcaactaccacctgtcctacacctgcaagatggggctggtgtcctgtgggccgccaccggagctgcccctggctcaagtgttcggccgcccacggctgcgctatgaggtggacactgtgcttcgctaccggtgccgggaaggactggcccagcgcaatctgccgctgatccgatgccaagagaacggtcgttgggaggccccccagatctcctgtgtgcccagaagacctgcccgagctctgcacccagaggaggacccagaaggacgtcaggggaggctactgggacgctggaaggcgctgttgatccccccttccagccccatgccaggtccctagggggcaaggccttgaacactgccggccacagcactgccctgtcacccaaattttccctcacaccctgcgctcccgccaccacaggaagtgacaacatgacgaggggtggtgctggagtccaggtgacagttcctgaaggggcttctgggaaatacctaggaggctccagcccagcccaggccctctccccctaccctgggcaccagatcttccatcagggccggagtaaatccctaagtgcctcaactgccctctccctggcagccatcttgtcccctctattcctctagggagcactgtgcccactctttctgggttttccaagggaatgggcttgcaggatggagtgtctgtaaaatcaacaggaaataaaactgtgtatgagccc

SEQ ID NO: 733259 - DNA, 3096 bp, Homo sapiens
  misc_feature (32)..(33): n is a, c, g, or t
ctgtcggccggaagtattggattgtcgacccnncgtcgcgtccagcctctcctcacgctcgcgcagtctccgccgcagtctcagctgcagctgcaggactgagccgtgcacccggaggagacccccggaggaggcgacaaacttcgcagtgccgcgacccaaccccagccctgggtagcctgcagcatggcccagctgttcctgcccctgctggcagccctggtcctggcccaggctcctgcagctttagcagatgttctggaaggagacagctcagaggaccgcgcttttcgcgtgcgcatcgcgggcgacgcgccactgcagggcgtgctcggcggcgccctcaccatcccttgccacgtccactacctgcggccaccgccgagccgccgggctgtgctgggctctccgcgggtcaagtggactttcctgtcccggggccgggaggcagaggtgctggtggcgcggggagtgcgcgtcaaggtgaacgaggcctaccggttccgcgtggcactgcctgcgtacccagcgtcgctcaccgacgtctccctggcgctgagcgagctgcgccccaacgactcaggtatctatcgctgtgaggtccagcacggcatcgatgacagcagcgacgctgtggaggtcaaggtcaaaggggtcgtctttctctaccgagagggctctgcccgctatgctttctccttttctggggcccaggaggcctgtgcccgcattggagcccacatcgccaccccggagcagctctatgccgcctaccttgggggctatgagcaatgtgatgctggctggctgtcggatcagaccgtgaggtatcccatccagaccccacgagaggcctgttacggagacatggatggcttccccggggtccggaactatggtgtggtggacccggatgacctctatgatgtgtactgttatgctgaagacctaaatggagaactgttcctgggtgaccctccagagaagctgacattggaggaagcacgggcgtactgccaggagcggggtgcagagattgccaccacgggccaactgtatgcagcctgggatggtggcctggaccactgcagcccagggtggctagctgatggcagtgtgcgctaccccatcgtcacacccagccagcgctgtggtgggggcttgcctggtgtcaagactctcttcctcttccccaaccagactggcttccccaataagcacagccgcttcaacgtctactgcttccgagactcggcccagccttctgccatccctgaggcctccaacccagcctccaacccagcctctgatggactagaggctatcgtcacagtgacagagaccctggaggaactgcagctgcctcaggaagccacagagagtgaatcccgtggggccatctactccatccccatcatggaggacggaggaggtggaagctccactccagaagacccagcagaggcccctaggacgctcctagaatttgaaacacaatccatggtaccgcccacggggttctcagaagaggaaggtaaggcattggaggaagaagagaaatatgaagatgaagaagagaaagaggaggaagaagaagaggaggaggtggaggatgaggctctgtgggcatggcccagcgagctcagcagcccgggccctgaggcctctctccccactgagccagcagcccaggaggagtcactctcccaggcgccagcaagggcagtcctgcagcctggtgcatcaccacttcctgatggagagtcagaagcttccaggcctccaagggtccatggaccacctactgagactctgcccactcccagggagaggaacctagcatccccatcaccttccactctggttgaggcaagagaggtgggggaggcaactggtggtcctgagctatctggggtccctcgaggagagagcgaggagacaggaagctccgagggtgccccttccctgcttccagccacacgggcccctgagggtaccagggagctggaggccccctctgaagataattctggaagaactgccccagcagggacctcagtgcaggcccagccagtgctgcccactgacagcgccagccgaggtggagtggccgtggtccccgcatcaggtaccggtaccgggagtaccagtggatcggactcaacgacaggaccatcgaaggcgacttcttgtggtcggatggcgtccccctgctctatgagaactggaaccctgggcagcctgacagctacttcctgtctggagagaactgcgtggtcatggtgtggcatgatcagggacaatggagtgacgtgccctgcaactaccacctgtcctacacctgcaagatggggctggtgtcctgtgggccgccaccggagctgcccctggctcaagtgttcggccgcccacggctgcgctatgaggtggacactgtgcttcgctaccggtgccgggaaggactggcccagcgcaatctgccgctgatccgatgccaagagaacggtcgttgggaggccccccagatctcctgtgtgcccagaagacctgcccgagctctgcacccagaggaggacccagaaggacgtcaggggaggctactgggacgctggaaggcgctgttgatccccccttccagccccatgccaggtccctagggggcaaggccttgaacactgccggccacagcactgccctgtcacccaaattttccctcacaccctgcgctcccgccaccacaggaagtgacaacatgacgaggggtggtgctggagtccaggtgacagttcctgaaggggcttctgggaaatacctaggaggctccagcccagcccaggccctctccccctaccctgggcaccagatcttccatcagggccggagtaaatccctaagtgcctcaactgccctctccctggcagccatcttgtcccctctattcctctagggagcactgtgcccactctttctgggttttccaagggaatgggcttgcaggatggagtgtctgtaaaatcaacaggaaataaaactgtgtatgagccccaaaaaaaacacaaaacaaaaaaaaaaaaaaaaaaaaaaaacaaaaaaaaa

SEQ ID NO: 733260 - DNA, 1596 bp, Homo sapiens; identical to SEQ ID NO: 87837
  misc_feature (6)..(6): n is a, c, g, or t
  misc_feature (1486)..(1486): n is a, c, g, or t

SEQ ID NO: 733261 - DNA, 3345 bp, Homo sapiens
  misc_feature (2369)..(2369): n is a, c, g, or t
tcccagccggctgaggcgggcagggccgggcggggccgcgccacggagtccacagcccggcgctccctgccgcgccgccgccgcaccgcgccccacaggagaagacgaaccgggcccggcggccgaagcggcccgcgaggcgcgggaggcatgaagttgggcgcgcacgggcctcgaagcggcggggagccgggagccgcccgcatctagagcccgcgaggtgcgtgcgccatggagctagggggccccggagcgccgcggctgctgccgccgctgctgctgcttctggggaccggcctcctgcgcgccagcagccatgtggagacccgggcccacgccgaggagcggctcctgaagaaactcttctccggttacaacaagtggtcccgacccgtggccaacatctcggacgtggtcctcgtccgcttcggcctgtccatcgctcagctcattgacgtggatgagaagaaccagatgatgaccacgaacgtatgggtgaagcaggagtggcacgactacaagctgcgctgggacccagctgactatgagaatgtcacctccatccgcatcccctccgagctcatctggcggccggacatcgtcctctacaacaatgctgacggggacttcgcggtcacccacctgaccaaggcccacctgttccatgacgggcgggtgcagtggactcccccggccatttacaagagctcctgcagcatcgacgtcaccttcttccccttcgaccagcagaactgcaccatgaaattcggctcctggacctacgacaaggccaagatcgacctggtgaacatgcacagccgcgtggaccagctggacttctgggagagtggcgagtgggtcatcgtggacgccgtgggcacctacaacaccaggaagtacgagtgctgcgccgagatctacccggacatcacctatgccttcgtcatccggcggctgccgctcttctacaccatcaacctcatcatcccctgcctgctcatctcctgcctcaccgtgctggtcttctacctgccctccgagtgtggcgagaagatcacgctgtgcatctccgtgctgctgtcgctcaccgtcttcctgctgctcatcaccgagatcatcccgtccacctcactggtcatcccactcatcggcgagtacctgctgttcaccatgatcttcgtcaccctgtccatcgtcatcacggtcttcgtgctcaacgtgcaccaccgctcgccacgcacgcacaccatgcccacctgggtacgcagggtcttcctggacatcgtgccacgcctgctcctcatgaagcggccgtccgtggtcaaggacaattgccggcggctcatcgagtccatgcataagatggccagtgccccgcgcttctggcccgagccagaaggggagccccctgccacgagcggcacccagagcctgcacccgccctcaccgtccttctgcgtccccctggatgtgccggctgagcctgggccttcctgcaagtcaccctccgaccagctccctcctcagcagcccctggaagctgagaaagccagcccccacccctcgcctggaccctgccgcccgccccacggcacccaggcaccagggctggccaaagccaggtccctcagcgtccagcacatgtccagccctggcgaagcggtggaaggcggcgtccggtgccggtctcggagcatccagtactgtgttccccgagacgatgccgcccccgaggcagatggccaggctgccggcgccctggcctctcgcaacacccactcggctgagctcccacccccagaccagccctctccgtgcaaatgcacatgcaagaaggagccctcttcggtgtccccgagcgccacggtcaagacccgcagcaccaaagcgccgcccccgcacctgcccctgtcgccggccctgacccgggcggtggagggcgtccagtacattgcagaccacctgaaggccgaagacacagacttctcggtgaaggaggactggaagtacgtggccatggtcatcgaccgcatcttcctctggatgttcatcatcgtctgcctgctggggacggtgggcctcttcctgccgccctggctggctggcatgatctaggaagggaccgggagcctgcgtggcctggggctgccgtgcacggggccagcatccatgcggccggcctggggccgggctggcttctccctggactctgtggggccacacgtttgccaaattttccttcctgttctgtgtctgctgtaagacggccttggacggggacacggcctctggggagaccgagtgtggagctgcttccagttggactgtggcctcaggaggcagtggcttggagcagaggtgggggtcgncgccttctacctgcaggactcgggctaagtccagctctccccctgcgcaggccctccgcggcggacaggaacacccagccccagcgagtctggagaccaggactctgccttccaggcgtagggccagggctctggcaggtggccagggctccacgggggcctagtggcttcagcccctggggtacttctgtgttgtgattccccggagctgggaaggtcccgaatggagtccagacctgggccctggttcccccaggaccctgagggtttccaccttggcgcgcagcccgggagatccgccctgggctctgggttcgggaagaaggacttcctgctacagtagctgtggggagctggtgggggcatccttgaggacctccacctgggagatgctgggaccctcggggcaggaagtccctgagaagcctcatgggagtcagggagccctggggtttccacacaggcccatgccctccgtcctggcagggcaggcagagctcagcacagcctcacccctgcaggcggtatccagaggtgagggaggcctgaaatgtttccaggcatgaccctggagcccggcagtgcaccccctaaagatggcgcacccggcagccccccattgtccccaggggcacacttcccccttgggatgggcacagcctgccccacccctccatgattccaagggccaagaggggcggggccaggatggcttttcccctgcctgtgagtgacatcggttcaggaggagacagtcaggaagcctcctgctgagtggtccacattctgctgcccccagaccccatccagccaggggtggggatggggttgggctctgcgtcccactgagtctcattcctctgtccccgagccgagctctcctgggccagggtctcgtcaggaggtgcctgagagcagaatgaataattgaggttaggaacccggcatgccgagtgccccagaaatgccgctgtgt

SEQ ID NO: 733262 - DNA, 434 bp, Homo sapiens; identical to SEQ ID NO: 87842
  misc_feature (11)..(14): n is a, c, g, or t
  misc_feature (16)..(16): n is a, c, g, or t
  misc_feature (51)..(51): n is a, c, g, or t
  misc_feature (316)..(316): n is a, c, g, or t

SEQ ID NO: 733263 - DNA, 411 bp, Homo sapiens; identical to SEQ ID NO: 87838

SEQ ID NO: 733264 - DNA, 1965 bp, Homo sapiens
  misc_feature (454)..(454): n is a, c, g, or t
  misc_feature (731)..(731): n is a, c, g, or t
  misc_feature (742)..(743): n is a, c, g, or t
ggcgccggggtcctgagggctgtcccgctggcggcggccgggccgtgctggagtgacggcgtctgtgcttgcaggtgaaggaggactggaagtacgtggccatggtcatcgaccgcatcttcctctggatgttcatcatcgtctgcctgctggggacggtgggcctcttcctgccgccctggctggctggcatgatctaggaagggaccgggagcctgcgtggcctggggctgccgtgcacggggccagcatccatgcggccggcctggggccgggctggcttctccctggactctgtggggccacacgtttgccaaattttccttcctgttctgtgtctgctgtaagacggccttggacggggacacggcctctggggagaccgagtgtggagctgcttccagttggactgtggcctcaggaggcagtggcttggagcagaggtgggggtcgncgccttctacctgcaggactcgggctaagtccagttcaagagtctcctgagctcccctgcagatggaactcactcctcccagtctctcagcagatctggtgatggtcccgaccgcaaggggcccttgaagggagttcacgccccttcagccccaagcgccccgtcttctggaggcccggccgcctctcccacccaccgtgtcctgcgcctgtgtgggcttcaacttctcccccagggtccttgagcctctcgggccccatgagggtgagccagcagngctccaatctnnttcgctaggagagggtccaggcagggattgtgtttggttgtgttttgggtaagttagtgagaactcaagtcttgtgcctaaggagccttggagaacagagttttgtggagctggttccgcgtggggagaatcgggaggcccacgcgggaccaggctctccccctgcgcaggccctccgcggcggacaggaacacccagccccagcgagtctggagaccaggactctgccttccaggcgtagggccagggctctggcaggtggccagggctccacgggggcctagtggcttcagcccctggggtacttctgtgttgtgattccccggagctgggaaggtcccgaatggagtccagacctgggccctggttcccccaggaccctgagggtttccaccttggcgcgcagcccgggagatccgccctgggctctgggttcgggaagaaggacttcctgctacagtagctgtggggagctggtgggggcatccttgaggacctccacctgggagatgctgggaccctcggggcaggaagtccctgagaagcctcatgggagtcagggagccctggggtttccacacaggcccatgccctccgtcctggcagggcaggcagagctcagcacagcctcacccctgcaggcggtatccagaggtgagggaggcctgaaatgtttccaggcatgaccctggagcccggcagtgcaccccctaaagatggcgcacccggcagccccccattgtccccaggggcacacttcccccttgggatgggcacagcctgccccacccctccatgattccaagggccaagaggggcggggccaggatggcttttcccctgcctgtgagtgacatcggttcaggaggagacagtcaggaagcctcctgctgagtggtccacattctgctgcccccagaccccatccagccaggggtggggatggggttgggctctgcgtcccactgagtctcattcctctgtccccgagccgagctctcctgggccagggtctcgtcaggaggtgcctgagagcagaatgaataattgaggttaggaacccggcatgccgagtgccccagaaatgccgctgtgtccccgcgggcagtgacgtgagtggggaggagactcaggcccacattgcccacacctgcctctgaactgctgctggtcacccccacccccgggtgcctgtgaccggggtcctgaggctggggctttt

SEQ ID NO: 733265 - DNA, 457 bp, Homo sapiens
ggagatgtttgtggccttgtccccacatccctaggtcccctcagagtccccatcctgggctcggctgcctccagggacggggcactcaccccctccacaggtcgcccgtccaccatatcttgccctggccgtgtccttgtgccagtggctgtagatgaggaaacctagggccagagaaagacaccaaggggtcactggcccccttcctctctcggtgccctaggatgagaagaaccagatgatgaccacgaacgtatgggtgaagcaggtgagtgggagggcactgcctgccccacccctgccctcccccacacccctcaccctgctgccctgtcctggccctgccccaccctggccctgctgagaactcaagtcttgtgcctaaggagccttggagaacagagttttgtggagctggttccgcgtggggagaatcgggaggcccacgcgggaccag

SEQ ID NO: 733266 - DNA, 924 bp, Homo sapiens
  misc_feature (8)..(8): n is a, c, g, or t
  misc_feature (75)..(75): n is a, c, g, or t
  misc_feature (90)..(90): n is a, c, g, or t
  misc_feature (99)..(99): n is a, c, g, or t
  misc_feature (101)..(101): n is a, c, g, or t
  misc_feature (104)..(104): n is a, c, g, or t
  misc_feature (122)..(122): n is a, c, g, or t
  misc_feature (158)..(163): n is a, c, g, or t
  misc_feature (166)..(166): n is a, c, g, or t
  misc_feature (736)..(736): n is a, c, g, or t
  misc_feature (784)..(784): n is a, c, g, or t
  misc_feature (865)..(865): n is a, c, g, or t
tctgaatncccaccctgcgactgttggttctgcatcagcaaacgctgaggagtgggcagattttctttgtctttngcttgcattttctanatccacacntnganactgcccatgttgacganacagcagcagggggagagggagggaaggaaggtgcnnnnnnaanaaggaaggcacggaacaggcatgtgacactaggccacaagcgataagcacaggcacctgacttttaagtttttgtttgtttgttgtttcccaaagtgctgataacaataacaacaacaataggattccaaccaggagcctcaagtgacagccaggaagagacctgaaggttggggccaccacaatgccaaatcgtttctaaaggaagctgaaaaatgggactgtcttttgcccacttcgttgtgttaaaaggggacatttgtccaaactccccaaccgagttctagaagctcctgacaaggaggcagcatccagccttgaccaggcctcccagttccctggaaccgtatcaggcattcgcctgcctctcacaaatgtttcagggaggccagttctgcagggtgtcagctccaggacccacagggccagaaccagctgggagaattggttatttgagatgtggtactgcttcctcacaagtctcccacaggccatgtaaagggtatttttttgtggcttgctgtgttgctgagatcatcgtatgcaacagctgggtaataagactagcatngctcaaactatcctgccaaacgctctcatctgatttttcctcccttcnccccaaacctccaatcaccctgagtcacctgtaaattcatttgtcattcaaagcggaataacaagttgtccctagcaaaancgctgagcgctttataattttgtggtgtatttttgtcagtaggtagcagaggcggaagt

SEQ ID NO: 733267 - DNA, 909 bp, Homo sapiens
  misc_feature (709)..(709): n is a, c, g, or t
  misc_feature (909)..(909): n is a, c, g, or t
gcaggggcgggcgacagatgcagtgcgtgcgccggagcccaagcgcacaaacggaaagagcgggcgcggtgcgcaggggcgggcgcccagcgggcttggcatgcgcgcccccgcccgaggctataaaagcatcgccacctgctgccactagccaagccgcgcgtccagttgcttggagaagcccgttcaccgcctccagctgctgctctcctcgacatggaccctgagacctgcccctgcccttctggtggctcctgcacctgcgcggactcctgcaagtgcgagggatgcaaatgcacctcctgcaagaagagctgctgctcctgctgccctgcggagtgtgagaagtgtgccaaggactgtgtgtgcaaaggcggagaggcagctgaggcagaagcagagaagtgcagctgctgccagtgagaaggcacccctccgtgtggagcacgtggagatagtgccaggtggctcagtgccacctatgcctgtggtgaagtgtggctggtgtccccttcccctgctgaccttggaggaatgacaataaatcccatgaacagcaaaaaaaaaaaaaaaaaaaaaaaaaaaaaaaaaaataaaaaaaaaaatataaataaaaaaaaaaaaattaaaatattaaaaataaaaaatattaataaaataaataaaatatttatttgtatatttttaataatattcacttatattattntatttaaaataattattacatttttttaaatcattattttttaaaaatctttgaatttccaaacataactccctttctaacatttccctttctctactattcttttatagtataaatcccctaacccttctcccacacacccattaattctccctaaattcctttacccatttaacaattatatttttttaaaaaatccn

SEQ ID NO: 733268 - DNA, 524 bp, Homo sapiens; identical to SEQ ID NO: 318604

SEQ ID NO: 733269 - DNA, 428 bp, Homo sapiens
ttcagcaacccgtctgaacagatctggcgtcctggagaattctagaatgaaggggaagagaggcagggaagagctgggaaatacgcaaagcgcctttttctccactttcggagatggtggctcctgcacctgcgcggactcctgcaagtgcgagggatgcaaatgcacctcctgcaagaagagctgctgctcctgctgccctgcggagtgtgagaagtgtgccaaggactgtgtgtgcaaaggcggagaggcagctgaggcagaagcagagaagtgcagctgctgccagtgagaaggcacccctccgtgtggagcacgtggagatagtgccaggtggctcagtgccacctatgcctgtggtgaagtgtggctggtgtccccttcccctgctgaccttggaggaatgacaataaatcccatgaacagca

SEQ ID NO: 733270 - DNA, 349 bp, Homo sapiens
agaagtgcgcctgggtgcgcacccaggcgcacttctggtggctcctgcacctgcgcggactcctgcaagtgcgagggatgcaaatgcacctcctgcaagaagagctgctgctcctgctgccctgcggagtgtgagaagtgtgccaaggactgtgtgtgcaaaggcggagaggcagctgaggcagaagcagagaagtgcagctgctgccagtgagaaggcacccctccgtgtggagcacgtggagatagtgccaggtggctcagtgccacctatgcctgtggtgaagtgtggctggtgtccccttcccctgctgaccttggaggaatgacaataaatcccatgaacagca

SEQ ID NO: 733271 - DNA, 1629 bp, Homo sapiens
tgggaaaaaggcctctgtcccggaagagtcatgggaggtgaaaggggcacgtttgaagatgcgagcgctatcttcacatagttctccagttgtatggagcctcttctgccaagagagggccatgcaattcatcccagaggaacctgaggcctgaaggaggtgagagaagacctctgtgaggaaagcacacagtcaccttctcggcaactaagcagtccctgagaccatttaacatgcaacccgaagttatggtcaatcccaaaagtcaccactccattcccaactaggacattaccaaagtgacctacccagagattgcttctcatccccagtcccaatgcacatccattcccaagaaatgctttgtcttcagcctctccaggcaccatctcccttcctgtgggagcagagagcttagcctggagcacctttccttcaagccagcaacacagagcactaggttcaattccctgaaggtggccactttaagagagaaatctgaaaaccccatttgctttcttttctcccatattggcatggatttctgtcttctctaacaccttgtgaccttctctatatcatgctttaaagtgtaataatatgattttttaaaagaaatttattacttgttgcaaaggtctttttaaaccagtttagatttcaagaaaaaataaatggaaatcatcgaaaattcatttcacattaatggtctaaaaataaaccaaaggacattatgtgtgcatgtgtgtataagtgcacacagaaatatatatacatatgtagactatatacatgtgtgtatatatgtgtatatatacatacacttgtataaatgtatatacacatatacctataatgtgtgtatgtgtatttattgaagaaacagataccatactcatttctaaaagaatattcagagaatatcaagatgattctggctgaaaaaggccagtggaaattcaggtgaaaatgttcatcaattcccattgcatcacctctgtaatttttcagctctctgtataaacattaaatgtcttatatagcagcaaaaatataaaatagttgtccatattttcacaggtgtggtgtaatttataaaattagaaagcaacttatcagctacttaagagaaatggcaagttttgatatgagtatacaatatataaaaatatatatagtgctatatatataaatatttggtctctatttcattttttgcatcagtattaatactaaaatatgtctcgctagtgatgtttttatgatatccctgatcctaactgaagagacagttatttatagtcatttattttaaaaaatgaaaataagtgaataataattaggttaacattgttgctccctgtgacaaaattttataagcaaatttcaaaagacatgttgtaaattaggaggctcaacaataaaacattatgctccagaaaaaaaaaaaaaacgcataccacccgggccccttgggctcacaggagcagctgattcgcgttgttggtaggctgggccctgggggcactcattaggcatcacaggttgcaagcaatccctgcttgctaacacaaggcccgttggcactttgggcctccaactttaagccaagggctcaacttgaacaaa

SEQ ID NO: 733272 - DNA, 4813 bp, Homo sapiens
agaagccccgggctcgtcagtcaaaccggttctctgtttgcactcggcagcacgggcaggcaagtggtccctaggttcgggagcagagcagcagcgcctcagtcctggtcccccagtcccaagcctcacctgcctgcccagcgccaggatggccaccatcacctgcacccgcttcacggaagagtaccagctcttcgaggaattgggcaagggagccttctcggtggtgcgaaggtgtgtgaaggtgctggctggccaggagtatgctgccaagatcatcaacacaaagaagctgtcagccagagaccatcagaagctggagcgtgaagcccgcatctgccgcctgctgaagcaccccaacatcgtccgactacatgacagcatctcagaggagggacaccactacctgatcttcgacctggtcactggtggggaactgtttgaagatatcgtggcccgggagtattacagtgaggcggatgccagtcactgtatccagcagatcctggaggctgtgctgcactgccaccagatgggggtggtgcaccgggacctgaagcctgagaatctgttgctggcctccaagctcaagggtgccgcagtgaagctggcagactttggcctggccatagaggtggagggggagcagcaggcatggtttgggtttgcagggactcctggatatctctccccagaagtgctgcggaaggacccgtacgggaagcctgtggacctgtgggcttgtggggtcatcctgtacatcctgctggttgggtaccccccgttctgggatgaggaccagcaccgcctgtaccagcagatcaaagccggcgcctatgatttcccatcgccggaatgggacactgtcaccccggaagccaaggatctgatcaataagatgctgaccattaacccatccaaacgcatcacagctgccgaagcccttaagcacccctggatctcgcaccgctccaccgtggcatcctgcatgcacagacaggagaccgtggactgcctgaagaagttcaatgccaggaggaaactgaagggagccattctcaccacgatgctggccaccaggaacttctccggagggaagagtgggggaaacaagaagagcgatggtgtgaaggaatcctcagagagcaccaacaccaccatcgaggatgaagacaccaaagtgcggaaacaggaaattataaaagtgacagagcagctgattgaagccataagcaatggagattttgagtcctacacgaagatgtgcgaccctggcatgacagccttcgaacctgaggccctggggaacctggttgagggcctggacttccatcgattctattttgaaaacctgtggtcccggaacagcaagcccgtgcacaccaccatcctgaatccccacatccacctgatgggcgacgagtcagcctgcatcgcctacatccgcatcacgcagtacctggacgctggcggcatcccacgcaccgcccagtcggaggagacccgtgtctggcaccgccgggacggcaaatggcagatcgtccacttccacagatctggggcgccctccgtcctgccccactgagggaccaggctggggtcgctgcgttgctgtgccgcagagatccactctgtccgtggagtggagctgctggttctcccaggtggattttgctggaattctcccatgtcatcaccccaccaccgtcacttctgtacctgcatcaagaaaacctgcttgttcacaaaagtcatcgcaacttcagagcgaacggccacatctccccacctctcacccccaccctctcccctgccaggctggggcttcctcaggcatgggtgtccacagcactggccccctctccccagcctcagctgctgtccgcctgatctgtcttgggctgtaggctagaatgcccgggctggtgcccaccaggggctggggagaaggaggggtggcatgatgaggaaggcagcatccgtccgtccctctcccagacctctcctcttccagtgtccccggggaagggcagatgacactcccttccccctaagccaaccgcactgaaggagtggggagaagagcatacgccaggagcctcctgcctcaaagtgctcccctaagtcttcttcctcctgtgctgacctcagggtggtctgacccttccctcggtgtgggggatgtggccctctcaggtgcccctacttgctttctgcttccttctggtgaagtccacctccaacattaacctgcccaccccacccccgtcatccctggagaattccagctttgtcgtatctcagagagggaatctaattgtttttggggggcaaaagaaagcaacgtttaggtatcacttctacttggaccgcatgcctttttatagccaaatttctgtgtatttcgtaaatggatttcgcgttaatggatatttatgtaataactagacttctcagattattgtgagaagggtcaggttggaaggggtgtaggaagaggggtgaggggtagtttttttctgttctagtttttttttttttttttgtcatctctgaggtggaccttgtcacctgtggttattggggccaaggcggactcagctccggggagaagggcctctctgccatttcggtcccaaggtgagctgacacaggcgttccttttgggactgtggaagcatcagatgccagcactgactcaggaacagcaagtcagggcagagaggaggagggaggctgtcaggatggaaatacctggacttttctttgcttccctcgcaaactggggtcttctctaccgaacttcccaggatttcatctcaccatatctgtgtgccgcccccagcaccccccacccacctctggggggcccgtgagcgtgtgtcttcattgcctctctccccttggcgtctgatgaccacagcaaagcactgggaatttctactcttcatgcctcatcctgcagcctcgggttcgcattctctctttcttttcctctttccctctttccctgggattgactctgagtggaataccttggcacatccactaggatctactgtctgcactgttttctttgcatgactttatacgcagtaagtatgttgaaaacaaacaaaaagaagaaaacactcaacaaaaccaatctacatgttttggactaaaaaaaaaaatagaggttgtattctcagtgtccgactcggaattatgttgctgcctctctgtgcttttggcctctgtgtggccgtgttttgccagcatgagatactgtcccctctggaggattttaggggaggaagagccacgtccccagggattggaggaggctccggtacccttgaccctcctgggtgttggttggagcagaactggtgaggatgtttgatccgagattttctgagctctccccgatcaccagctgtctgctgggttcttttctcaagtcctgctgcccaggcccaggtgagacaggcaacgccaggtctgcaggccaggagagatgctgcccaggcctcctggtttccaagctggtccatcactggcctctgtccttggcagagaccttgctgcccaggcccaggggcaggctcttggcctgccccaggcccagagggcttcccagtaaggcccagtgatcccattatcccaggggcaaaaccacctgtccccttttgagctgccagttccctacagccatccccagtcaagggtgagggtgtggccttcaccaggggctgctgtaattaccgagcaaggtctgagctcttcttcagcctcagttccctcattggttaaaagggttctttgttcccatccagccgatgaaggagcaaacgtctggctatgtgaagcctaatttacctgcaggaactggcagggatagtcactggctggactcctgtttacttctagacctggtcaggctccatcccctcccccacctgcccctgattcccctcgtcggtgcctgtcaactgcttttcagcagtggactgcaggggaaagagcagtgatttggggtgagtaggcttcaattcccagctctgaccagacttgctgtgtgaccttgggcaagttcctttccctctttggagcttggtttccctgccagaggaaactgagctggaggagcctgaggtcctgcctttcattggctgacacacctcctgtccactgtgtcactctccaagtgccagagaagtggaggcagatcgctaccccaggctgagatggcccccactgtgaaggccacgcctgtgggtgggcagccacctggtgccaccacagggcaccagggatgatcctgatgcggcaggcaggggagactcacagaaaaatctgcccagagcctaccctcaccagacaaactctgtgctcctccaaaacatcctttagatgcaaaataataataataataataataaataaataaataaaaatccaaacccaagtcaaaaccttggctccagcatgaaaacacgtttacaggaaagtgttctcctgggtttgtgcccaccatggtgcgaatcctgacccaaggcctcctgtctcccttcaaagggagacccttttgggggatgagtttgccagactccccgtgctggtttctttgttactatttgtttggggttttgttttagttcttttttttttttcttttcttttttaaaaatatgtggctgtgaacttgaatgaacactgctcaaactttctgctattgggggggcgggtgggatgggaagaaggggcgtttgttttattcttggtgttttcagtgcaataaatagctacaaacttctgtgcaaaaaaaatg

SEQ ID NO: 733273 - DNA, 449 bp, Homo sapiens; identical to SEQ ID NO: 325045

SEQ ID NO: 733274 - DNA, 1209 bp, Homo sapiens
caaccagtcagtgatatcccatactttataacttgcaagcccctggccccttcccatctactaacttcaatgatcctgtgaggtaggtgcaatcattcctatttcacaggctcaccctccaagggtccaatgagaagccgccccagtccctcttccctctggcttctttcccccaggaagatgtgcgaccctggcatgacagccttcgaacctgaggccctggggaacctggttgagggcctggacttccatcgattctattttgaaaacctgtggtcccggaacagcaagcccgtgcacaccaccatcctgaatccccacatccacctgatgggcgacgagtcagcctgcatcgcctacatccgcatcacgcagtacctggacgctggcggcatcccacgcaccgcccagtcggaggagacccgtgtctggcaccgccgggacggcaaatggcagatcgtccacttccacagatctggggcgccctccgtcctgccccactgagggaccaggctggggtcgctgcgttgctgtgccgcagagatccactctgtccgtggagtggagctgctggttctcccaggtggattttgctggaattctcccatgtcatcaccccaccaccgtcacttctgtacctgcatcaagaaaacctgcttgttcacaaaagtcatcgcaacttcagagcgaacggccacatctccccacctctcacccccaccctctcccctgccaggctggggcttcctcaggcatgggtgtccacagcactggccccctctccccagcctcagctgctgtccgcctgatctgtcttgggctgtaggctagaatgcccgggctggtgcccaccaggggctggggagaaggaggggtggcatgatgaggaaggcagcatccgtccgtccctctcccagacctctcctcttccagtgtccccggggaagggcagatgacactcccttccccctaagccaaccgcactgaaggagtggggagaagagcatacgccaggagcctcctgcctcaaagtgctcccctaagtcttcttcctcctgtgctgacctcagggtggtctgacccttccctcggtgtgggggatgtggccctctcaggtgcccctacttgctttctgcttccttctggtgaagtccacctccaacattaacctgcccaccccaccccgtcgggtagagcgggaccgactga

SEQ ID NO: 733275 - DNA, 1318 bp, Homo sapiens
ggccagctctgctccctgcagtctgccctccggctgcgtgtggatgctgctcgtcctcgccctgtgggccctggtgccctgcctggcgttgttaaccctctactttttctcctccacaggagggaagagtgggggaaacaagaagagcgatggtgtgaaggaatcctcagagagcaccaacaccaccatcgaggatgaagacaccaaagtgcggaaacaggaaattataaaagtgacagagcagctgattgaagccataagcaatggagattttgagtcctacacgaagatgtgcgaccctggcatgacagccttcgaacctgaggccctggggaacctggttgagggcctggacttccatcgattctattttgaaaacctgtggtcccggaacagcaagcccgtgcacaccaccatcctgaatccccacatccacctgatgggcgacgagtcagcctgcatcgcctacatccgcatcacgcagtacctggacgctggcggcatcccacgcaccgcccagtcggaggagacccgtgtctggcaccgccgggacggcaaatggcagatcgtccacttccacagatctggggcgccctccgtcctgccccactgagggaccaggctggggtcgctgcgttgctgtgccgcagagatccactctgtccgtggagtggagctgctggttctcccaggtggattttgctggaattctcccatgtcatcaccccaccaccgtcacttctgtacctgcatcaagaaaacctgcttgttcacaaaagtcatcgcaacttcagagcgaacggccacatctccccacctctcacccccaccctctcccctgccaggctggggcttcctcaggcatgggtgtccacagcactggccccctctccccagcctcagctgctgtccgcctgatctgtcttgggctgtaggctagaatgcccgggctggtgcccaccaggggctggggagaaggaggggtggcatgatgaggaaggcagcatccgtccgtccctctcccagacctctcctcttccagtgtccccggggaagggcagatgacactcccttccccctaagccaaccgcactgaaggagtggggagaagagcatacgccaggagcctcctgcctcaaagtgctcccctaagtcttcttcctcctgtgctgacctcagggtggtctgacccttccctcggtgtgggggatgtggccctctcaggtgcccctacttgctttctgcttccttctggtgaagtccacctccaacattaacctgcccaccccaccccgtcgggtagagcgggaccgactga

SEQ ID NO: 733276 - DNA, 3193 bp, Homo sapiens
caaccagtcagtgatatcccatactttataacttgcaagcccctggccccttcccatctactaacttcaatgatcctgtgaggtaggtgcaatcattcctatttcacaggctcaccctccaagggtccaatgagaagccgccccagtccctcttccctctggcttctttcccccaggaagatgtgcgaccctggcatgacagccttcgaacctgaggccctggggaacctggttgagggcctggacttccatcgattctattttgaaaacctgtggtcccggaacagcaagcccgtgcacaccaccatcctgaatccccacatccacctgatgggcgacgagtcagcctgcatcgcctacatccgcatcacgcagtacctggacgctggcggcatcccacgcaccgcccagtcggaggagacccgtgtctggcaccgccgggacggcaaatggcagatcgtccacttccacagatctggggcgccctccgtcctgccccactgagggaccaggctggggtcgctgcgttgctgtgccgcagagatccactctgtccgtggagtggagctgctggttctcccaggtggattttgctggaattctcccatgtcatcaccccaccaccgtcacttctgtacctgcatcaagaaaacctgcttgttcacaaaagtcatcgcaacttcagagcgaacggccacatctccccacctctcacccccaccctctcccctgccaggctggggcttcctcaggcatgggtgtccacagcactggccccctctccccagcctcagctgctgtccgcctgatctgtcttgggctgtaggctagaatgcccgggctggtgcccaccaggggctggggagaaggaggggtggcatgatgaggaaggcagcatccgtccgtccctctcccagacctctcctcttccagtgtccccggggaagggcagatgacactcccttccccctaagccaaccgcactgaaggagtggggagaagagcatacgccaggagcctcctgcctcaaagtgctcccctaagtcttcttcctcctgtgctgacctcagggtggtctgacccttccctcggtgtgggggatgtggccctctcaggtgcccctacttgctttctgcttccttctggtgaagtccacctccaacattaacctgcccaccccacccccgtcatccctggagaattccagctttgtcgtatctcagagagggaatctaattgtttttggggggcaaaagaaagcaacgtttaggtatcacttctacttggaccgcatgcctttttatagccaaatttctgtgtatttcgtaaatggatttcgcgttaatggatatttatgtaataactagacttctcagattattgtgagaagggtcaggttggaaggggtgtaggaagaggggtgaggggtagtttttttctgttctagtttttttttttttttttgtcatctctgaggtggaccttgtcacctgtggttattggggccaaggcggactcagctccggggagaagggcctctctgccatttcggtcccaaggtgagctgacacaggcgttccttttgggactgtggaagcatcagatgccagcactgactcaggaacagcaagtcagggcagagaggaggagggaggctgtcaggatggaaatacctggacttttctttgcttccctcgcaaactggggtcttctctaccgaacttcccaggatttcatctcaccatatctgtgtgccgcccccagcaccccccacccacctctggggggcccgtgagcgtgtgtcttcattgcctctctccccttggcgtctgatgaccacagcaaagcactgggaatttctactcttcatgcctcatcctgcagcctcgggttcgcattctctctttcttttcctctttccctctttccctgggattgactctgagtggaataccttggcacatccactaggatctactgtctgcactgttttctttgcatgactttatacgcagtaagtatgttgaaaacaaacaaaaagaagaaaacactcaacaaaaccaatctacatgttttggactaaaaaaaaaaatagaggttgtattctcagtgtccgactcggaattatgttgctgcctctctgtgcttttggcctctgtgtggccgtgttttgccagcatgagatactgtcccctctggaggattttaggggaggaagagccacgtccccagggattggaggaggctccggtacccttgaccctcctgggtgttggttggagcagaactggtgaggatgtttgatccgagattttctgagctctccccgatcaccagctgtctgctgggttcttttctcaagtcctgctgcccaggcccaggtgagacaggcaacgccaggtctgcaggccaggagagatgctgcccaggcctcctggtttccaagctggtccatcactggcctctgtccttggcagagaccttgctgcccaggcccaggggcaggctcttggcctgccccaggcccagagggcttcccagtaaggcccagtgatcccattatcccaggggcaaaaccacctgtccccttttgagctgccagttccctacagccatccccagtcaagggtgagggtgtgggtgggcagccacctggtgccaccacagggcaccagggatgatcctgatgcggcaggcaggggagactcacagaaaaatctgcccagagcctaccctcaccagacaaactctgtgctcctccaaaacatcctttagatgcaaaataataataataataataataaataaataaataaaaatccaaacccaagtcaaaaccttggctccagcatgaaaacacgtttacaggaaagtgttctcctgggtttgtgcccaccatggtgcgaatcctgacccaaggcctcctgtctcccttcaaagggagacccttttgggggatgagtttgccagactccccgtgctggtttctttgttactatttgtttggggttttgttttagttcttttttttttttcttttcttttttaaaaatatgtggctgtgaacttgaatgaacactgctcaaactttctgctattgggggggcgggtgggatgggaagaaggggcgtttgttttattcttggtgttttcagtgcaataaatagctacaaacttctgtgcaaaaaaaatg

SEQ ID NO: 733277 - DNA, 3054 bp, Homo sapiens
caaccagtcagtgatatcccatactttataacttgcaagcccctggccccttcccatctactaacttcaatgatcctgtgaggtaggtgcaatcattcctatttcacaggctcaccctccaagggtccaatgagaagccgccccagtccctcttccctctggcttctttcccccaggaagatgtgcgaccctggcatgacagccttcgaacctgaggccctggggaacctggttgagggcctggacttccatcgattctattttgaaaacctgtggtcccggaacagcaagcccgtgcacaccaccatcctgaatccccacatccacctgatgggcgacgagtcagcctgcatcgcctacatccgcatcacgcagtacctggacgctggcggcatcccacgcaccgcccagtcggaggagacccgtgtctggcaccgccgggacggcaaatggcagatcgtccacttccacagatctggggcgccctccgtcctgccccactgagggaccaggctggggtcgctgcgttgctgtgccgcagagatccactctgtccgtggagtggagctgctggttctcccaggtggattttgctggaattctcccatgtcatcaccccaccaccgtcacttctgtacctgcatcaagaaaacctgcttgttcacaaaagtcatcgcaacttcagagcgaacggccacatctccccacctctcacccccaccctctcccctgccaggctggggcttcctcaggcatgggtgtccacagcactggccccctctccccagcctcagctgctgtccgcctgatctgtcttgggctgtaggctagaatgcccgggctggtgcccaccaggggctggggagaaggaggggtggcatgatgaggaaggcagcatccgtccgtccctctcccagacctctcctcttccagtgtccccggggaagggcagatgacactcccttccccctaagccaaccgcactgaaggagtggggagaagagcatacgccaggagcctcctgcctcaaagtgctcccctaagtcttcttcctcctgtgctgacctcagggtggtctgacccttccctcggtgtgggggatgtggccctctcaggtgcccctacttgctttctgcttccttctggtgaagtccacctccaacattaacctgcccaccccacccccgtcatccctggagaattccagctttgtcgtatctcagagagggaatctaattgtttttggggggcaaaagaaagcaacgtttaggtatcacttctacttggaccgcatgcctttttatagccaaatttctgtgtatttcgtaaatggatttcgcgttaatggatatttatgtaataactagacttctcagattattgtgagaagggtcaggttggaaggggtgtaggaagaggggtgaggggtagtttttttctgttctagtttttttttttttttttgtcatctctgaggtggaccttgtcacctgtggttattggggccaaggcggactcagctccggggagaagggcctctctgccatttcggtcccaaggtgagctgacacaggcgttccttttgggactgtggaagcatcagatgccagcactgactcaggaacagcaagtcagggcagagaggaggagggaggctgtcaggatggaaatacctggacttttctttgcttccctcgcaaactggggtcttctctaccgaacttcccaggatttcatctcaccatatctgtgtgccgcccccatctttcttttcctctttccctctttccctgggattgactctgagtggaataccttggcacatccactaggatctactgtctgcactgttttctttgcatgactttatacgcagtaagtatgttgaaaacaaacaaaaagaagaaaacactcaacaaaaccaatctacatgttttggactaaaaaaaaaaatagaggttgtattctcagtgtccgactcggaattatgttgctgcctctctgtgcttttggcctctgtgtggccgtgttttgccagcatgagatactgtcccctctggaggattttaggggaggaagagccacgtccccagggattggaggaggctccggtacccttgaccctcctgggtgttggttggagcagaactggtgaggatgtttgatccgagattttctgagctctccccgatcaccagctgtctgctgggttcttttctcaagtcctgctgcccaggcccaggtgagacaggcaacgccaggtctgcaggccaggagagatgctgcccaggcctcctggtttccaagctggtccatcactggcctctgtccttggcagagaccttgctgcccaggcccaggggcaggctcttggcctgccccaggcccagagggcttcccagtaaggcccagtgatcccattatcccaggggcaaaaccacctgtccccttttgagctgccagttccctacagccatccccagtcaagggtgagggtgtgggtgggcagccacctggtgccaccacagggcaccagggatgatcctgatgcggcaggcaggggagactcacagaaaaatctgcccagagcctaccctcaccagacaaactctgtgctcctccaaaacatcctttagatgcaaaataataataataataataataaataaataaataaaaatccaaacccaagtcaaaaccttggctccagcatgaaaacacgtttacaggaaagtgttctcctgggtttgtgcccaccatggtgcgaatcctgacccaaggcctcctgtctcccttcaaagggagacccttttgggggatgagtttgccagactccccgtgctggtttctttgttactatttgtttggggttttgttttagttcttttttttttttcttttcttttttaaaaatatgtggctgtgaacttgaatgaacactgctcaaactttctgctattgggggggcgggtgggatgggaagaaggggcgtttgttttattcttggtgttttcagtgcaataaatagctacaaacttctgtgcaaaaaaaatg

SEQ ID NO: 733278 - DNA, 3302 bp, Homo sapiens
ggccagctctgctccctgcagtctgccctccggctgcgtgtggatgctgctcgtcctcgccctgtgggccctggtgccctgcctggcgttgttaaccctctactttttctcctccacaggagggaagagtgggggaaacaagaagagcgatggtgtgaaggaatcctcagagagcaccaacaccaccatcgaggatgaagacaccaaagtgcggaaacaggaaattataaaagtgacagagcagctgattgaagccataagcaatggagattttgagtcctacacgaagatgtgcgaccctggcatgacagccttcgaacctgaggccctggggaacctggttgagggcctggacttccatcgattctattttgaaaacctgtggtcccggaacagcaagcccgtgcacaccaccatcctgaatccccacatccacctgatgggcgacgagtcagcctgcatcgcctacatccgcatcacgcagtacctggacgctggcggcatcccacgcaccgcccagtcggaggagacccgtgtctggcaccgccgggacggcaaatggcagatcgtccacttccacagatctggggcgccctccgtcctgccccactgagggaccaggctggggtcgctgcgttgctgtgccgcagagatccactctgtccgtggagtggagctgctggttctcccaggtggattttgctggaattctcccatgtcatcaccccaccaccgtcacttctgtacctgcatcaagaaaacctgcttgttcacaaaagtcatcgcaacttcagagcgaacggccacatctccccacctctcacccccaccctctcccctgccaggctggggcttcctcaggcatgggtgtccacagcactggccccctctccccagcctcagctgctgtccgcctgatctgtcttgggctgtaggctagaatgcccgggctggtgcccaccaggggctggggagaaggaggggtggcatgatgaggaaggcagcatccgtccgtccctctcccagacctctcctcttccagtgtccccggggaagggcagatgacactcccttccccctaagccaaccgcactgaaggagtggggagaagagcatacgccaggagcctcctgcctcaaagtgctcccctaagtcttcttcctcctgtgctgacctcagggtggtctgacccttccctcggtgtgggggatgtggccctctcaggtgcccctacttgctttctgcttccttctggtgaagtccacctccaacattaacctgcccaccccacccccgtcatccctggagaattccagctttgtcgtatctcagagagggaatctaattgtttttggggggcaaaagaaagcaacgtttaggtatcacttctacttggaccgcatgcctttttatagccaaatttctgtgtatttcgtaaatggatttcgcgttaatggatatttatgtaataactagacttctcagattattgtgagaagggtcaggttggaaggggtgtaggaagaggggtgaggggtagtttttttctgttctagtttttttttttttttttgtcatctctgaggtggaccttgtcacctgtggttattggggccaaggcggactcagctccggggagaagggcctctctgccatttcggtcccaaggtgagctgacacaggcgttccttttgggactgtggaagcatcagatgccagcactgactcaggaacagcaagtcagggcagagaggaggagggaggctgtcaggatggaaatacctggacttttctttgcttccctcgcaaactggggtcttctctaccgaacttcccaggatttcatctcaccatatctgtgtgccgcccccagcaccccccacccacctctggggggcccgtgagcgtgtgtcttcattgcctctctccccttggcgtctgatgaccacagcaaagcactgggaatttctactcttcatgcctcatcctgcagcctcgggttcgcattctctctttcttttcctctttccctctttccctgggattgactctgagtggaataccttggcacatccactaggatctactgtctgcactgttttctttgcatgactttatacgcagtaagtatgttgaaaacaaacaaaaagaagaaaacactcaacaaaaccaatctacatgttttggactaaaaaaaaaaatagaggttgtattctcagtgtccgactcggaattatgttgctgcctctctgtgcttttggcctctgtgtggccgtgttttgccagcatgagatactgtcccctctggaggattttaggggaggaagagccacgtccccagggattggaggaggctccggtacccttgaccctcctgggtgttggttggagcagaactggtgaggatgtttgatccgagattttctgagctctccccgatcaccagctgtctgctgggttcttttctcaagtcctgctgcccaggcccaggtgagacaggcaacgccaggtctgcaggccaggagagatgctgcccaggcctcctggtttccaagctggtccatcactggcctctgtccttggcagagaccttgctgcccaggcccaggggcaggctcttggcctgccccaggcccagagggcttcccagtaaggcccagtgatcccattatcccaggggcaaaaccacctgtccccttttgagctgccagttccctacagccatccccagtcaagggtgagggtgtgggtgggcagccacctggtgccaccacagggcaccagggatgatcctgatgcggcaggcaggggagactcacagaaaaatctgcccagagcctaccctcaccagacaaactctgtgctcctccaaaacatcctttagatgcaaaataataataataataataataaataaataaataaaaatccaaacccaagtcaaaaccttggctccagcatgaaaacacgtttacaggaaagtgttctcctgggtttgtgcccaccatggtgcgaatcctgacccaaggcctcctgtctcccttcaaagggagacccttttgggggatgagtttgccagactccccgtgctggtttctttgttactatttgtttggggttttgttttagttcttttttttttttcttttcttttttaaaaatatgtggctgtgaacttgaatgaacactgctcaaactttctgctattgggggggcgggtgggatgggaagaaggggcgtttgttttattcttggtgttttcagtgcaataaatagctacaaacttctgtgcaaaaaaaatg

SEQ ID NO: 733279 - DNA, 3163 bp, Homo sapiens
ggccagctctgctccctgcagtctgccctccggctgcgtgtggatgctgctcgtcctcgccctgtgggccctggtgccctgcctggcgttgttaaccctctactttttctcctccacaggagggaagagtgggggaaacaagaagagcgatggtgtgaaggaatcctcagagagcaccaacaccaccatcgaggatgaagacaccaaagtgcggaaacaggaaattataaaagtgacagagcagctgattgaagccataagcaatggagattttgagtcctacacgaagatgtgcgaccctggcatgacagccttcgaacctgaggccctggggaacctggttgagggcctggacttccatcgattctattttgaaaacctgtggtcccggaacagcaagcccgtgcacaccaccatcctgaatccccacatccacctgatgggcgacgagtcagcctgcatcgcctacatccgcatcacgcagtacctggacgctggcggcatcccacgcaccgcccagtcggaggagacccgtgtctggcaccgccgggacggcaaatggcagatcgtccacttccacagatctggggcgccctccgtcctgccccactgagggaccaggctggggtcgctgcgttgctgtgccgcagagatccactctgtccgtggagtggagctgctggttctcccaggtggattttgctggaattctcccatgtcatcaccccaccaccgtcacttctgtacctgcatcaagaaaacctgcttgttcacaaaagtcatcgcaacttcagagcgaacggccacatctccccacctctcacccccaccctctcccctgccaggctggggcttcctcaggcatgggtgtccacagcactggccccctctccccagcctcagctgctgtccgcctgatctgtcttgggctgtaggctagaatgcccgggctggtgcccaccaggggctggggagaaggaggggtggcatgatgaggaaggcagcatccgtccgtccctctcccagacctctcctcttccagtgtccccggggaagggcagatgacactcccttccccctaagccaaccgcactgaaggagtggggagaagagcatacgccaggagcctcctgcctcaaagtgctcccctaagtcttcttcctcctgtgctgacctcagggtggtctgacccttccctcggtgtgggggatgtggccctctcaggtgcccctacttgctttctgcttccttctggtgaagtccacctccaacattaacctgcccaccccacccccgtcatccctggagaattccagctttgtcgtatctcagagagggaatctaattgtttttggggggcaaaagaaagcaacgtttaggtatcacttctacttggaccgcatgcctttttatagccaaatttctgtgtatttcgtaaatggatttcgcgttaatggatatttatgtaataactagacttctcagattattgtgagaagggtcaggttggaaggggtgtaggaagaggggtgaggggtagtttttttctgttctagtttttttttttttttttgtcatctctgaggtggaccttgtcacctgtggttattggggccaaggcggactcagctccggggagaagggcctctctgccatttcggtcccaaggtgagctgacacaggcgttccttttgggactgtggaagcatcagatgccagcactgactcaggaacagcaagtcagggcagagaggaggagggaggctgtcaggatggaaatacctggacttttctttgcttccctcgcaaactggggtcttctctaccgaacttcccaggatttcatctcaccatatctgtgtgccgcccccatctttcttttcctctttccctctttccctgggattgactctgagtggaataccttggcacatccactaggatctactgtctgcactgttttctttgcatgactttatacgcagtaagtatgttgaaaacaaacaaaaagaagaaaacactcaacaaaaccaatctacatgttttggactaaaaaaaaaaatagaggttgtattctcagtgtccgactcggaattatgttgctgcctctctgtgcttttggcctctgtgtggccgtgttttgccagcatgagatactgtcccctctggaggattttaggggaggaagagccacgtccccagggattggaggaggctccggtacccttgaccctcctgggtgttggttggagcagaactggtgaggatgtttgatccgagattttctgagctctccccgatcaccagctgtctgctgggttcttttctcaagtcctgctgcccaggcccaggtgagacaggcaacgccaggtctgcaggccaggagagatgctgcccaggcctcctggtttccaagctggtccatcactggcctctgtccttggcagagaccttgctgcccaggcccaggggcaggctcttggcctgccccaggcccagagggcttcccagtaaggcccagtgatcccattatcccaggggcaaaaccacctgtccccttttgagctgccagttccctacagccatccccagtcaagggtgagggtgtgggtgggcagccacctggtgccaccacagggcaccagggatgatcctgatgcggcaggcaggggagactcacagaaaaatctgcccagagcctaccctcaccagacaaactctgtgctcctccaaaacatcctttagatgcaaaataataataataataataataaataaataaataaaaatccaaacccaagtcaaaaccttggctccagcatgaaaacacgtttacaggaaagtgttctcctgggtttgtgcccaccatggtgcgaatcctgacccaaggcctcctgtctcccttcaaagggagacccttttgggggatgagtttgccagactccccgtgctggtttctttgttactatttgtttggggttttgttttagttcttttttttttttcttttcttttttaaaaatatgtggctgtgaacttgaatgaacactgctcaaactttctgctattgggggggcgggtgggatgggaagaaggggcgtttgttttattcttggtgttttcagtgcaataaatagctacaaacttctgtgcaaaaaaaatg

SEQ ID NO: 733280 - DNA, 2290 bp, Homo sapiens
agaagccccgggctcgtcagtcaaaccggttctctgtttgcactcggcagcacgggcaggcaagtggtccctaggttcgggagcagagcagcagcgcctcagtcctggtcccccagtcccaagcctcacctgcctgcccagcgccaggatggccaccatcacctgcacccgcttcacggaagagtaccagctcttcgaggaattgggcaagggagccttctcggtggtgcgaaggtgtgtgaaggtgctggctggccaggagtatgctgccaagatcatcaacacaaagaagctgtcagccagagaccatcagaagctggagcgtgaagcccgcatctgccgcctgctgaagcaccccaacatcgtccgactacatgacagcatctcagaggagggacaccactacctgatcttcgacctggtcactggtggggaactgtttgaagatatcgtggcccgggagtattacagtgaggcggatgccagtcactgtatccagcagatcctggaggctgtgctgcactgccaccagatgggggtggtgcaccgggacctgaagcctgagaatctgttgctggcctccaagctcaagggtgccgcagtgaagctggcagactttggcctggccatagaggtggagggggagcagcaggcatggtttgggtttgcagggactcctggatatctctccccagaagtgctgcggaaggacccgtacgggaagcctgtggacctgtgggcttgtggggtcatcctgtacatcctgctggttgggtaccccccgttctgggatgaggaccagcaccgcctgtaccagcagatcaaagccggcgcctatgatttcccatcgccggaatgggacactgtcaccccggaagccaaggatctgatcaataagatgctgaccattaacccatccaaacgcatcacagctgccgaagcccttaagcacccctggatctcgcaccgctccaccgtggcatcctgcatgcacagacaggagaccgtggactgcctgaagaagttcaatgccaggaggaaactgaagggagccattctcaccacgatgctggccaccaggaacttctccggagggaagagtgggggaaacaagaagagcgatggtgtgaaggaatcctcagagagcaccaacaccaccatcgaggatgaagacaccaaagtgcggaaacaggaaattataaaagtgacagagcagctgattgaagccataagcaatggagattttgagtcctacacgaagatgtgcgaccctggcatgacagccttcgaacctgaggccctggggaacctggttgagggcctggacttccatcgattctattttgaaaacctgtggtcccggaacagcaagcccgtgcacaccaccatcctgaatccccacatccacctgatgggcgacgagtcagcctgcatcgcctacatccgcatcacgcagtacctggacgctggcggcatcccacgcaccgcccagtcggaggagacccgtgtctggcaccgccgggacggcaaatggcagatcgtccacttccacagatctggggcgccctccgtcctgccccactgagggaccaggctggggtcgctgcgttgctgtgccgcagagatccactctgtccgtggagtggagctgctggttctcccaggtggattttgctggaattctcccatgtcatcaccccaccaccgtcacttctgtacctgcatcaagaaaacctgcttgttcacaaaagtcatcgcaacttcagagcgaacggccacatctccccacctctcacccccaccctctcccctgccaggctggggcttcctcaggcatgggtgtccacagcactggccccctctccccagcctcagctgctgtccgcctgatctgtcttgggctgtaggctagaatgcccgggctggtgcccaccaggggctggggagaaggaggggtggcatgatgaggaaggcagcatccgtccgtccctctcccagacctctcctcttccagtgtccccggggaagggcagatgacactcccttccccctaagccaaccgcactgaaggagtggggagaagagcatacgccaggagcctcctgcctcaaagtgctcccctaagtcttcttcctcctgtgctgacctcagggtggtctgacccttccctcggtgtgggggatgtggccctctcaggtgcccctacttgctttctgcttccttctggtgaagtccacctccaacattaacctgcccaccccaccccgtcgggtagagcgggaccgactga

SEQ ID NO: 733281 - DNA, 3732 bp, Homo sapiens; identical to SEQ ID NO: 325050

SEQ ID NO: 733282 - DNA, 1384 bp, Homo sapiens
agaagccccgggctcgtcagtcaaaccggttctctgtttgcactcggcagcacgggcaggcaagtggtccctaggttcgggagcagagcagcagcgcctcagtcctggtcccccagtcccaagcctcacctgcctgcccagcgccaggatggccaccatcacctgcacccgcttcacggaagagtaccagctcttcgaggaattgggcaagggagccttctcggtggtgcgaaggtgtgtgaaggtgctggctggccaggagtatgctgccaagatcatcaacacaaagaagctgtcagccagagaccatcagaagctggagcgtgaagcccgcatctgccgcctgctgaagcaccccaacatcgtccgactacatgacagcatctcagaggagggacaccactacctgatcttcgacctggtcactggtggggaactgtttgaagatatcgtggcccgggagtattacagtgaggcggatgccagtcactgtatccagcagatcctggaggctgtgctgcactgccaccagatgggggtggtgcaccgggacctgaagcctgagaatctgttgctggcctccaagctcaagggtgccgcagtgaagctggcagactttggcctggccatagaggtggagggggagcagcaggcatggtttgggtttgcagggactcctggatatctctccccagaagtgctgcggaaggacccgtacgggaagcctgtggacctgtgggcttgtggggtcatcctgtacatcctgctggttgggtaccccccgttctgggatgaggaccagcaccgcctgtaccagcagatcaaagccggcgcctatgatttcccatcgccggaatgggacactgtcaccccggaagccaaggatctgatcaataagatgctgaccattaacccatccaaacgcatcacagctgccgaagcccttaagcacccctggatctcgcaccgctccaccgtggcatcctgcatgcacagacaggagaccgtggactgcctgaagaagttcaatgccaggaggaaactgaagggagccattctcaccacgatgctggccaccaggaacttctccggagggaagagtgggggaaacaagaagagcgatggtgtgaaggaatcctcagagagcaccaacaccaccatcgaggatgaagacaccaaagtgcggaaacaggaaattataaaagtgacagagcagctgattgaagccataagcaatggagattttgagtcctacacgaagatgtgcgaccctggcatgacagccttcgaacctgaggccctggggaacctggttgagggcctggacttccatcgattctattttgaaaaccgtgagcaattccttctctctgtggtgcctgtt

SEQ ID NO: 733283 - DNA, 2323 bp, Homo sapiens
agaagccccgggctcgtcagtcaaaccggttctctgtttgcactcggcagcacgggcaggcaagtggtccctaggttcgggagcagagcagcagcgcctcagtcctggtcccccagtcccaagcctcacctgcctgcccagcgccaggatggccaccatcacctgcacccgcttcacggaagagtaccagctcttcgaggaattgggcaagggagccttctcggtggtgcgaaggtgtgtgaaggtgctggctggccaggagtatgctgccaagatcatcaacacaaagaagctgtcagccagagaccatcagaagctggagcgtgaagcccgcatctgccgcctgctgaagcaccccaacatcgtccgactacatgacagcatctcagaggagggacaccactacctgatcttcgacctggtcactggtggggaactgtttgaagatatcgtggcccgggagtattacagtgaggcggatgccagtcactgtatccagcagatcctggaggctgtgctgcactgccaccagatgggggtggtgcaccgggacctgaagcctgagaatctgttgctggcctccaagctcaagggtgccgcagtgaagctggcagactttggcctggccatagaggtggagggggagcagcaggcatggtttgggtttgcagggactcctggatatctctccccagaagtgctgcggaaggacccgtacgggaagcctgtggacctgtgggcttgtggggtcatcctgtacatcctgctggttgggtaccccccgttctgggatgaggaccagcaccgcctgtaccagcagatcaaagccggcgcctatgatttcccatcgccggaatgggacactgtcaccccggaagccaaggatctgatcaataagatgctgaccattaacccatccaaacgcatcacagctgccgaagcccttaagcacccctggatctcgcaccgctccaccgtggcatcctgcatgcacagacaggagaccgtggactgcctgaagaagttcaatgccaggaggaaactgaagggagccattctcaccacgatgctggccaccaggaacttctccggagggaagagtgggggaaacaagaagagcgatggtgtgaagaaaagaaagtccagttccagcgttcagttaatggaatcctcagagagcaccaacaccaccatcgaggatgaagacaccaaagtgcggaaacaggaaattataaaagtgacagagcagctgattgaagccataagcaatggagattttgagtcctacacgaagatgtgcgaccctggcatgacagccttcgaacctgaggccctggggaacctggttgagggcctggacttccatcgattctattttgaaaacctgtggtcccggaacagcaagcccgtgcacaccaccatcctgaatccccacatccacctgatgggcgacgagtcagcctgcatcgcctacatccgcatcacgcagtacctggacgctggcggcatcccacgcaccgcccagtcggaggagacccgtgtctggcaccgccgggacggcaaatggcagatcgtccacttccacagatctggggcgccctccgtcctgccccactgagggaccaggctggggtcgctgcgttgctgtgccgcagagatccactctgtccgtggagtggagctgctggttctcccaggtggattttgctggaattctcccatgtcatcaccccaccaccgtcacttctgtacctgcatcaagaaaacctgcttgttcacaaaagtcatcgcaacttcagagcgaacggccacatctccccacctctcacccccaccctctcccctgccaggctggggcttcctcaggcatgggtgtccacagcactggccccctctccccagcctcagctgctgtccgcctgatctgtcttgggctgtaggctagaatgcccgggctggtgcccaccaggggctggggagaaggaggggtggcatgatgaggaaggcagcatccgtccgtccctctcccagacctctcctcttccagtgtccccggggaagggcagatgacactcccttccccctaagccaaccgcactgaaggagtggggagaagagcatacgccaggagcctcctgcctcaaagtgctcccctaagtcttcttcctcctgtgctgacctcagggtggtctgacccttccctcggtgtgggggatgtggccctctcaggtgcccctacttgctttctgcttccttctggtgaagtccacctccaacattaacctgcccaccccaccccgtcgggtagagcgggaccgactga

SEQ ID NO: 733284 - DNA, 4846 bp, Homo sapiens
agaagccccgggctcgtcagtcaaaccggttctctgtttgcactcggcagcacgggcaggcaagtggtccctaggttcgggagcagagcagcagcgcctcagtcctggtcccccagtcccaagcctcacctgcctgcccagcgccaggatggccaccatcacctgcacccgcttcacggaagagtaccagctcttcgaggaattgggcaagggagccttctcggtggtgcgaaggtgtgtgaaggtgctggctggccaggagtatgctgccaagatcatcaacacaaagaagctgtcagccagagaccatcagaagctggagcgtgaagcccgcatctgccgcctgctgaagcaccccaacatcgtccgactacatgacagcatctcagaggagggacaccactacctgatcttcgacctggtcactggtggggaactgtttgaagatatcgtggcccgggagtattacagtgaggcggatgccagtcactgtatccagcagatcctggaggctgtgctgcactgccaccagatgggggtggtgcaccgggacctgaagcctgagaatctgttgctggcctccaagctcaagggtgccgcagtgaagctggcagactttggcctggccatagaggtggagggggagcagcaggcatggtttgggtttgcagggactcctggatatctctccccagaagtgctgcggaaggacccgtacgggaagcctgtggacctgtgggcttgtggggtcatcctgtacatcctgctggttgggtaccccccgttctgggatgaggaccagcaccgcctgtaccagcagatcaaagccggcgcctatgatttcccatcgccggaatgggacactgtcaccccggaagccaaggatctgatcaataagatgctgaccattaacccatccaaacgcatcacagctgccgaagcccttaagcacccctggatctcgcaccgctccaccgtggcatcctgcatgcacagacaggagaccgtggactgcctgaagaagttcaatgccaggaggaaactgaagggagccattctcaccacgatgctggccaccaggaacttctccggagggaagagtgggggaaacaagaagagcgatggtgtgaagaaaagaaagtccagttccagcgttcagttaatggaatcctcagagagcaccaacaccaccatcgaggatgaagacaccaaagtgcggaaacaggaaattataaaagtgacagagcagctgattgaagccataagcaatggagattttgagtcctacacgaagatgtgcgaccctggcatgacagccttcgaacctgaggccctggggaacctggttgagggcctggacttccatcgattctattttgaaaacctgtggtcccggaacagcaagcccgtgcacaccaccatcctgaatccccacatccacctgatgggcgacgagtcagcctgcatcgcctacatccgcatcacgcagtacctggacgctggcggcatcccacgcaccgcccagtcggaggagacccgtgtctggcaccgccgggacggcaaatggcagatcgtccacttccacagatctggggcgccctccgtcctgccccactgagggaccaggctggggtcgctgcgttgctgtgccgcagagatccactctgtccgtggagtggagctgctggttctcccaggtggattttgctggaattctcccatgtcatcaccccaccaccgtcacttctgtacctgcatcaagaaaacctgcttgttcacaaaagtcatcgcaacttcagagcgaacggccacatctccccacctctcacccccaccctctcccctgccaggctggggcttcctcaggcatgggtgtccacagcactggccccctctccccagcctcagctgctgtccgcctgatctgtcttgggctgtaggctagaatgcccgggctggtgcccaccaggggctggggagaaggaggggtggcatgatgaggaaggcagcatccgtccgtccctctcccagacctctcctcttccagtgtccccggggaagggcagatgacactcccttccccctaagccaaccgcactgaaggagtggggagaagagcatacgccaggagcctcctgcctcaaagtgctcccctaagtcttcttcctcctgtgctgacctcagggtggtctgacccttccctcggtgtgggggatgtggccctctcaggtgcccctacttgctttctgcttccttctggtgaagtccacctccaacattaacctgcccaccccacccccgtcatccctggagaattccagctttgtcgtatctcagagagggaatctaattgtttttggggggcaaaagaaagcaacgtttaggtatcacttctacttggaccgcatgcctttttatagccaaatttctgtgtatttcgtaaatggatttcgcgttaatggatatttatgtaataactagacttctcagattattgtgagaagggtcaggttggaaggggtgtaggaagaggggtgaggggtagtttttttctgttctagtttttttttttttttttgtcatctctgaggtggaccttgtcacctgtggttattggggccaaggcggactcagctccggggagaagggcctctctgccatttcggtcccaaggtgagctgacacaggcgttccttttgggactgtggaagcatcagatgccagcactgactcaggaacagcaagtcagggcagagaggaggagggaggctgtcaggatggaaatacctggacttttctttgcttccctcgcaaactggggtcttctctaccgaacttcccaggatttcatctcaccatatctgtgtgccgcccccagcaccccccacccacctctggggggcccgtgagcgtgtgtcttcattgcctctctccccttggcgtctgatgaccacagcaaagcactgggaatttctactcttcatgcctcatcctgcagcctcgggttcgcattctctctttcttttcctctttccctctttccctgggattgactctgagtggaataccttggcacatccactaggatctactgtctgcactgttttctttgcatgactttatacgcagtaagtatgttgaaaacaaacaaaaagaagaaaacactcaacaaaaccaatctacatgttttggactaaaaaaaaaaatagaggttgtattctcagtgtccgactcggaattatgttgctgcctctctgtgcttttggcctctgtgtggccgtgttttgccagcatgagatactgtcccctctggaggattttaggggaggaagagccacgtccccagggattggaggaggctccggtacccttgaccctcctgggtgttggttggagcagaactggtgaggatgtttgatccgagattttctgagctctccccgatcaccagctgtctgctgggttcttttctcaagtcctgctgcccaggcccaggtgagacaggcaacgccaggtctgcaggccaggagagatgctgcccaggcctcctggtttccaagctggtccatcactggcctctgtccttggcagagaccttgctgcccaggcccaggggcaggctcttggcctgccccaggcccagagggcttcccagtaaggcccagtgatcccattatcccaggggcaaaaccacctgtccccttttgagctgccagttccctacagccatccccagtcaagggtgagggtgtggccttcaccaggggctgctgtaattaccgagcaaggtctgagctcttcttcagcctcagttccctcattggttaaaagggttctttgttcccatccagccgatgaaggagcaaacgtctggctatgtgaagcctaatttacctgcaggaactggcagggatagtcactggctggactcctgtttacttctagacctggtcaggctccatcccctcccccacctgcccctgattcccctcgtcggtgcctgtcaactgcttttcagcagtggactgcaggggaaagagcagtgatttggggtgagtaggcttcaattcccagctctgaccagacttgctgtgtgaccttgggcaagttcctttccctctttggagcttggtttccctgccagaggaaactgagctggaggagcctgaggtcctgcctttcattggctgacacacctcctgtccactgtgtcactctccaagtgccagagaagtggaggcagatcgctaccccaggctgagatggcccccactgtgaaggccacgcctgtgggtgggcagccacctggtgccaccacagggcaccagggatgatcctgatgcggcaggcaggggagactcacagaaaaatctgcccagagcctaccctcaccagacaaactctgtgctcctccaaaacatcctttagatgcaaaataataataataataataataaataaataaataaaaatccaaacccaagtcaaaaccttggctccagcatgaaaacacgtttacaggaaagtgttctcctgggtttgtgcccaccatggtgcgaatcctgacccaaggcctcctgtctcccttcaaagggagacccttttgggggatgagtttgccagactccccgtgctggtttctttgttactatttgtttggggttttgttttagttcttttttttttttcttttcttttttaaaaatatgtggctgtgaacttgaatgaacactgctcaaactttctgctattgggggggcgggtgggatgggaagaaggggcgtttgttttattcttggtgttttcagtgcaataaatagctacaaacttctgtgcaaaaaaaatg

SEQ ID NO: 733285 - DNA, 3841 bp, Homo sapiens; identical to SEQ ID NO: 325049

SEQ ID NO: 733286 - DNA, 3702 bp, Homo sapiens
caaccagtcagtgatatcccatactttataacttgcaagcccctggccccttcccatctactaacttcaatgatcctgtgaggtaggtgcaatcattcctatttcacaggctcaccctccaagggtccaatgagaagccgccccagtccctcttccctctggcttctttcccccaggaagatgtgcgaccctggcatgacagccttcgaacctgaggccctggggaacctggttgagggcctggacttccatcgattctattttgaaaacctgtggtcccggaacagcaagcccgtgcacaccaccatcctgaatccccacatccacctgatgggcgacgagtcagcctgcatcgcctacatccgcatcacgcagtacctggacgctggcggcatcccacgcaccgcccagtcggaggagacccgtgtctggcaccgccgggacggcaaatggcagatcgtccacttccacagatctggggcgccctccgtcctgccccactgagggaccaggctggggtcgctgcgttgctgtgccgcagagatccactctgtccgtggagtggagctgctggttctcccaggtggattttgctggaattctcccatgtcatcaccccaccaccgtcacttctgtacctgcatcaagaaaacctgcttgttcacaaaagtcatcgcaacttcagagcgaacggccacatctccccacctctcacccccaccctctcccctgccaggctggggcttcctcaggcatgggtgtccacagcactggccccctctccccagcctcagctgctgtccgcctgatctgtcttgggctgtaggctagaatgcccgggctggtgcccaccaggggctggggagaaggaggggtggcatgatgaggaaggcagcatccgtccgtccctctcccagacctctcctcttccagtgtccccggggaagggcagatgacactcccttccccctaagccaaccgcactgaaggagtggggagaagagcatacgccaggagcctcctgcctcaaagtgctcccctaagtcttcttcctcctgtgctgacctcagggtggtctgacccttccctcggtgtgggggatgtggccctctcaggtgcccctacttgctttctgcttccttctggtgaagtccacctccaacattaacctgcccaccccacccccgtcatccctggagaattccagctttgtcgtatctcagagagggaatctaattgtttttggggggcaaaagaaagcaacgtttaggtatcacttctacttggaccgcatgcctttttatagccaaatttctgtgtatttcgtaaatggatttcgcgttaatggatatttatgtaataactagacttctcagattattgtgagaagggtcaggttggaaggggtgtaggaagaggggtgaggggtagtttttttctgttctagtttttttttttttttttgtcatctctgaggtggaccttgtcacctgtggttattggggccaaggcggactcagctccggggagaagggcctctctgccatttcggtcccaaggtgagctgacacaggcgttccttttgggactgtggaagcatcagatgccagcactgactcaggaacagcaagtcagggcagagaggaggagggaggctgtcaggatggaaatacctggacttttctttgcttccctcgcaaactggggtcttctctaccgaacttcccaggatttcatctcaccatatctgtgtgccgcccccagcaccccccacccacctctggggggcccgtgagcgtgtgtcttcattgcctctctccccttggcgtctgatgaccacagcaaagcactgggaatttctactcttcatgcctcatcctgcagcctcgggttcgcattctctctttcttttcctctttccctctttccctgggattgactctgagtggaataccttggcacatccactaggatctactgtctgcactgttttctttgcatgactttatacgcagtaagtatgttgaaaacaaacaaaaagaagaaaacactcaacaaaaccaatctacatgttttggactaaaaaaaaaaatagaggttgtattctcagtgtccgactcggaattatgttgctgcctctctgtgcttttggcctctgtgtggccgtgttttgccagcatgagatactgtcccctctggaggattttaggggaggaagagccacgtccccagggattggaggaggctccggtacccttgaccctcctgggtgttggttggagcagaactggtgaggatgtttgatccgagattttctgagctctccccgatcaccagctgtctgctgggttcttttctcaagtcctgctgcccaggcccaggtgagacaggcaacgccaggtctgcaggccaggagagatgctgcccaggcctcctggtttccaagctggtccatcactggcctctgtccttggcagagaccttgctgcccaggcccagagggcttcccagtaaggcccagtgatcccattatcccaggggcaaaaccacctgtccccttttgagctgccagttccctacagccatccccagtcaagggtgagggtgtggccttcaccaggggctgctgtaattaccgagcaaggtctgagctcttcttcagcctcagttccctcattggttaaaagggttctttgttcccatccagccgatgaaggagcaaacgtctggctatgtgaagcctaatttacctgcaggaactggcagggatagtcactggctggactcctgtttacttctagacctggtcaggctccatcccctcccccacctgcccctgattcccctcgtcggtgcctgtcaactgcttttcagcagtggactgcaggggaaagagcagtgatttggggtgagtaggcttcaattcccagctctgaccagacttgctgtgtgaccttgggcaagttcctttccctctttggagcttggtttccctgccagaggaaactgagctggaggagcctgaggtcctgcctttcattggctgacacacctcctgtccactgtgtcactctccaagtgccagagaagtggaggcagatcgctaccccaggctgagatggcccccactgtgaaggccacgcctgtgggtgggcagccacctggtgccaccacagggcaccagggatgatcctgatgcggcaggcaggggagactcacagaaaaatctgcccagagcctaccctcaccagacaaactctgtgctcctccaaaacatcctttagatgcaaaataataataataataataataaataaataaataaaaatccaaacccaagtcaaaaccttggctccagcatgaaaacacgtttacaggaaagtgttctcctgggtttgtgcccaccatggtgcgaatcctgacccaaggcctcctgtctcccttcaaagggagacccttttgggggatgagtttgccagactccccgtgctggtttctttgttactatttgtttggggttttgttttagttcttttttttttttcttttcttttttaaaaatatgtggctgtgaacttgaatgaacactgctcaaactttctgctattgggggggcgggtgggatgggaagaaggggcgtttgttttattcttggtgttttcagtgcaataaatagctacaaacttctgtgcaaaaaaaatg

SEQ ID NO: 733287 - DNA, 3593 bp, Homo sapiens
caaccagtcagtgatatcccatactttataacttgcaagcccctggccccttcccatctactaacttcaatgatcctgtgaggtaggtgcaatcattcctatttcacaggctcaccctccaagggtccaatgagaagccgccccagtccctcttccctctggcttctttcccccaggaagatgtgcgaccctggcatgacagccttcgaacctgaggccctggggaacctggttgagggcctggacttccatcgattctattttgaaaacctgtggtcccggaacagcaagcccgtgcacaccaccatcctgaatccccacatccacctgatgggcgacgagtcagcctgcatcgcctacatccgcatcacgcagtacctggacgctggcggcatcccacgcaccgcccagtcggaggagacccgtgtctggcaccgccgggacggcaaatggcagatcgtccacttccacagatctggggcgccctccgtcctgccccactgagggaccaggctggggtcgctgcgttgctgtgccgcagagatccactctgtccgtggagtggagctgctggttctcccaggtggattttgctggaattctcccatgtcatcaccccaccaccgtcacttctgtacctgcatcaagaaaacctgcttgttcacaaaagtcatcgcaacttcagagcgaacggccacatctccccacctctcacccccaccctctcccctgccaggctggggcttcctcaggcatgggtgtccacagcactggccccctctccccagcctcagctgctgtccgcctgatctgtcttgggctgtaggctagaatgcccgggctggtgcccaccaggggctggggagaaggaggggtggcatgatgaggaaggcagcatccgtccgtccctctcccagacctctcctcttccagtgtccccggggaagggcagatgacactcccttccccctaagccaaccgcactgaaggagtggggagaagagcatacgccaggagcctcctgcctcaaagtgctcccctaagtcttcttcctcctgtgctgacctcagggtggtctgacccttccctcggtgtgggggatgtggccctctcaggtgcccctacttgctttctgcttccttctggtgaagtccacctccaacattaacctgcccaccccacccccgtcatccctggagaattccagctttgtcgtatctcagagagggaatctaattgtttttggggggcaaaagaaagcaacgtttaggtatcacttctacttggaccgcatgcctttttatagccaaatttctgtgtatttcgtaaatggatttcgcgttaatggatatttatgtaataactagacttctcagattattgtgagaagggtcaggttggaaggggtgtaggaagaggggtgaggggtagtttttttctgttctagtttttttttttttttttgtcatctctgaggtggaccttgtcacctgtggttattggggccaaggcggactcagctccggggagaagggcctctctgccatttcggtcccaaggtgagctgacacaggcgttccttttgggactgtggaagcatcagatgccagcactgactcaggaacagcaagtcagggcagagaggaggagggaggctgtcaggatggaaatacctggacttttctttgcttccctcgcaaactggggtcttctctaccgaacttcccaggatttcatctcaccatatctgtgtgccgcccccatctttcttttcctctttccctctttccctgggattgactctgagtggaataccttggcacatccactaggatctactgtctgcactgttttctttgcatgactttatacgcagtaagtatgttgaaaacaaacaaaaagaagaaaacactcaacaaaaccaatctacatgttttggactaaaaaaaaaaatagaggttgtattctcagtgtccgactcggaattatgttgctgcctctctgtgcttttggcctctgtgtggccgtgttttgccagcatgagatactgtcccctctggaggattttaggggaggaagagccacgtccccagggattggaggaggctccggtacccttgaccctcctgggtgttggttggagcagaactggtgaggatgtttgatccgagattttctgagctctccccgatcaccagctgtctgctgggttcttttctcaagtcctgctgcccaggcccaggtgagacaggcaacgccaggtctgcaggccaggagagatgctgcccaggcctcctggtttccaagctggtccatcactggcctctgtccttggcagagaccttgctgcccaggcccaggggcaggctcttggcctgccccaggcccagagggcttcccagtaaggcccagtgatcccattatcccaggggcaaaaccacctgtccccttttgagctgccagttccctacagccatccccagtcaagggtgagggtgtggccttcaccaggggctgctgtaattaccgagcaaggtctgagctcttcttcagcctcagttccctcattggttaaaagggttctttgttcccatccagccgatgaaggagcaaacgtctggctatgtgaagcctaatttacctgcaggaactggcagggatagtcactggctggactcctgtttacttctagacctggtcaggctccatcccctcccccacctgcccctgattcccctcgtcggtgcctgtcaactgcttttcagcagtggactgcaggggaaagagcagtgatttggggtgagtaggcttcaattcccagctctgaccagacttgctgtgtgaccttgggcaagttcctttccctctttggagcttggtttccctgccagaggaaactgagctggaggagcctgaggtcctgcctttcattggctgacacacctcctgtccactgtgtcactctccaagtgccagagaagtggaggcagatcgctaccccaggctgagatggcccccactgtgaaggccacgcctgtgggtgggcagccacctggtgccaccacagggcaccagggatgatcctgatgcggcaggcaggggagactcacagaaaaatctgcccagagcctaccctcaccagacaaactctgtgctcctccaaaacatcctttagatgcaaaataataataataataataataaataaataaataaaaatccaaacccaagtcaaaaccttggctccagcatgaaaacacgtttacaggaaagtgttctcctgggtttgtgcccaccatggtgcgaatcctgacccaaggcctcctgtctcccttcaaagggagacccttttgggggatgagtttgccagactccccgtgctggtttctttgttactatttgtttggggttttgttttagttcttttttttttttcttttcttttttaaaaatatgtggctgtgaacttgaatgaacactgctcaaactttctgctattgggggggcgggtgggatgggaagaaggggcgtttgttttattcttggtgttttcagtgcaataaatagctacaaacttctgtgcaaaaaaaatg

SEQ ID NO: 733288 - DNA, 3563 bp, Homo sapiens
caaccagtcagtgatatcccatactttataacttgcaagcccctggccccttcccatctactaacttcaatgatcctgtgaggtaggtgcaatcattcctatttcacaggctcaccctccaagggtccaatgagaagccgccccagtccctcttccctctggcttctttcccccaggaagatgtgcgaccctggcatgacagccttcgaacctgaggccctggggaacctggttgagggcctggacttccatcgattctattttgaaaacctgtggtcccggaacagcaagcccgtgcacaccaccatcctgaatccccacatccacctgatgggcgacgagtcagcctgcatcgcctacatccgcatcacgcagtacctggacgctggcggcatcccacgcaccgcccagtcggaggagacccgtgtctggcaccgccgggacggcaaatggcagatcgtccacttccacagatctggggcgccctccgtcctgccccactgagggaccaggctggggtcgctgcgttgctgtgccgcagagatccactctgtccgtggagtggagctgctggttctcccaggtggattttgctggaattctcccatgtcatcaccccaccaccgtcacttctgtacctgcatcaagaaaacctgcttgttcacaaaagtcatcgcaacttcagagcgaacggccacatctccccacctctcacccccaccctctcccctgccaggctggggcttcctcaggcatgggtgtccacagcactggccccctctccccagcctcagctgctgtccgcctgatctgtcttgggctgtaggctagaatgcccgggctggtgcccaccaggggctggggagaaggaggggtggcatgatgaggaaggcagcatccgtccgtccctctcccagacctctcctcttccagtgtccccggggaagggcagatgacactcccttccccctaagccaaccgcactgaaggagtggggagaagagcatacgccaggagcctcctgcctcaaagtgctcccctaagtcttcttcctcctgtgctgacctcagggtggtctgacccttccctcggtgtgggggatgtggccctctcaggtgcccctacttgctttctgcttccttctggtgaagtccacctccaacattaacctgcccaccccacccccgtcatccctggagaattccagctttgtcgtatctcagagagggaatctaattgtttttggggggcaaaagaaagcaacgtttaggtatcacttctacttggaccgcatgcctttttatagccaaatttctgtgtatttcgtaaatggatttcgcgttaatggatatttatgtaataactagacttctcagattattgtgagaagggtcaggttggaaggggtgtaggaagaggggtgaggggtagtttttttctgttctagtttttttttttttttttgtcatctctgaggtggaccttgtcacctgtggttattggggccaaggcggactcagctccggggagaagggcctctctgccatttcggtcccaaggtgagctgacacaggcgttccttttgggactgtggaagcatcagatgccagcactgactcaggaacagcaagtcagggcagagaggaggagggaggctgtcaggatggaaatacctggacttttctttgcttccctcgcaaactggggtcttctctaccgaacttcccaggatttcatctcaccatatctgtgtgccgcccccatctttcttttcctctttccctctttccctgggattgactctgagtggaataccttggcacatccactaggatctactgtctgcactgttttctttgcatgactttatacgcagtaagtatgttgaaaacaaacaaaaagaagaaaacactcaacaaaaccaatctacatgttttggactaaaaaaaaaaatagaggttgtattctcagtgtccgactcggaattatgttgctgcctctctgtgcttttggcctctgtgtggccgtgttttgccagcatgagatactgtcccctctggaggattttaggggaggaagagccacgtccccagggattggaggaggctccggtacccttgaccctcctgggtgttggttggagcagaactggtgaggatgtttgatccgagattttctgagctctccccgatcaccagctgtctgctgggttcttttctcaagtcctgctgcccaggcccaggtgagacaggcaacgccaggtctgcaggccaggagagatgctgcccaggcctcctggtttccaagctggtccatcactggcctctgtccttggcagagaccttgctgcccaggcccagagggcttcccagtaaggcccagtgatcccattatcccaggggcaaaaccacctgtccccttttgagctgccagttccctacagccatccccagtcaagggtgagggtgtggccttcaccaggggctgctgtaattaccgagcaaggtctgagctcttcttcagcctcagttccctcattggttaaaagggttctttgttcccatccagccgatgaaggagcaaacgtctggctatgtgaagcctaatttacctgcaggaactggcagggatagtcactggctggactcctgtttacttctagacctggtcaggctccatcccctcccccacctgcccctgattcccctcgtcggtgcctgtcaactgcttttcagcagtggactgcaggggaaagagcagtgatttggggtgagtaggcttcaattcccagctctgaccagacttgctgtgtgaccttgggcaagttcctttccctctttggagcttggtttccctgccagaggaaactgagctggaggagcctgaggtcctgcctttcattggctgacacacctcctgtccactgtgtcactctccaagtgccagagaagtggaggcagatcgctaccccaggctgagatggcccccactgtgaaggccacgcctgtgggtgggcagccacctggtgccaccacagggcaccagggatgatcctgatgcggcaggcaggggagactcacagaaaaatctgcccagagcctaccctcaccagacaaactctgtgctcctccaaaacatcctttagatgcaaaataataataataataataataaataaataaataaaaatccaaacccaagtcaaaaccttggctccagcatgaaaacacgtttacaggaaagtgttctcctgggtttgtgcccaccatggtgcgaatcctgacccaaggcctcctgtctcccttcaaagggagacccttttgggggatgagtttgccagactccccgtgctggtttctttgttactatttgtttggggttttgttttagttcttttttttttttcttttcttttttaaaaatatgtggctgtgaacttgaatgaacactgctcaaactttctgctattgggggggcgggtgggatgggaagaaggggcgtttgttttattcttggtgttttcagtgcaataaatagctacaaacttctgtgcaaaaaaaatg

SEQ ID NO: 733289 - DNA, 4274 bp, Homo sapiens
agaagccccgggctcgtcagtcaaaccggttctctgtttgcactcggcagcacgggcaggcaagtggtccctaggttcgggagcagagcagcagcgcctcagtcctggtcccccagtcccaagcctcacctgcctgcccagcgccaggatggccaccatcacctgcacccgcttcacggaagagtaccagctcttcgaggaattgggcaagggagccttctcggtggtgcgaaggtgtgtgaaggtgctggctggccaggagtatgctgccaagatcatcaacacaaagaagctgtcagccagagaccatcagaagctggagcgtgaagcccgcatctgccgcctgctgaagcaccccaacatcgtccgactacatgacagcatctcagaggagggacaccactacctgatcttcgacctggtcactggtggggaactgtttgaagatatcgtggcccgggagtattacagtgaggcggatgccagtcactgtatccagcagatcctggaggctgtgctgcactgccaccagatgggggtggtgcaccgggacctgaagcctgagaatctgttgctggcctccaagctcaagggtgccgcagtgaagctggcagactttggcctggccatagaggtggagggggagcagcaggcatggtttgggtttgcagggactcctggatatctctccccagaagtgctgcggaaggacccgtacgggaagcctgtggacctgtgggcttgtggggtcatcctgtacatcctgctggttgggtaccccccgttctgggatgaggaccagcaccgcctgtaccagcagatcaaagccggcgcctatgatttcccatcgccggaatgggacactgtcaccccggaagccaaggatctgatcaataagatgctgaccattaacccatccaaacgcatcacagctgccgaagcccttaagcacccctggatctcgcaccgctccaccgtggcatcctgcatgcacagacaggagaccgtggactgcctgaagaagttcaatgccaggaggaaactgaagggagccattctcaccacgatgctggccaccaggaacttctccggagggaagagtgggggaaacaagaagagcgatggtgtgaaggaatcctcagagagcaccaacaccaccatcgaggatgaagacaccaaagtgcggaaacaggaaattataaaagtgacagagcagctgattgaagccataagcaatggagattttgagtcctacacgaagatgtgcgaccctggcatgacagccttcgaacctgaggccctggggaacctggttgagggcctggacttccatcgattctattttgaaaacctgtggtcccggaacagcaagcccgtgcacaccaccatcctgaatccccacatccacctgatgggcgacgagtcagcctgcatcgcctacatccgcatcacgcagtacctggacgctggcggcatcccacgcaccgcccagtcggaggagacccgtgtctggcaccgccgggacggcaaatggcagatcgtccacttccacagatctggggcgccctccgtcctgccccactgagggaccaggctggggtcgctgcgttgctgtgccgcagagatccactctgtccgtggagtggagctgctggttctcccaggtggattttgctggaattctcccatgtcatcaccccaccaccgtcacttctgtacctgcatcaagaaaacctgcttgttcacaaaagtcatcgcaacttcagagcgaacggccacatctccccacctctcacccccaccctctcccctgccaggctggggcttcctcaggcatgggtgtccacagcactggccccctctccccagcctcagctgctgtccgcctgatctgtcttgggctgtaggctagaatgcccgggctggtgcccaccaggggctggggagaaggaggggtggcatgatgaggaaggcagcatccgtccgtccctctcccagacctctcctcttccagtgtccccggggaagggcagatgacactcccttccccctaagccaaccgcactgaaggagtggggagaagagcatacgccaggagcctcctgcctcaaagtgctcccctaagtcttcttcctcctgtgctgacctcagggtggtctgacccttccctcggtgtgggggatgtggccctctcaggtgcccctacttgctttctgcttccttctggtgaagtccacctccaacattaacctgcccaccccacccccgtcatccctggagaattccagctttgtcgtatctcagagagggaatctaattgtttttggggggcaaaagaaagcaacgtttaggtatcacttctacttggaccgcatgcctttttatagccaaatttctgtgtatttcgtaaatggatttcgcgttaatggatatttatgtaataactagacttctcagattattgtgagaagggtcaggttggaaggggtgtaggaagaggggtgaggggtagtttttttctgttctagtttttttttttttttttgtcatctctgaggtggaccttgtcacctgtggttattggggccaaggcggactcagctccggggagaagggcctctctgccatttcggtcccaaggtgagctgacacaggcgttccttttgggactgtggaagcatcagatgccagcactgactcaggaacagcaagtcagggcagagaggaggagggaggctgtcaggatggaaatacctggacttttctttgcttccctcgcaaactggggtcttctctaccgaacttcccaggatttcatctcaccatatctgtgtgccgcccccagcaccccccacccacctctggggggcccgtgagcgtgtgtcttcattgcctctctccccttggcgtctgatgaccacagcaaagcactgggaatttctactcttcatgcctcatcctgcagcctcgggttcgcattctctctttcttttcctctttccctctttccctgggattgactctgagtggaataccttggcacatccactaggatctactgtctgcactgttttctttgcatgactttatacgcagtaagtatgttgaaaacaaacaaaaagaagaaaacactcaacaaaaccaatctacatgttttggactaaaaaaaaaaatagaggttgtattctcagtgtccgactcggaattatgttgctgcctctctgtgcttttggcctctgtgtggccgtgttttgccagcatgagatactgtcccctctggaggattttaggggaggaagagccacgtccccagggattggaggaggctccggtacccttgaccctcctgggtgttggttggagcagaactggtgaggatgtttgatccgagattttctgagctctccccgatcaccagctgtctgctgggttcttttctcaagtcctgctgcccaggcccaggtgagacaggcaacgccaggtctgcaggccaggagagatgctgcccaggcctcctggtttccaagctggtccatcactggcctctgtccttggcagagaccttgctgcccaggcccaggggcaggctcttggcctgccccaggcccagagggcttcccagtaaggcccagtgatcccattatcccaggggcaaaaccacctgtccccttttgagctgccagttccctacagccatccccagtcaagggtgagggtgtgggtgggcagccacctggtgccaccacagggcaccagggatgatcctgatgcggcaggcaggggagactcacagaaaaatctgcccagagcctaccctcaccagacaaactctgtgctcctccaaaacatcctttagatgcaaaataataataataataataataaataaataaataaaaatccaaacccaagtcaaaaccttggctccagcatgaaaacacgtttacaggaaagtgttctcctgggtttgtgcccaccatggtgcgaatcctgacccaaggcctcctgtctcccttcaaagggagacccttttgggggatgagtttgccagactccccgtgctggtttctttgttactatttgtttggggttttgttttagttcttttttttttttcttttcttttttaaaaatatgtggctgtgaacttgaatgaacactgctcaaactttctgctattgggggggcgggtgggatgggaagaaggggcgtttgttttattcttggtgttttcagtgcaataaatagctacaaacttctgtgcaaaaaaaatg

SEQ ID NO: 733290 - DNA, 4783 bp, Homo sapiens
agaagccccgggctcgtcagtcaaaccggttctctgtttgcactcggcagcacgggcaggcaagtggtccctaggttcgggagcagagcagcagcgcctcagtcctggtcccccagtcccaagcctcacctgcctgcccagcgccaggatggccaccatcacctgcacccgcttcacggaagagtaccagctcttcgaggaattgggcaagggagccttctcggtggtgcgaaggtgtgtgaaggtgctggctggccaggagtatgctgccaagatcatcaacacaaagaagctgtcagccagagaccatcagaagctggagcgtgaagcccgcatctgccgcctgctgaagcaccccaacatcgtccgactacatgacagcatctcagaggagggacaccactacctgatcttcgacctggtcactggtggggaactgtttgaagatatcgtggcccgggagtattacagtgaggcggatgccagtcactgtatccagcagatcctggaggctgtgctgcactgccaccagatgggggtggtgcaccgggacctgaagcctgagaatctgttgctggcctccaagctcaagggtgccgcagtgaagctggcagactttggcctggccatagaggtggagggggagcagcaggcatggtttgggtttgcagggactcctggatatctctccccagaagtgctgcggaaggacccgtacgggaagcctgtggacctgtgggcttgtggggtcatcctgtacatcctgctggttgggtaccccccgttctgggatgaggaccagcaccgcctgtaccagcagatcaaagccggcgcctatgatttcccatcgccggaatgggacactgtcaccccggaagccaaggatctgatcaataagatgctgaccattaacccatccaaacgcatcacagctgccgaagcccttaagcacccctggatctcgcaccgctccaccgtggcatcctgcatgcacagacaggagaccgtggactgcctgaagaagttcaatgccaggaggaaactgaagggagccattctcaccacgatgctggccaccaggaacttctccggagggaagagtgggggaaacaagaagagcgatggtgtgaaggaatcctcagagagcaccaacaccaccatcgaggatgaagacaccaaagtgcggaaacaggaaattataaaagtgacagagcagctgattgaagccataagcaatggagattttgagtcctacacgaagatgtgcgaccctggcatgacagccttcgaacctgaggccctggggaacctggttgagggcctggacttccatcgattctattttgaaaacctgtggtcccggaacagcaagcccgtgcacaccaccatcctgaatccccacatccacctgatgggcgacgagtcagcctgcatcgcctacatccgcatcacgcagtacctggacgctggcggcatcccacgcaccgcccagtcggaggagacccgtgtctggcaccgccgggacggcaaatggcagatcgtccacttccacagatctggggcgccctccgtcctgccccactgagggaccaggctggggtcgctgcgttgctgtgccgcagagatccactctgtccgtggagtggagctgctggttctcccaggtggattttgctggaattctcccatgtcatcaccccaccaccgtcacttctgtacctgcatcaagaaaacctgcttgttcacaaaagtcatcgcaacttcagagcgaacggccacatctccccacctctcacccccaccctctcccctgccaggctggggcttcctcaggcatgggtgtccacagcactggccccctctccccagcctcagctgctgtccgcctgatctgtcttgggctgtaggctagaatgcccgggctggtgcccaccaggggctggggagaaggaggggtggcatgatgaggaaggcagcatccgtccgtccctctcccagacctctcctcttccagtgtccccggggaagggcagatgacactcccttccccctaagccaaccgcactgaaggagtggggagaagagcatacgccaggagcctcctgcctcaaagtgctcccctaagtcttcttcctcctgtgctgacctcagggtggtctgacccttccctcggtgtgggggatgtggccctctcaggtgcccctacttgctttctgcttccttctggtgaagtccacctccaacattaacctgcccaccccacccccgtcatccctggagaattccagctttgtcgtatctcagagagggaatctaattgtttttggggggcaaaagaaagcaacgtttaggtatcacttctacttggaccgcatgcctttttatagccaaatttctgtgtatttcgtaaatggatttcgcgttaatggatatttatgtaataactagacttctcagattattgtgagaagggtcaggttggaaggggtgtaggaagaggggtgaggggtagtttttttctgttctagtttttttttttttttttgtcatctctgaggtggaccttgtcacctgtggttattggggccaaggcggactcagctccggggagaagggcctctctgccatttcggtcccaaggtgagctgacacaggcgttccttttgggactgtggaagcatcagatgccagcactgactcaggaacagcaagtcagggcagagaggaggagggaggctgtcaggatggaaatacctggacttttctttgcttccctcgcaaactggggtcttctctaccgaacttcccaggatttcatctcaccatatctgtgtgccgcccccagcaccccccacccacctctggggggcccgtgagcgtgtgtcttcattgcctctctccccttggcgtctgatgaccacagcaaagcactgggaatttctactcttcatgcctcatcctgcagcctcgggttcgcattctctctttcttttcctctttccctctttccctgggattgactctgagtggaataccttggcacatccactaggatctactgtctgcactgttttctttgcatgactttatacgcagtaagtatgttgaaaacaaacaaaaagaagaaaacactcaacaaaaccaatctacatgttttggactaaaaaaaaaaatagaggttgtattctcagtgtccgactcggaattatgttgctgcctctctgtgcttttggcctctgtgtggccgtgttttgccagcatgagatactgtcccctctggaggattttaggggaggaagagccacgtccccagggattggaggaggctccggtacccttgaccctcctgggtgttggttggagcagaactggtgaggatgtttgatccgagattttctgagctctccccgatcaccagctgtctgctgggttcttttctcaagtcctgctgcccaggcccaggtgagacaggcaacgccaggtctgcaggccaggagagatgctgcccaggcctcctggtttccaagctggtccatcactggcctctgtccttggcagagaccttgctgcccaggcccagagggcttcccagtaaggcccagtgatcccattatcccaggggcaaaaccacctgtccccttttgagctgccagttccctacagccatccccagtcaagggtgagggtgtggccttcaccaggggctgctgtaattaccgagcaaggtctgagctcttcttcagcctcagttccctcattggttaaaagggttctttgttcccatccagccgatgaaggagcaaacgtctggctatgtgaagcctaatttacctgcaggaactggcagggatagtcactggctggactcctgtttacttctagacctggtcaggctccatcccctcccccacctgcccctgattcccctcgtcggtgcctgtcaactgcttttcagcagtggactgcaggggaaagagcagtgatttggggtgagtaggcttcaattcccagctctgaccagacttgctgtgtgaccttgggcaagttcctttccctctttggagcttggtttccctgccagaggaaactgagctggaggagcctgaggtcctgcctttcattggctgacacacctcctgtccactgtgtcactctccaagtgccagagaagtggaggcagatcgctaccccaggctgagatggcccccactgtgaaggccacgcctgtgggtgggcagccacctggtgccaccacagggcaccagggatgatcctgatgcggcaggcaggggagactcacagaaaaatctgcccagagcctaccctcaccagacaaactctgtgctcctccaaaacatcctttagatgcaaaataataataataataataataaataaataaataaaaatccaaacccaagtcaaaaccttggctccagcatgaaaacacgtttacaggaaagtgttctcctgggtttgtgcccaccatggtgcgaatcctgacccaaggcctcctgtctcccttcaaagggagacccttttgggggatgagtttgccagactccccgtgctggtttctttgttactatttgtttggggttttgttttagttcttttttttttttcttttcttttttaaaaatatgtggctgtgaacttgaatgaacactgctcaaactttctgctattgggggggcgggtgggatgggaagaaggggcgtttgttttattcttggtgttttcagtgcaataaatagctacaaacttctgtgcaaaaaaaatg

SEQ ID NO: 733291 - DNA, 4674 bp, Homo sapiens
agaagccccgggctcgtcagtcaaaccggttctctgtttgcactcggcagcacgggcaggcaagtggtccctaggttcgggagcagagcagcagcgcctcagtcctggtcccccagtcccaagcctcacctgcctgcccagcgccaggatggccaccatcacctgcacccgcttcacggaagagtaccagctcttcgaggaattgggcaagggagccttctcggtggtgcgaaggtgtgtgaaggtgctggctggccaggagtatgctgccaagatcatcaacacaaagaagctgtcagccagagaccatcagaagctggagcgtgaagcccgcatctgccgcctgctgaagcaccccaacatcgtccgactacatgacagcatctcagaggagggacaccactacctgatcttcgacctggtcactggtggggaactgtttgaagatatcgtggcccgggagtattacagtgaggcggatgccagtcactgtatccagcagatcctggaggctgtgctgcactgccaccagatgggggtggtgcaccgggacctgaagcctgagaatctgttgctggcctccaagctcaagggtgccgcagtgaagctggcagactttggcctggccatagaggtggagggggagcagcaggcatggtttgggtttgcagggactcctggatatctctccccagaagtgctgcggaaggacccgtacgggaagcctgtggacctgtgggcttgtggggtcatcctgtacatcctgctggttgggtaccccccgttctgggatgaggaccagcaccgcctgtaccagcagatcaaagccggcgcctatgatttcccatcgccggaatgggacactgtcaccccggaagccaaggatctgatcaataagatgctgaccattaacccatccaaacgcatcacagctgccgaagcccttaagcacccctggatctcgcaccgctccaccgtggcatcctgcatgcacagacaggagaccgtggactgcctgaagaagttcaatgccaggaggaaactgaagggagccattctcaccacgatgctggccaccaggaacttctccggagggaagagtgggggaaacaagaagagcgatggtgtgaaggaatcctcagagagcaccaacaccaccatcgaggatgaagacaccaaagtgcggaaacaggaaattataaaagtgacagagcagctgattgaagccataagcaatggagattttgagtcctacacgaagatgtgcgaccctggcatgacagccttcgaacctgaggccctggggaacctggttgagggcctggacttccatcgattctattttgaaaacctgtggtcccggaacagcaagcccgtgcacaccaccatcctgaatccccacatccacctgatgggcgacgagtcagcctgcatcgcctacatccgcatcacgcagtacctggacgctggcggcatcccacgcaccgcccagtcggaggagacccgtgtctggcaccgccgggacggcaaatggcagatcgtccacttccacagatctggggcgccctccgtcctgccccactgagggaccaggctggggtcgctgcgttgctgtgccgcagagatccactctgtccgtggagtggagctgctggttctcccaggtggattttgctggaattctcccatgtcatcaccccaccaccgtcacttctgtacctgcatcaagaaaacctgcttgttcacaaaagtcatcgcaacttcagagcgaacggccacatctccccacctctcacccccaccctctcccctgccaggctggggcttcctcaggcatgggtgtccacagcactggccccctctccccagcctcagctgctgtccgcctgatctgtcttgggctgtaggctagaatgcccgggctggtgcccaccaggggctggggagaaggaggggtggcatgatgaggaaggcagcatccgtccgtccctctcccagacctctcctcttccagtgtccccggggaagggcagatgacactcccttccccctaagccaaccgcactgaaggagtggggagaagagcatacgccaggagcctcctgcctcaaagtgctcccctaagtcttcttcctcctgtgctgacctcagggtggtctgacccttccctcggtgtgggggatgtggccctctcaggtgcccctacttgctttctgcttccttctggtgaagtccacctccaacattaacctgcccaccccacccccgtcatccctggagaattccagctttgtcgtatctcagagagggaatctaattgtttttggggggcaaaagaaagcaacgtttaggtatcacttctacttggaccgcatgcctttttatagccaaatttctgtgtatttcgtaaatggatttcgcgttaatggatatttatgtaataactagacttctcagattattgtgagaagggtcaggttggaaggggtgtaggaagaggggtgaggggtagtttttttctgttctagtttttttttttttttttgtcatctctgaggtggaccttgtcacctgtggttattggggccaaggcggactcagctccggggagaagggcctctctgccatttcggtcccaaggtgagctgacacaggcgttccttttgggactgtggaagcatcagatgccagcactgactcaggaacagcaagtcagggcagagaggaggagggaggctgtcaggatggaaatacctggacttttctttgcttccctcgcaaactggggtcttctctaccgaacttcccaggatttcatctcaccatatctgtgtgccgcccccatctttcttttcctctttccctctttccctgggattgactctgagtggaataccttggcacatccactaggatctactgtctgcactgttttctttgcatgactttatacgcagtaagtatgttgaaaacaaacaaaaagaagaaaacactcaacaaaaccaatctacatgttttggactaaaaaaaaaaatagaggttgtattctcagtgtccgactcggaattatgttgctgcctctctgtgcttttggcctctgtgtggccgtgttttgccagcatgagatactgtcccctctggaggattttaggggaggaagagccacgtccccagggattggaggaggctccggtacccttgaccctcctgggtgttggttggagcagaactggtgaggatgtttgatccgagattttctgagctctccccgatcaccagctgtctgctgggttcttttctcaagtcctgctgcccaggcccaggtgagacaggcaacgccaggtctgcaggccaggagagatgctgcccaggcctcctggtttccaagctggtccatcactggcctctgtccttggcagagaccttgctgcccaggcccaggggcaggctcttggcctgccccaggcccagagggcttcccagtaaggcccagtgatcccattatcccaggggcaaaaccacctgtccccttttgagctgccagttccctacagccatccccagtcaagggtgagggtgtggccttcaccaggggctgctgtaattaccgagcaaggtctgagctcttcttcagcctcagttccctcattggttaaaagggttctttgttcccatccagccgatgaaggagcaaacgtctggctatgtgaagcctaatttacctgcaggaactggcagggatagtcactggctggactcctgtttacttctagacctggtcaggctccatcccctcccccacctgcccctgattcccctcgtcggtgcctgtcaactgcttttcagcagtggactgcaggggaaagagcagtgatttggggtgagtaggcttcaattcccagctctgaccagacttgctgtgtgaccttgggcaagttcctttccctctttggagcttggtttccctgccagaggaaactgagctggaggagcctgaggtcctgcctttcattggctgacacacctcctgtccactgtgtcactctccaagtgccagagaagtggaggcagatcgctaccccaggctgagatggcccccactgtgaaggccacgcctgtgggtgggcagccacctggtgccaccacagggcaccagggatgatcctgatgcggcaggcaggggagactcacagaaaaatctgcccagagcctaccctcaccagacaaactctgtgctcctccaaaacatcctttagatgcaaaataataataataataataataaataaataaataaaaatccaaacccaagtcaaaaccttggctccagcatgaaaacacgtttacaggaaagtgttctcctgggtttgtgcccaccatggtgcgaatcctgacccaaggcctcctgtctcccttcaaagggagacccttttgggggatgagtttgccagactccccgtgctggtttctttgttactatttgtttggggttttgttttagttcttttttttttttcttttcttttttaaaaatatgtggctgtgaacttgaatgaacactgctcaaactttctgctattgggggggcgggtgggatgggaagaaggggcgtttgttttattcttggtgttttcagtgcaataaatagctacaaacttctgtgcaaaaaaaatg

SEQ ID NO: 733292 - DNA, 4644 bp, Homo sapiens
agaagccccgggctcgtcagtcaaaccggttctctgtttgcactcggcagcacgggcaggcaagtggtccctaggttcgggagcagagcagcagcgcctcagtcctggtcccccagtcccaagcctcacctgcctgcccagcgccaggatggccaccatcacctgcacccgcttcacggaagagtaccagctcttcgaggaattgggcaagggagccttctcggtggtgcgaaggtgtgtgaaggtgctggctggccaggagtatgctgccaagatcatcaacacaaagaagctgtcagccagagaccatcagaagctggagcgtgaagcccgcatctgccgcctgctgaagcaccccaacatcgtccgactacatgacagcatctcagaggagggacaccactacctgatcttcgacctggtcactggtggggaactgtttgaagatatcgtggcccgggagtattacagtgaggcggatgccagtcactgtatccagcagatcctggaggctgtgctgcactgccaccagatgggggtggtgcaccgggacctgaagcctgagaatctgttgctggcctccaagctcaagggtgccgcagtgaagctggcagactttggcctggccatagaggtggagggggagcagcaggcatggtttgggtttgcagggactcctggatatctctccccagaagtgctgcggaaggacccgtacgggaagcctgtggacctgtgggcttgtggggtcatcctgtacatcctgctggttgggtaccccccgttctgggatgaggaccagcaccgcctgtaccagcagatcaaagccggcgcctatgatttcccatcgccggaatgggacactgtcaccccggaagccaaggatctgatcaataagatgctgaccattaacccatccaaacgcatcacagctgccgaagcccttaagcacccctggatctcgcaccgctccaccgtggcatcctgcatgcacagacaggagaccgtggactgcctgaagaagttcaatgccaggaggaaactgaagggagccattctcaccacgatgctggccaccaggaacttctccggagggaagagtgggggaaacaagaagagcgatggtgtgaaggaatcctcagagagcaccaacaccaccatcgaggatgaagacaccaaagtgcggaaacaggaaattataaaagtgacagagcagctgattgaagccataagcaatggagattttgagtcctacacgaagatgtgcgaccctggcatgacagccttcgaacctgaggccctggggaacctggttgagggcctggacttccatcgattctattttgaaaacctgtggtcccggaacagcaagcccgtgcacaccaccatcctgaatccccacatccacctgatgggcgacgagtcagcctgcatcgcctacatccgcatcacgcagtacctggacgctggcggcatcccacgcaccgcccagtcggaggagacccgtgtctggcaccgccgggacggcaaatggcagatcgtccacttccacagatctggggcgccctccgtcctgccccactgagggaccaggctggggtcgctgcgttgctgtgccgcagagatccactctgtccgtggagtggagctgctggttctcccaggtggattttgctggaattctcccatgtcatcaccccaccaccgtcacttctgtacctgcatcaagaaaacctgcttgttcacaaaagtcatcgcaacttcagagcgaacggccacatctccccacctctcacccccaccctctcccctgccaggctggggcttcctcaggcatgggtgtccacagcactggccccctctccccagcctcagctgctgtccgcctgatctgtcttgggctgtaggctagaatgcccgggctggtgcccaccaggggctggggagaaggaggggtggcatgatgaggaaggcagcatccgtccgtccctctcccagacctctcctcttccagtgtccccggggaagggcagatgacactcccttccccctaagccaaccgcactgaaggagtggggagaagagcatacgccaggagcctcctgcctcaaagtgctcccctaagtcttcttcctcctgtgctgacctcagggtggtctgacccttccctcggtgtgggggatgtggccctctcaggtgcccctacttgctttctgcttccttctggtgaagtccacctccaacattaacctgcccaccccacccccgtcatccctggagaattccagctttgtcgtatctcagagagggaatctaattgtttttggggggcaaaagaaagcaacgtttaggtatcacttctacttggaccgcatgcctttttatagccaaatttctgtgtatttcgtaaatggatttcgcgttaatggatatttatgtaataactagacttctcagattattgtgagaagggtcaggttggaaggggtgtaggaagaggggtgaggggtagtttttttctgttctagtttttttttttttttttgtcatctctgaggtggaccttgtcacctgtggttattggggccaaggcggactcagctccggggagaagggcctctctgccatttcggtcccaaggtgagctgacacaggcgttccttttgggactgtggaagcatcagatgccagcactgactcaggaacagcaagtcagggcagagaggaggagggaggctgtcaggatggaaatacctggacttttctttgcttccctcgcaaactggggtcttctctaccgaacttcccaggatttcatctcaccatatctgtgtgccgcccccatctttcttttcctctttccctctttccctgggattgactctgagtggaataccttggcacatccactaggatctactgtctgcactgttttctttgcatgactttatacgcagtaagtatgttgaaaacaaacaaaaagaagaaaacactcaacaaaaccaatctacatgttttggactaaaaaaaaaaatagaggttgtattctcagtgtccgactcggaattatgttgctgcctctctgtgcttttggcctctgtgtggccgtgttttgccagcatgagatactgtcccctctggaggattttaggggaggaagagccacgtccccagggattggaggaggctccggtacccttgaccctcctgggtgttggttggagcagaactggtgaggatgtttgatccgagattttctgagctctccccgatcaccagctgtctgctgggttcttttctcaagtcctgctgcccaggcccaggtgagacaggcaacgccaggtctgcaggccaggagagatgctgcccaggcctcctggtttccaagctggtccatcactggcctctgtccttggcagagaccttgctgcccaggcccagagggcttcccagtaaggcccagtgatcccattatcccaggggcaaaaccacctgtccccttttgagctgccagttccctacagccatccccagtcaagggtgagggtgtggccttcaccaggggctgctgtaattaccgagcaaggtctgagctcttcttcagcctcagttccctcattggttaaaagggttctttgttcccatccagccgatgaaggagcaaacgtctggctatgtgaagcctaatttacctgcaggaactggcagggatagtcactggctggactcctgtttacttctagacctggtcaggctccatcccctcccccacctgcccctgattcccctcgtcggtgcctgtcaactgcttttcagcagtggactgcaggggaaagagcagtgatttggggtgagtaggcttcaattcccagctctgaccagacttgctgtgtgaccttgggcaagttcctttccctctttggagcttggtttccctgccagaggaaactgagctggaggagcctgaggtcctgcctttcattggctgacacacctcctgtccactgtgtcactctccaagtgccagagaagtggaggcagatcgctaccccaggctgagatggcccccactgtgaaggccacgcctgtgggtgggcagccacctggtgccaccacagggcaccagggatgatcctgatgcggcaggcaggggagactcacagaaaaatctgcccagagcctaccctcaccagacaaactctgtgctcctccaaaacatcctttagatgcaaaataataataataataataataaataaataaataaaaatccaaacccaagtcaaaaccttggctccagcatgaaaacacgtttacaggaaagtgttctcctgggtttgtgcccaccatggtgcgaatcctgacccaaggcctcctgtctcccttcaaagggagacccttttgggggatgagtttgccagactccccgtgctggtttctttgttactatttgtttggggttttgttttagttcttttttttttttcttttcttttttaaaaatatgtggctgtgaacttgaatgaacactgctcaaactttctgctattgggggggcgggtgggatgggaagaaggggcgtttgttttattcttggtgttttcagtgcaataaatagctacaaacttctgtgcaaaaaaaatg

SEQ ID NO: 733293 - DNA, 4135 bp, Homo sapiens
agaagccccgggctcgtcagtcaaaccggttctctgtttgcactcggcagcacgggcaggcaagtggtccctaggttcgggagcagagcagcagcgcctcagtcctggtcccccagtcccaagcctcacctgcctgcccagcgccaggatggccaccatcacctgcacccgcttcacggaagagtaccagctcttcgaggaattgggcaagggagccttctcggtggtgcgaaggtgtgtgaaggtgctggctggccaggagtatgctgccaagatcatcaacacaaagaagctgtcagccagagaccatcagaagctggagcgtgaagcccgcatctgccgcctgctgaagcaccccaacatcgtccgactacatgacagcatctcagaggagggacaccactacctgatcttcgacctggtcactggtggggaactgtttgaagatatcgtggcccgggagtattacagtgaggcggatgccagtcactgtatccagcagatcctggaggctgtgctgcactgccaccagatgggggtggtgcaccgggacctgaagcctgagaatctgttgctggcctccaagctcaagggtgccgcagtgaagctggcagactttggcctggccatagaggtggagggggagcagcaggcatggtttgggtttgcagggactcctggatatctctccccagaagtgctgcggaaggacccgtacgggaagcctgtggacctgtgggcttgtggggtcatcctgtacatcctgctggttgggtaccccccgttctgggatgaggaccagcaccgcctgtaccagcagatcaaagccggcgcctatgatttcccatcgccggaatgggacactgtcaccccggaagccaaggatctgatcaataagatgctgaccattaacccatccaaacgcatcacagctgccgaagcccttaagcacccctggatctcgcaccgctccaccgtggcatcctgcatgcacagacaggagaccgtggactgcctgaagaagttcaatgccaggaggaaactgaagggagccattctcaccacgatgctggccaccaggaacttctccggagggaagagtgggggaaacaagaagagcgatggtgtgaaggaatcctcagagagcaccaacaccaccatcgaggatgaagacaccaaagtgcggaaacaggaaattataaaagtgacagagcagctgattgaagccataagcaatggagattttgagtcctacacgaagatgtgcgaccctggcatgacagccttcgaacctgaggccctggggaacctggttgagggcctggacttccatcgattctattttgaaaacctgtggtcccggaacagcaagcccgtgcacaccaccatcctgaatccccacatccacctgatgggcgacgagtcagcctgcatcgcctacatccgcatcacgcagtacctggacgctggcggcatcccacgcaccgcccagtcggaggagacccgtgtctggcaccgccgggacggcaaatggcagatcgtccacttccacagatctggggcgccctccgtcctgccccactgagggaccaggctggggtcgctgcgttgctgtgccgcagagatccactctgtccgtggagtggagctgctggttctcccaggtggattttgctggaattctcccatgtcatcaccccaccaccgtcacttctgtacctgcatcaagaaaacctgcttgttcacaaaagtcatcgcaacttcagagcgaacggccacatctccccacctctcacccccaccctctcccctgccaggctggggcttcctcaggcatgggtgtccacagcactggccccctctccccagcctcagctgctgtccgcctgatctgtcttgggctgtaggctagaatgcccgggctggtgcccaccaggggctggggagaaggaggggtggcatgatgaggaaggcagcatccgtccgtccctctcccagacctctcctcttccagtgtccccggggaagggcagatgacactcccttccccctaagccaaccgcactgaaggagtggggagaagagcatacgccaggagcctcctgcctcaaagtgctcccctaagtcttcttcctcctgtgctgacctcagggtggtctgacccttccctcggtgtgggggatgtggccctctcaggtgcccctacttgctttctgcttccttctggtgaagtccacctccaacattaacctgcccaccccacccccgtcatccctggagaattccagctttgtcgtatctcagagagggaatctaattgtttttggggggcaaaagaaagcaacgtttaggtatcacttctacttggaccgcatgcctttttatagccaaatttctgtgtatttcgtaaatggatttcgcgttaatggatatttatgtaataactagacttctcagattattgtgagaagggtcaggttggaaggggtgtaggaagaggggtgaggggtagtttttttctgttctagtttttttttttttttttgtcatctctgaggtggaccttgtcacctgtggttattggggccaaggcggactcagctccggggagaagggcctctctgccatttcggtcccaaggtgagctgacacaggcgttccttttgggactgtggaagcatcagatgccagcactgactcaggaacagcaagtcagggcagagaggaggagggaggctgtcaggatggaaatacctggacttttctttgcttccctcgcaaactggggtcttctctaccgaacttcccaggatttcatctcaccatatctgtgtgccgcccccatctttcttttcctctttccctctttccctgggattgactctgagtggaataccttggcacatccactaggatctactgtctgcactgttttctttgcatgactttatacgcagtaagtatgttgaaaacaaacaaaaagaagaaaacactcaacaaaaccaatctacatgttttggactaaaaaaaaaaatagaggttgtattctcagtgtccgactcggaattatgttgctgcctctctgtgcttttggcctctgtgtggccgtgttttgccagcatgagatactgtcccctctggaggattttaggggaggaagagccacgtccccagggattggaggaggctccggtacccttgaccctcctgggtgttggttggagcagaactggtgaggatgtttgatccgagattttctgagctctccccgatcaccagctgtctgctgggttcttttctcaagtcctgctgcccaggcccaggtgagacaggcaacgccaggtctgcaggccaggagagatgctgcccaggcctcctggtttccaagctggtccatcactggcctctgtccttggcagagaccttgctgcccaggcccaggggcaggctcttggcctgccccaggcccagagggcttcccagtaaggcccagtgatcccattatcccaggggcaaaaccacctgtccccttttgagctgccagttccctacagccatccccagtcaagggtgagggtgtgggtgggcagccacctggtgccaccacagggcaccagggatgatcctgatgcggcaggcaggggagactcacagaaaaatctgcccagagcctaccctcaccagacaaactctgtgctcctccaaaacatcctttagatgcaaaataataataataataataataaataaataaataaaaatccaaacccaagtcaaaaccttggctccagcatgaaaacacgtttacaggaaagtgttctcctgggtttgtgcccaccatggtgcgaatcctgacccaaggcctcctgtctcccttcaaagggagacccttttgggggatgagtttgccagactccccgtgctggtttctttgttactatttgtttggggttttgttttagttcttttttttttttcttttcttttttaaaaatatgtggctgtgaacttgaatgaacactgctcaaactttctgctattgggggggcgggtgggatgggaagaaggggcgtttgttttattcttggtgttttcagtgcaataaatagctacaaacttctgtgcaaaaaaaatg

SEQ ID NO: 733294 - DNA, 4307 bp, Homo sapiens
agaagccccgggctcgtcagtcaaaccggttctctgtttgcactcggcagcacgggcaggcaagtggtccctaggttcgggagcagagcagcagcgcctcagtcctggtcccccagtcccaagcctcacctgcctgcccagcgccaggatggccaccatcacctgcacccgcttcacggaagagtaccagctcttcgaggaattgggcaagggagccttctcggtggtgcgaaggtgtgtgaaggtgctggctggccaggagtatgctgccaagatcatcaacacaaagaagctgtcagccagagaccatcagaagctggagcgtgaagcccgcatctgccgcctgctgaagcaccccaacatcgtccgactacatgacagcatctcagaggagggacaccactacctgatcttcgacctggtcactggtggggaactgtttgaagatatcgtggcccgggagtattacagtgaggcggatgccagtcactgtatccagcagatcctggaggctgtgctgcactgccaccagatgggggtggtgcaccgggacctgaagcctgagaatctgttgctggcctccaagctcaagggtgccgcagtgaagctggcagactttggcctggccatagaggtggagggggagcagcaggcatggtttgggtttgcagggactcctggatatctctccccagaagtgctgcggaaggacccgtacgggaagcctgtggacctgtgggcttgtggggtcatcctgtacatcctgctggttgggtaccccccgttctgggatgaggaccagcaccgcctgtaccagcagatcaaagccggcgcctatgatttcccatcgccggaatgggacactgtcaccccggaagccaaggatctgatcaataagatgctgaccattaacccatccaaacgcatcacagctgccgaagcccttaagcacccctggatctcgcaccgctccaccgtggcatcctgcatgcacagacaggagaccgtggactgcctgaagaagttcaatgccaggaggaaactgaagggagccattctcaccacgatgctggccaccaggaacttctccggagggaagagtgggggaaacaagaagagcgatggtgtgaagaaaagaaagtccagttccagcgttcagttaatggaatcctcagagagcaccaacaccaccatcgaggatgaagacaccaaagtgcggaaacaggaaattataaaagtgacagagcagctgattgaagccataagcaatggagattttgagtcctacacgaagatgtgcgaccctggcatgacagccttcgaacctgaggccctggggaacctggttgagggcctggacttccatcgattctattttgaaaacctgtggtcccggaacagcaagcccgtgcacaccaccatcctgaatccccacatccacctgatgggcgacgagtcagcctgcatcgcctacatccgcatcacgcagtacctggacgctggcggcatcccacgcaccgcccagtcggaggagacccgtgtctggcaccgccgggacggcaaatggcagatcgtccacttccacagatctggggcgccctccgtcctgccccactgagggaccaggctggggtcgctgcgttgctgtgccgcagagatccactctgtccgtggagtggagctgctggttctcccaggtggattttgctggaattctcccatgtcatcaccccaccaccgtcacttctgtacctgcatcaagaaaacctgcttgttcacaaaagtcatcgcaacttcagagcgaacggccacatctccccacctctcacccccaccctctcccctgccaggctggggcttcctcaggcatgggtgtccacagcactggccccctctccccagcctcagctgctgtccgcctgatctgtcttgggctgtaggctagaatgcccgggctggtgcccaccaggggctggggagaaggaggggtggcatgatgaggaaggcagcatccgtccgtccctctcccagacctctcctcttccagtgtccccggggaagggcagatgacactcccttccccctaagccaaccgcactgaaggagtggggagaagagcatacgccaggagcctcctgcctcaaagtgctcccctaagtcttcttcctcctgtgctgacctcagggtggtctgacccttccctcggtgtgggggatgtggccctctcaggtgcccctacttgctttctgcttccttctggtgaagtccacctccaacattaacctgcccaccccacccccgtcatccctggagaattccagctttgtcgtatctcagagagggaatctaattgtttttggggggcaaaagaaagcaacgtttaggtatcacttctacttggaccgcatgcctttttatagccaaatttctgtgtatttcgtaaatggatttcgcgttaatggatatttatgtaataactagacttctcagattattgtgagaagggtcaggttggaaggggtgtaggaagaggggtgaggggtagtttttttctgttctagtttttttttttttttttgtcatctctgaggtggaccttgtcacctgtggttattggggccaaggcggactcagctccggggagaagggcctctctgccatttcggtcccaaggtgagctgacacaggcgttccttttgggactgtggaagcatcagatgccagcactgactcaggaacagcaagtcagggcagagaggaggagggaggctgtcaggatggaaatacctggacttttctttgcttccctcgcaaactggggtcttctctaccgaacttcccaggatttcatctcaccatatctgtgtgccgcccccagcaccccccacccacctctggggggcccgtgagcgtgtgtcttcattgcctctctccccttggcgtctgatgaccacagcaaagcactgggaatttctactcttcatgcctcatcctgcagcctcgggttcgcattctctctttcttttcctctttccctctttccctgggattgactctgagtggaataccttggcacatccactaggatctactgtctgcactgttttctttgcatgactttatacgcagtaagtatgttgaaaacaaacaaaaagaagaaaacactcaacaaaaccaatctacatgttttggactaaaaaaaaaaatagaggttgtattctcagtgtccgactcggaattatgttgctgcctctctgtgcttttggcctctgtgtggccgtgttttgccagcatgagatactgtcccctctggaggattttaggggaggaagagccacgtccccagggattggaggaggctccggtacccttgaccctcctgggtgttggttggagcagaactggtgaggatgtttgatccgagattttctgagctctccccgatcaccagctgtctgctgggttcttttctcaagtcctgctgcccaggcccaggtgagacaggcaacgccaggtctgcaggccaggagagatgctgcccaggcctcctggtttccaagctggtccatcactggcctctgtccttggcagagaccttgctgcccaggcccaggggcaggctcttggcctgccccaggcccagagggcttcccagtaaggcccagtgatcccattatcccaggggcaaaaccacctgtccccttttgagctgccagttccctacagccatccccagtcaagggtgagggtgtgggtgggcagccacctggtgccaccacagggcaccagggatgatcctgatgcggcaggcaggggagactcacagaaaaatctgcccagagcctaccctcaccagacaaactctgtgctcctccaaaacatcctttagatgcaaaataataataataataataataaataaataaataaaaatccaaacccaagtcaaaaccttggctccagcatgaaaacacgtttacaggaaagtgttctcctgggtttgtgcccaccatggtgcgaatcctgacccaaggcctcctgtctcccttcaaagggagacccttttgggggatgagtttgccagactccccgtgctggtttctttgttactatttgtttggggttttgttttagttcttttttttttttcttttcttttttaaaaatatgtggctgtgaacttgaatgaacactgctcaaactttctgctattgggggggcgggtgggatgggaagaaggggcgtttgttttattcttggtgttttcagtgcaataaatagctacaaacttctgtgcaaaaaaaatg

SEQ ID NO: 733295 - DNA, 4816 bp, Homo sapiens
agaagccccgggctcgtcagtcaaaccggttctctgtttgcactcggcagcacgggcaggcaagtggtccctaggttcgggagcagagcagcagcgcctcagtcctggtcccccagtcccaagcctcacctgcctgcccagcgccaggatggccaccatcacctgcacccgcttcacggaagagtaccagctcttcgaggaattgggcaagggagccttctcggtggtgcgaaggtgtgtgaaggtgctggctggccaggagtatgctgccaagatcatcaacacaaagaagctgtcagccagagaccatcagaagctggagcgtgaagcccgcatctgccgcctgctgaagcaccccaacatcgtccgactacatgacagcatctcagaggagggacaccactacctgatcttcgacctggtcactggtggggaactgtttgaagatatcgtggcccgggagtattacagtgaggcggatgccagtcactgtatccagcagatcctggaggctgtgctgcactgccaccagatgggggtggtgcaccgggacctgaagcctgagaatctgttgctggcctccaagctcaagggtgccgcagtgaagctggcagactttggcctggccatagaggtggagggggagcagcaggcatggtttgggtttgcagggactcctggatatctctccccagaagtgctgcggaaggacccgtacgggaagcctgtggacctgtgggcttgtggggtcatcctgtacatcctgctggttgggtaccccccgttctgggatgaggaccagcaccgcctgtaccagcagatcaaagccggcgcctatgatttcccatcgccggaatgggacactgtcaccccggaagccaaggatctgatcaataagatgctgaccattaacccatccaaacgcatcacagctgccgaagcccttaagcacccctggatctcgcaccgctccaccgtggcatcctgcatgcacagacaggagaccgtggactgcctgaagaagttcaatgccaggaggaaactgaagggagccattctcaccacgatgctggccaccaggaacttctccggagggaagagtgggggaaacaagaagagcgatggtgtgaagaaaagaaagtccagttccagcgttcagttaatggaatcctcagagagcaccaacaccaccatcgaggatgaagacaccaaagtgcggaaacaggaaattataaaagtgacagagcagctgattgaagccataagcaatggagattttgagtcctacacgaagatgtgcgaccctggcatgacagccttcgaacctgaggccctggggaacctggttgagggcctggacttccatcgattctattttgaaaacctgtggtcccggaacagcaagcccgtgcacaccaccatcctgaatccccacatccacctgatgggcgacgagtcagcctgcatcgcctacatccgcatcacgcagtacctggacgctggcggcatcccacgcaccgcccagtcggaggagacccgtgtctggcaccgccgggacggcaaatggcagatcgtccacttccacagatctggggcgccctccgtcctgccccactgagggaccaggctggggtcgctgcgttgctgtgccgcagagatccactctgtccgtggagtggagctgctggttctcccaggtggattttgctggaattctcccatgtcatcaccccaccaccgtcacttctgtacctgcatcaagaaaacctgcttgttcacaaaagtcatcgcaacttcagagcgaacggccacatctccccacctctcacccccaccctctcccctgccaggctggggcttcctcaggcatgggtgtccacagcactggccccctctccccagcctcagctgctgtccgcctgatctgtcttgggctgtaggctagaatgcccgggctggtgcccaccaggggctggggagaaggaggggtggcatgatgaggaaggcagcatccgtccgtccctctcccagacctctcctcttccagtgtccccggggaagggcagatgacactcccttccccctaagccaaccgcactgaaggagtggggagaagagcatacgccaggagcctcctgcctcaaagtgctcccctaagtcttcttcctcctgtgctgacctcagggtggtctgacccttccctcggtgtgggggatgtggccctctcaggtgcccctacttgctttctgcttccttctggtgaagtccacctccaacattaacctgcccaccccacccccgtcatccctggagaattccagctttgtcgtatctcagagagggaatctaattgtttttggggggcaaaagaaagcaacgtttaggtatcacttctacttggaccgcatgcctttttatagccaaatttctgtgtatttcgtaaatggatttcgcgttaatggatatttatgtaataactagacttctcagattattgtgagaagggtcaggttggaaggggtgtaggaagaggggtgaggggtagtttttttctgttctagtttttttttttttttttgtcatctctgaggtggaccttgtcacctgtggttattggggccaaggcggactcagctccggggagaagggcctctctgccatttcggtcccaaggtgagctgacacaggcgttccttttgggactgtggaagcatcagatgccagcactgactcaggaacagcaagtcagggcagagaggaggagggaggctgtcaggatggaaatacctggacttttctttgcttccctcgcaaactggggtcttctctaccgaacttcccaggatttcatctcaccatatctgtgtgccgcccccagcaccccccacccacctctggggggcccgtgagcgtgtgtcttcattgcctctctccccttggcgtctgatgaccacagcaaagcactgggaatttctactcttcatgcctcatcctgcagcctcgggttcgcattctctctttcttttcctctttccctctttccctgggattgactctgagtggaataccttggcacatccactaggatctactgtctgcactgttttctttgcatgactttatacgcagtaagtatgttgaaaacaaacaaaaagaagaaaacactcaacaaaaccaatctacatgttttggactaaaaaaaaaaatagaggttgtattctcagtgtccgactcggaattatgttgctgcctctctgtgcttttggcctctgtgtggccgtgttttgccagcatgagatactgtcccctctggaggattttaggggaggaagagccacgtccccagggattggaggaggctccggtacccttgaccctcctgggtgttggttggagcagaactggtgaggatgtttgatccgagattttctgagctctccccgatcaccagctgtctgctgggttcttttctcaagtcctgctgcccaggcccaggtgagacaggcaacgccaggtctgcaggccaggagagatgctgcccaggcctcctggtttccaagctggtccatcactggcctctgtccttggcagagaccttgctgcccaggcccagagggcttcccagtaaggcccagtgatcccattatcccaggggcaaaaccacctgtccccttttgagctgccagttccctacagccatccccagtcaagggtgagggtgtggccttcaccaggggctgctgtaattaccgagcaaggtctgagctcttcttcagcctcagttccctcattggttaaaagggttctttgttcccatccagccgatgaaggagcaaacgtctggctatgtgaagcctaatttacctgcaggaactggcagggatagtcactggctggactcctgtttacttctagacctggtcaggctccatcccctcccccacctgcccctgattcccctcgtcggtgcctgtcaactgcttttcagcagtggactgcaggggaaagagcagtgatttggggtgagtaggcttcaattcccagctctgaccagacttgctgtgtgaccttgggcaagttcctttccctctttggagcttggtttccctgccagaggaaactgagctggaggagcctgaggtcctgcctttcattggctgacacacctcctgtccactgtgtcactctccaagtgccagagaagtggaggcagatcgctaccccaggctgagatggcccccactgtgaaggccacgcctgtgggtgggcagccacctggtgccaccacagggcaccagggatgatcctgatgcggcaggcaggggagactcacagaaaaatctgcccagagcctaccctcaccagacaaactctgtgctcctccaaaacatcctttagatgcaaaataataataataataataataaataaataaataaaaatccaaacccaagtcaaaaccttggctccagcatgaaaacacgtttacaggaaagtgttctcctgggtttgtgcccaccatggtgcgaatcctgacccaaggcctcctgtctcccttcaaagggagacccttttgggggatgagtttgccagactccccgtgctggtttctttgttactatttgtttggggttttgttttagttcttttttttttttcttttcttttttaaaaatatgtggctgtgaacttgaatgaacactgctcaaactttctgctattgggggggcgggtgggatgggaagaaggggcgtttgttttattcttggtgttttcagtgcaataaatagctacaaacttctgtgcaaaaaaaatg

SEQ ID NO: 733296 - DNA, 4707 bp, Homo sapiens
agaagccccgggctcgtcagtcaaaccggttctctgtttgcactcggcagcacgggcaggcaagtggtccctaggttcgggagcagagcagcagcgcctcagtcctggtcccccagtcccaagcctcacctgcctgcccagcgccaggatggccaccatcacctgcacccgcttcacggaagagtaccagctcttcgaggaattgggcaagggagccttctcggtggtgcgaaggtgtgtgaaggtgctggctggccaggagtatgctgccaagatcatcaacacaaagaagctgtcagccagagaccatcagaagctggagcgtgaagcccgcatctgccgcctgctgaagcaccccaacatcgtccgactacatgacagcatctcagaggagggacaccactacctgatcttcgacctggtcactggtggggaactgtttgaagatatcgtggcccgggagtattacagtgaggcggatgccagtcactgtatccagcagatcctggaggctgtgctgcactgccaccagatgggggtggtgcaccgggacctgaagcctgagaatctgttgctggcctccaagctcaagggtgccgcagtgaagctggcagactttggcctggccatagaggtggagggggagcagcaggcatggtttgggtttgcagggactcctggatatctctccccagaagtgctgcggaaggacccgtacgggaagcctgtggacctgtgggcttgtggggtcatcctgtacatcctgctggttgggtaccccccgttctgggatgaggaccagcaccgcctgtaccagcagatcaaagccggcgcctatgatttcccatcgccggaatgggacactgtcaccccggaagccaaggatctgatcaataagatgctgaccattaacccatccaaacgcatcacagctgccgaagcccttaagcacccctggatctcgcaccgctccaccgtggcatcctgcatgcacagacaggagaccgtggactgcctgaagaagttcaatgccaggaggaaactgaagggagccattctcaccacgatgctggccaccaggaacttctccggagggaagagtgggggaaacaagaagagcgatggtgtgaagaaaagaaagtccagttccagcgttcagttaatggaatcctcagagagcaccaacaccaccatcgaggatgaagacaccaaagtgcggaaacaggaaattataaaagtgacagagcagctgattgaagccataagcaatggagattttgagtcctacacgaagatgtgcgaccctggcatgacagccttcgaacctgaggccctggggaacctggttgagggcctggacttccatcgattctattttgaaaacctgtggtcccggaacagcaagcccgtgcacaccaccatcctgaatccccacatccacctgatgggcgacgagtcagcctgcatcgcctacatccgcatcacgcagtacctggacgctggcggcatcccacgcaccgcccagtcggaggagacccgtgtctggcaccgccgggacggcaaatggcagatcgtccacttccacagatctggggcgccctccgtcctgccccactgagggaccaggctggggtcgctgcgttgctgtgccgcagagatccactctgtccgtggagtggagctgctggttctcccaggtggattttgctggaattctcccatgtcatcaccccaccaccgtcacttctgtacctgcatcaagaaaacctgcttgttcacaaaagtcatcgcaacttcagagcgaacggccacatctccccacctctcacccccaccctctcccctgccaggctggggcttcctcaggcatgggtgtccacagcactggccccctctccccagcctcagctgctgtccgcctgatctgtcttgggctgtaggctagaatgcccgggctggtgcccaccaggggctggggagaaggaggggtggcatgatgaggaaggcagcatccgtccgtccctctcccagacctctcctcttccagtgtccccggggaagggcagatgacactcccttccccctaagccaaccgcactgaaggagtggggagaagagcatacgccaggagcctcctgcctcaaagtgctcccctaagtcttcttcctcctgtgctgacctcagggtggtctgacccttccctcggtgtgggggatgtggccctctcaggtgcccctacttgctttctgcttccttctggtgaagtccacctccaacattaacctgcccaccccacccccgtcatccctggagaattccagctttgtcgtatctcagagagggaatctaattgtttttggggggcaaaagaaagcaacgtttaggtatcacttctacttggaccgcatgcctttttatagccaaatttctgtgtatttcgtaaatggatttcgcgttaatggatatttatgtaataactagacttctcagattattgtgagaagggtcaggttggaaggggtgtaggaagaggggtgaggggtagtttttttctgttctagtttttttttttttttttgtcatctctgaggtggaccttgtcacctgtggttattggggccaaggcggactcagctccggggagaagggcctctctgccatttcggtcccaaggtgagctgacacaggcgttccttttgggactgtggaagcatcagatgccagcactgactcaggaacagcaagtcagggcagagaggaggagggaggctgtcaggatggaaatacctggacttttctttgcttccctcgcaaactggggtcttctctaccgaacttcccaggatttcatctcaccatatctgtgtgccgcccccatctttcttttcctctttccctctttccctgggattgactctgagtggaataccttggcacatccactaggatctactgtctgcactgttttctttgcatgactttatacgcagtaagtatgttgaaaacaaacaaaaagaagaaaacactcaacaaaaccaatctacatgttttggactaaaaaaaaaaatagaggttgtattctcagtgtccgactcggaattatgttgctgcctctctgtgcttttggcctctgtgtggccgtgttttgccagcatgagatactgtcccctctggaggattttaggggaggaagagccacgtccccagggattggaggaggctccggtacccttgaccctcctgggtgttggttggagcagaactggtgaggatgtttgatccgagattttctgagctctccccgatcaccagctgtctgctgggttcttttctcaagtcctgctgcccaggcccaggtgagacaggcaacgccaggtctgcaggccaggagagatgctgcccaggcctcctggtttccaagctggtccatcactggcctctgtccttggcagagaccttgctgcccaggcccaggggcaggctcttggcctgccccaggcccagagggcttcccagtaaggcccagtgatcccattatcccaggggcaaaaccacctgtccccttttgagctgccagttccctacagccatccccagtcaagggtgagggtgtggccttcaccaggggctgctgtaattaccgagcaaggtctgagctcttcttcagcctcagttccctcattggttaaaagggttctttgttcccatccagccgatgaaggagcaaacgtctggctatgtgaagcctaatttacctgcaggaactggcagggatagtcactggctggactcctgtttacttctagacctggtcaggctccatcccctcccccacctgcccctgattcccctcgtcggtgcctgtcaactgcttttcagcagtggactgcaggggaaagagcagtgatttggggtgagtaggcttcaattcccagctctgaccagacttgctgtgtgaccttgggcaagttcctttccctctttggagcttggtttccctgccagaggaaactgagctggaggagcctgaggtcctgcctttcattggctgacacacctcctgtccactgtgtcactctccaagtgccagagaagtggaggcagatcgctaccccaggctgagatggcccccactgtgaaggccacgcctgtgggtgggcagccacctggtgccaccacagggcaccagggatgatcctgatgcggcaggcaggggagactcacagaaaaatctgcccagagcctaccctcaccagacaaactctgtgctcctccaaaacatcctttagatgcaaaataataataataataataataaataaataaataaaaatccaaacccaagtcaaaaccttggctccagcatgaaaacacgtttacaggaaagtgttctcctgggtttgtgcccaccatggtgcgaatcctgacccaaggcctcctgtctcccttcaaagggagacccttttgggggatgagtttgccagactccccgtgctggtttctttgttactatttgtttggggttttgttttagttcttttttttttttcttttcttttttaaaaatatgtggctgtgaacttgaatgaacactgctcaaactttctgctattgggggggcgggtgggatgggaagaaggggcgtttgttttattcttggtgttttcagtgcaataaatagctacaaacttctgtgcaaaaaaaatg

SEQ ID NO: 733297 - DNA, 4677 bp, Homo sapiens
agaagccccgggctcgtcagtcaaaccggttctctgtttgcactcggcagcacgggcaggcaagtggtccctaggttcgggagcagagcagcagcgcctcagtcctggtcccccagtcccaagcctcacctgcctgcccagcgccaggatggccaccatcacctgcacccgcttcacggaagagtaccagctcttcgaggaattgggcaagggagccttctcggtggtgcgaaggtgtgtgaaggtgctggctggccaggagtatgctgccaagatcatcaacacaaagaagctgtcagccagagaccatcagaagctggagcgtgaagcccgcatctgccgcctgctgaagcaccccaacatcgtccgactacatgacagcatctcagaggagggacaccactacctgatcttcgacctggtcactggtggggaactgtttgaagatatcgtggcccgggagtattacagtgaggcggatgccagtcactgtatccagcagatcctggaggctgtgctgcactgccaccagatgggggtggtgcaccgggacctgaagcctgagaatctgttgctggcctccaagctcaagggtgccgcagtgaagctggcagactttggcctggccatagaggtggagggggagcagcaggcatggtttgggtttgcagggactcctggatatctctccccagaagtgctgcggaaggacccgtacgggaagcctgtggacctgtgggcttgtggggtcatcctgtacatcctgctggttgggtaccccccgttctgggatgaggaccagcaccgcctgtaccagcagatcaaagccggcgcctatgatttcccatcgccggaatgggacactgtcaccccggaagccaaggatctgatcaataagatgctgaccattaacccatccaaacgcatcacagctgccgaagcccttaagcacccctggatctcgcaccgctccaccgtggcatcctgcatgcacagacaggagaccgtggactgcctgaagaagttcaatgccaggaggaaactgaagggagccattctcaccacgatgctggccaccaggaacttctccggagggaagagtgggggaaacaagaagagcgatggtgtgaagaaaagaaagtccagttccagcgttcagttaatggaatcctcagagagcaccaacaccaccatcgaggatgaagacaccaaagtgcggaaacaggaaattataaaagtgacagagcagctgattgaagccataagcaatggagattttgagtcctacacgaagatgtgcgaccctggcatgacagccttcgaacctgaggccctggggaacctggttgagggcctggacttccatcgattctattttgaaaacctgtggtcccggaacagcaagcccgtgcacaccaccatcctgaatccccacatccacctgatgggcgacgagtcagcctgcatcgcctacatccgcatcacgcagtacctggacgctggcggcatcccacgcaccgcccagtcggaggagacccgtgtctggcaccgccgggacggcaaatggcagatcgtccacttccacagatctggggcgccctccgtcctgccccactgagggaccaggctggggtcgctgcgttgctgtgccgcagagatccactctgtccgtggagtggagctgctggttctcccaggtggattttgctggaattctcccatgtcatcaccccaccaccgtcacttctgtacctgcatcaagaaaacctgcttgttcacaaaagtcatcgcaacttcagagcgaacggccacatctccccacctctcacccccaccctctcccctgccaggctggggcttcctcaggcatgggtgtccacagcactggccccctctccccagcctcagctgctgtccgcctgatctgtcttgggctgtaggctagaatgcccgggctggtgcccaccaggggctggggagaaggaggggtggcatgatgaggaaggcagcatccgtccgtccctctcccagacctctcctcttccagtgtccccggggaagggcagatgacactcccttccccctaagccaaccgcactgaaggagtggggagaagagcatacgccaggagcctcctgcctcaaagtgctcccctaagtcttcttcctcctgtgctgacctcagggtggtctgacccttccctcggtgtgggggatgtggccctctcaggtgcccctacttgctttctgcttccttctggtgaagtccacctccaacattaacctgcccaccccacccccgtcatccctggagaattccagctttgtcgtatctcagagagggaatctaattgtttttggggggcaaaagaaagcaacgtttaggtatcacttctacttggaccgcatgcctttttatagccaaatttctgtgtatttcgtaaatggatttcgcgttaatggatatttatgtaataactagacttctcagattattgtgagaagggtcaggttggaaggggtgtaggaagaggggtgaggggtagtttttttctgttctagtttttttttttttttttgtcatctctgaggtggaccttgtcacctgtggttattggggccaaggcggactcagctccggggagaagggcctctctgccatttcggtcccaaggtgagctgacacaggcgttccttttgggactgtggaagcatcagatgccagcactgactcaggaacagcaagtcagggcagagaggaggagggaggctgtcaggatggaaatacctggacttttctttgcttccctcgcaaactggggtcttctctaccgaacttcccaggatttcatctcaccatatctgtgtgccgcccccatctttcttttcctctttccctctttccctgggattgactctgagtggaataccttggcacatccactaggatctactgtctgcactgttttctttgcatgactttatacgcagtaagtatgttgaaaacaaacaaaaagaagaaaacactcaacaaaaccaatctacatgttttggactaaaaaaaaaaatagaggttgtattctcagtgtccgactcggaattatgttgctgcctctctgtgcttttggcctctgtgtggccgtgttttgccagcatgagatactgtcccctctggaggattttaggggaggaagagccacgtccccagggattggaggaggctccggtacccttgaccctcctgggtgttggttggagcagaactggtgaggatgtttgatccgagattttctgagctctccccgatcaccagctgtctgctgggttcttttctcaagtcctgctgcccaggcccaggtgagacaggcaacgccaggtctgcaggccaggagagatgctgcccaggcctcctggtttccaagctggtccatcactggcctctgtccttggcagagaccttgctgcccaggcccagagggcttcccagtaaggcccagtgatcccattatcccaggggcaaaaccacctgtccccttttgagctgccagttccctacagccatccccagtcaagggtgagggtgtggccttcaccaggggctgctgtaattaccgagcaaggtctgagctcttcttcagcctcagttccctcattggttaaaagggttctttgttcccatccagccgatgaaggagcaaacgtctggctatgtgaagcctaatttacctgcaggaactggcagggatagtcactggctggactcctgtttacttctagacctggtcaggctccatcccctcccccacctgcccctgattcccctcgtcggtgcctgtcaactgcttttcagcagtggactgcaggggaaagagcagtgatttggggtgagtaggcttcaattcccagctctgaccagacttgctgtgtgaccttgggcaagttcctttccctctttggagcttggtttccctgccagaggaaactgagctggaggagcctgaggtcctgcctttcattggctgacacacctcctgtccactgtgtcactctccaagtgccagagaagtggaggcagatcgctaccccaggctgagatggcccccactgtgaaggccacgcctgtgggtgggcagccacctggtgccaccacagggcaccagggatgatcctgatgcggcaggcaggggagactcacagaaaaatctgcccagagcctaccctcaccagacaaactctgtgctcctccaaaacatcctttagatgcaaaataataataataataataataaataaataaataaaaatccaaacccaagtcaaaaccttggctccagcatgaaaacacgtttacaggaaagtgttctcctgggtttgtgcccaccatggtgcgaatcctgacccaaggcctcctgtctcccttcaaagggagacccttttgggggatgagtttgccagactccccgtgctggtttctttgttactatttgtttggggttttgttttagttcttttttttttttcttttcttttttaaaaatatgtggctgtgaacttgaatgaacactgctcaaactttctgctattgggggggcgggtgggatgggaagaaggggcgtttgttttattcttggtgttttcagtgcaataaatagctacaaacttctgtgcaaaaaaaatg

SEQ ID NO: 733298 - DNA, 4168 bp, Homo sapiens
agaagccccgggctcgtcagtcaaaccggttctctgtttgcactcggcagcacgggcaggcaagtggtccctaggttcgggagcagagcagcagcgcctcagtcctggtcccccagtcccaagcctcacctgcctgcccagcgccaggatggccaccatcacctgcacccgcttcacggaagagtaccagctcttcgaggaattgggcaagggagccttctcggtggtgcgaaggtgtgtgaaggtgctggctggccaggagtatgctgccaagatcatcaacacaaagaagctgtcagccagagaccatcagaagctggagcgtgaagcccgcatctgccgcctgctgaagcaccccaacatcgtccgactacatgacagcatctcagaggagggacaccactacctgatcttcgacctggtcactggtggggaactgtttgaagatatcgtggcccgggagtattacagtgaggcggatgccagtcactgtatccagcagatcctggaggctgtgctgcactgccaccagatgggggtggtgcaccgggacctgaagcctgagaatctgttgctggcctccaagctcaagggtgccgcagtgaagctggcagactttggcctggccatagaggtggagggggagcagcaggcatggtttgggtttgcagggactcctggatatctctccccagaagtgctgcggaaggacccgtacgggaagcctgtggacctgtgggcttgtggggtcatcctgtacatcctgctggttgggtaccccccgttctgggatgaggaccagcaccgcctgtaccagcagatcaaagccggcgcctatgatttcccatcgccggaatgggacactgtcaccccggaagccaaggatctgatcaataagatgctgaccattaacccatccaaacgcatcacagctgccgaagcccttaagcacccctggatctcgcaccgctccaccgtggcatcctgcatgcacagacaggagaccgtggactgcctgaagaagttcaatgccaggaggaaactgaagggagccattctcaccacgatgctggccaccaggaacttctccggagggaagagtgggggaaacaagaagagcgatggtgtgaagaaaagaaagtccagttccagcgttcagttaatggaatcctcagagagcaccaacaccaccatcgaggatgaagacaccaaagtgcggaaacaggaaattataaaagtgacagagcagctgattgaagccataagcaatggagattttgagtcctacacgaagatgtgcgaccctggcatgacagccttcgaacctgaggccctggggaacctggttgagggcctggacttccatcgattctattttgaaaacctgtggtcccggaacagcaagcccgtgcacaccaccatcctgaatccccacatccacctgatgggcgacgagtcagcctgcatcgcctacatccgcatcacgcagtacctggacgctggcggcatcccacgcaccgcccagtcggaggagacccgtgtctggcaccgccgggacggcaaatggcagatcgtccacttccacagatctggggcgccctccgtcctgccccactgagggaccaggctggggtcgctgcgttgctgtgccgcagagatccactctgtccgtggagtggagctgctggttctcccaggtggattttgctggaattctcccatgtcatcaccccaccaccgtcacttctgtacctgcatcaagaaaacctgcttgttcacaaaagtcatcgcaacttcagagcgaacggccacatctccccacctctcacccccaccctctcccctgccaggctggggcttcctcaggcatgggtgtccacagcactggccccctctccccagcctcagctgctgtccgcctgatctgtcttgggctgtaggctagaatgcccgggctggtgcccaccaggggctggggagaaggaggggtggcatgatgaggaaggcagcatccgtccgtccctctcccagacctctcctcttccagtgtccccggggaagggcagatgacactcccttccccctaagccaaccgcactgaaggagtggggagaagagcatacgccaggagcctcctgcctcaaagtgctcccctaagtcttcttcctcctgtgctgacctcagggtggtctgacccttccctcggtgtgggggatgtggccctctcaggtgcccctacttgctttctgcttccttctggtgaagtccacctccaacattaacctgcccaccccacccccgtcatccctggagaattccagctttgtcgtatctcagagagggaatctaattgtttttggggggcaaaagaaagcaacgtttaggtatcacttctacttggaccgcatgcctttttatagccaaatttctgtgtatttcgtaaatggatttcgcgttaatggatatttatgtaataactagacttctcagattattgtgagaagggtcaggttggaaggggtgtaggaagaggggtgaggggtagtttttttctgttctagtttttttttttttttttgtcatctctgaggtggaccttgtcacctgtggttattggggccaaggcggactcagctccggggagaagggcctctctgccatttcggtcccaaggtgagctgacacaggcgttccttttgggactgtggaagcatcagatgccagcactgactcaggaacagcaagtcagggcagagaggaggagggaggctgtcaggatggaaatacctggacttttctttgcttccctcgcaaactggggtcttctctaccgaacttcccaggatttcatctcaccatatctgtgtgccgcccccatctttcttttcctctttccctctttccctgggattgactctgagtggaataccttggcacatccactaggatctactgtctgcactgttttctttgcatgactttatacgcagtaagtatgttgaaaacaaacaaaaagaagaaaacactcaacaaaaccaatctacatgttttggactaaaaaaaaaaatagaggttgtattctcagtgtccgactcggaattatgttgctgcctctctgtgcttttggcctctgtgtggccgtgttttgccagcatgagatactgtcccctctggaggattttaggggaggaagagccacgtccccagggattggaggaggctccggtacccttgaccctcctgggtgttggttggagcagaactggtgaggatgtttgatccgagattttctgagctctccccgatcaccagctgtctgctgggttcttttctcaagtcctgctgcccaggcccaggtgagacaggcaacgccaggtctgcaggccaggagagatgctgcccaggcctcctggtttccaagctggtccatcactggcctctgtccttggcagagaccttgctgcccaggcccaggggcaggctcttggcctgccccaggcccagagggcttcccagtaaggcccagtgatcccattatcccaggggcaaaaccacctgtccccttttgagctgccagttccctacagccatccccagtcaagggtgagggtgtgggtgggcagccacctggtgccaccacagggcaccagggatgatcctgatgcggcaggcaggggagactcacagaaaaatctgcccagagcctaccctcaccagacaaactctgtgctcctccaaaacatcctttagatgcaaaataataataataataataataaataaataaataaaaatccaaacccaagtcaaaaccttggctccagcatgaaaacacgtttacaggaaagtgttctcctgggtttgtgcccaccatggtgcgaatcctgacccaaggcctcctgtctcccttcaaagggagacccttttgggggatgagtttgccagactccccgtgctggtttctttgttactatttgtttggggttttgttttagttcttttttttttttcttttcttttttaaaaatatgtggctgtgaacttgaatgaacactgctcaaactttctgctattgggggggcgggtgggatgggaagaaggggcgtttgttttattcttggtgttttcagtgcaataaatagctacaaacttctgtgcaaaaaaaatg

SEQ ID NO: 733299 - DNA, 1144 bp, Homo sapiens
gagggaagagtgggggaaacaagaagagcgatggtgtgaaggaatcctcagagagcaccaacaccaccatcgaggatgaagacaccaaagccccggtctcagcaccttatctggactgacttcctggagtgtcactatagcccatgaagtaggtgctgctgtgaacctcattctacagctgaggaaacagaggacagagaggccggtgtggtcccggaacagcaagcccgtgcacaccaccatcctgaatccccacatccacctgatgggcgacgagtcagcctgcatcgcctacatccgcatcacgcagtacctggacgctggcggcatcccacgcaccgcccagtcggaggagacccgtgtctggcaccgccgggacggcaaatggcagatcgtccacttccacagatctggggcgccctccgtcctgccccactgagggaccaggctggggtcgctgcgttgctgtgccgcagagatccactctgtccgtggagtggagctgctggttctcccaggtggattttgctggaattctcccatgtcatcaccccaccaccgtcacttctgtacctgcatcaagaaaacctgcttgttcacaaaagtcatcgcaacttcagagcgaacggccacatctccccacctctcacccccaccctctcccctgccaggctggggcttcctcaggcatgggtgtccacagcactggccccctctccccagcctcagctgctgtccgcctgatctgtcttgggctgtaggctagaatgcccgggctggtgcccaccaggggctggggagaaggaggggtggcatgatgaggaaggcagcatccgtccgtccctctcccagacctctcctcttccagtgtccccggggaagggcagatgacactcccttccccctaagccaaccgcactgaaggagtggggagaagagcatacgccaggagcctcctgcctcaaagtgctcccctaagtcttcttcctcctgtgctgacctcagggtggtctgacccttccctcggtgtgggggatgtggccctctcaggtgcccctacttgctttctgcttccttctggtgaagtccacctccaacattaacctgcccaccccaccccgtcgggtagagcgggaccgactga

SEQ ID NO: 733300 - DNA, 3667 bp, Homo sapiens
gagggaagagtgggggaaacaagaagagcgatggtgtgaaggaatcctcagagagcaccaacaccaccatcgaggatgaagacaccaaagccccggtctcagcaccttatctggactgacttcctggagtgtcactatagcccatgaagtaggtgctgctgtgaacctcattctacagctgaggaaacagaggacagagaggccggtgtggtcccggaacagcaagcccgtgcacaccaccatcctgaatccccacatccacctgatgggcgacgagtcagcctgcatcgcctacatccgcatcacgcagtacctggacgctggcggcatcccacgcaccgcccagtcggaggagacccgtgtctggcaccgccgggacggcaaatggcagatcgtccacttccacagatctggggcgccctccgtcctgccccactgagggaccaggctggggtcgctgcgttgctgtgccgcagagatccactctgtccgtggagtggagctgctggttctcccaggtggattttgctggaattctcccatgtcatcaccccaccaccgtcacttctgtacctgcatcaagaaaacctgcttgttcacaaaagtcatcgcaacttcagagcgaacggccacatctccccacctctcacccccaccctctcccctgccaggctggggcttcctcaggcatgggtgtccacagcactggccccctctccccagcctcagctgctgtccgcctgatctgtcttgggctgtaggctagaatgcccgggctggtgcccaccaggggctggggagaaggaggggtggcatgatgaggaaggcagcatccgtccgtccctctcccagacctctcctcttccagtgtccccggggaagggcagatgacactcccttccccctaagccaaccgcactgaaggagtggggagaagagcatacgccaggagcctcctgcctcaaagtgctcccctaagtcttcttcctcctgtgctgacctcagggtggtctgacccttccctcggtgtgggggatgtggccctctcaggtgcccctacttgctttctgcttccttctggtgaagtccacctccaacattaacctgcccaccccacccccgtcatccctggagaattccagctttgtcgtatctcagagagggaatctaattgtttttggggggcaaaagaaagcaacgtttaggtatcacttctacttggaccgcatgcctttttatagccaaatttctgtgtatttcgtaaatggatttcgcgttaatggatatttatgtaataactagacttctcagattattgtgagaagggtcaggttggaaggggtgtaggaagaggggtgaggggtagtttttttctgttctagtttttttttttttttttgtcatctctgaggtggaccttgtcacctgtggttattggggccaaggcggactcagctccggggagaagggcctctctgccatttcggtcccaaggtgagctgacacaggcgttccttttgggactgtggaagcatcagatgccagcactgactcaggaacagcaagtcagggcagagaggaggagggaggctgtcaggatggaaatacctggacttttctttgcttccctcgcaaactggggtcttctctaccgaacttcccaggatttcatctcaccatatctgtgtgccgcccccagcaccccccacccacctctggggggcccgtgagcgtgtgtcttcattgcctctctccccttggcgtctgatgaccacagcaaagcactgggaatttctactcttcatgcctcatcctgcagcctcgggttcgcattctctctttcttttcctctttccctctttccctgggattgactctgagtggaataccttggcacatccactaggatctactgtctgcactgttttctttgcatgactttatacgcagtaagtatgttgaaaacaaacaaaaagaagaaaacactcaacaaaaccaatctacatgttttggactaaaaaaaaaaatagaggttgtattctcagtgtccgactcggaattatgttgctgcctctctgtgcttttggcctctgtgtggccgtgttttgccagcatgagatactgtcccctctggaggattttaggggaggaagagccacgtccccagggattggaggaggctccggtacccttgaccctcctgggtgttggttggagcagaactggtgaggatgtttgatccgagattttctgagctctccccgatcaccagctgtctgctgggttcttttctcaagtcctgctgcccaggcccaggtgagacaggcaacgccaggtctgcaggccaggagagatgctgcccaggcctcctggtttccaagctggtccatcactggcctctgtccttggcagagaccttgctgcccaggcccaggggcaggctcttggcctgccccaggcccagagggcttcccagtaaggcccagtgatcccattatcccaggggcaaaaccacctgtccccttttgagctgccagttccctacagccatccccagtcaagggtgagggtgtggccttcaccaggggctgctgtaattaccgagcaaggtctgagctcttcttcagcctcagttccctcattggttaaaagggttctttgttcccatccagccgatgaaggagcaaacgtctggctatgtgaagcctaatttacctgcaggaactggcagggatagtcactggctggactcctgtttacttctagacctggtcaggctccatcccctcccccacctgcccctgattcccctcgtcggtgcctgtcaactgcttttcagcagtggactgcaggggaaagagcagtgatttggggtgagtaggcttcaattcccagctctgaccagacttgctgtgtgaccttgggcaagttcctttccctctttggagcttggtttccctgccagaggaaactgagctggaggagcctgaggtcctgcctttcattggctgacacacctcctgtccactgtgtcactctccaagtgccagagaagtggaggcagatcgctaccccaggctgagatggcccccactgtgaaggccacgcctgtgggtgggcagccacctggtgccaccacagggcaccagggatgatcctgatgcggcaggcaggggagactcacagaaaaatctgcccagagcctaccctcaccagacaaactctgtgctcctccaaaacatcctttagatgcaaaataataataataataataataaataaataaataaaaatccaaacccaagtcaaaaccttggctccagcatgaaaacacgtttacaggaaagtgttctcctgggtttgtgcccaccatggtgcgaatcctgacccaaggcctcctgtctcccttcaaagggagacccttttgggggatgagtttgccagactccccgtgctggtttctttgttactatttgtttggggttttgttttagttcttttttttttttcttttcttttttaaaaatatgtggctgtgaacttgaatgaacactgctcaaactttctgctattgggggggcgggtgggatgggaagaaggggcgtttgttttattcttggtgttttcagtgcaataaatagctacaaacttctgtgcaaaaaaaatg

SEQ ID NO: 733301 - DNA, 3128 bp, Homo sapiens
gagggaagagtgggggaaacaagaagagcgatggtgtgaaggaatcctcagagagcaccaacaccaccatcgaggatgaagacaccaaagccccggtctcagcaccttatctggactgacttcctggagtgtcactatagcccatgaagtaggtgctgctgtgaacctcattctacagctgaggaaacagaggacagagaggccggtgtggtcccggaacagcaagcccgtgcacaccaccatcctgaatccccacatccacctgatgggcgacgagtcagcctgcatcgcctacatccgcatcacgcagtacctggacgctggcggcatcccacgcaccgcccagtcggaggagacccgtgtctggcaccgccgggacggcaaatggcagatcgtccacttccacagatctggggcgccctccgtcctgccccactgagggaccaggctggggtcgctgcgttgctgtgccgcagagatccactctgtccgtggagtggagctgctggttctcccaggtggattttgctggaattctcccatgtcatcaccccaccaccgtcacttctgtacctgcatcaagaaaacctgcttgttcacaaaagtcatcgcaacttcagagcgaacggccacatctccccacctctcacccccaccctctcccctgccaggctggggcttcctcaggcatgggtgtccacagcactggccccctctccccagcctcagctgctgtccgcctgatctgtcttgggctgtaggctagaatgcccgggctggtgcccaccaggggctggggagaaggaggggtggcatgatgaggaaggcagcatccgtccgtccctctcccagacctctcctcttccagtgtccccggggaagggcagatgacactcccttccccctaagccaaccgcactgaaggagtggggagaagagcatacgccaggagcctcctgcctcaaagtgctcccctaagtcttcttcctcctgtgctgacctcagggtggtctgacccttccctcggtgtgggggatgtggccctctcaggtgcccctacttgctttctgcttccttctggtgaagtccacctccaacattaacctgcccaccccacccccgtcatccctggagaattccagctttgtcgtatctcagagagggaatctaattgtttttggggggcaaaagaaagcaacgtttaggtatcacttctacttggaccgcatgcctttttatagccaaatttctgtgtatttcgtaaatggatttcgcgttaatggatatttatgtaataactagacttctcagattattgtgagaagggtcaggttggaaggggtgtaggaagaggggtgaggggtagtttttttctgttctagtttttttttttttttttgtcatctctgaggtggaccttgtcacctgtggttattggggccaaggcggactcagctccggggagaagggcctctctgccatttcggtcccaaggtgagctgacacaggcgttccttttgggactgtggaagcatcagatgccagcactgactcaggaacagcaagtcagggcagagaggaggagggaggctgtcaggatggaaatacctggacttttctttgcttccctcgcaaactggggtcttctctaccgaacttcccaggatttcatctcaccatatctgtgtgccgcccccagcaccccccacccacctctggggggcccgtgagcgtgtgtcttcattgcctctctccccttggcgtctgatgaccacagcaaagcactgggaatttctactcttcatgcctcatcctgcagcctcgggttcgcattctctctttcttttcctctttccctctttccctgggattgactctgagtggaataccttggcacatccactaggatctactgtctgcactgttttctttgcatgactttatacgcagtaagtatgttgaaaacaaacaaaaagaagaaaacactcaacaaaaccaatctacatgttttggactaaaaaaaaaaatagaggttgtattctcagtgtccgactcggaattatgttgctgcctctctgtgcttttggcctctgtgtggccgtgttttgccagcatgagatactgtcccctctggaggattttaggggaggaagagccacgtccccagggattggaggaggctccggtacccttgaccctcctgggtgttggttggagcagaactggtgaggatgtttgatccgagattttctgagctctccccgatcaccagctgtctgctgggttcttttctcaagtcctgctgcccaggcccaggtgagacaggcaacgccaggtctgcaggccaggagagatgctgcccaggcctcctggtttccaagctggtccatcactggcctctgtccttggcagagaccttgctgcccaggcccaggggcaggctcttggcctgccccaggcccagagggcttcccagtaaggcccagtgatcccattatcccaggggcaaaaccacctgtccccttttgagctgccagttccctacagccatccccagtcaagggtgagggtgtgggtgggcagccacctggtgccaccacagggcaccagggatgatcctgatgcggcaggcaggggagactcacagaaaaatctgcccagagcctaccctcaccagacaaactctgtgctcctccaaaacatcctttagatgcaaaataataataataataataataaataaataaataaaaatccaaacccaagtcaaaaccttggctccagcatgaaaacacgtttacaggaaagtgttctcctgggtttgtgcccaccatggtgcgaatcctgacccaaggcctcctgtctcccttcaaagggagacccttttgggggatgagtttgccagactccccgtgctggtttctttgttactatttgtttggggttttgttttagttcttttttttttttcttttcttttttaaaaatatgtggctgtgaacttgaatgaacactgctcaaactttctgctattgggggggcgggtgggatgggaagaaggggcgtttgttttattcttggtgttttcagtgcaataaatagctacaaacttctgtgcaaaaaaaatg

SEQ ID NO: 733302 - DNA, 3637 bp, Homo sapiens
gagggaagagtgggggaaacaagaagagcgatggtgtgaaggaatcctcagagagcaccaacaccaccatcgaggatgaagacaccaaagccccggtctcagcaccttatctggactgacttcctggagtgtcactatagcccatgaagtaggtgctgctgtgaacctcattctacagctgaggaaacagaggacagagaggccggtgtggtcccggaacagcaagcccgtgcacaccaccatcctgaatccccacatccacctgatgggcgacgagtcagcctgcatcgcctacatccgcatcacgcagtacctggacgctggcggcatcccacgcaccgcccagtcggaggagacccgtgtctggcaccgccgggacggcaaatggcagatcgtccacttccacagatctggggcgccctccgtcctgccccactgagggaccaggctggggtcgctgcgttgctgtgccgcagagatccactctgtccgtggagtggagctgctggttctcccaggtggattttgctggaattctcccatgtcatcaccccaccaccgtcacttctgtacctgcatcaagaaaacctgcttgttcacaaaagtcatcgcaacttcagagcgaacggccacatctccccacctctcacccccaccctctcccctgccaggctggggcttcctcaggcatgggtgtccacagcactggccccctctccccagcctcagctgctgtccgcctgatctgtcttgggctgtaggctagaatgcccgggctggtgcccaccaggggctggggagaaggaggggtggcatgatgaggaaggcagcatccgtccgtccctctcccagacctctcctcttccagtgtccccggggaagggcagatgacactcccttccccctaagccaaccgcactgaaggagtggggagaagagcatacgccaggagcctcctgcctcaaagtgctcccctaagtcttcttcctcctgtgctgacctcagggtggtctgacccttccctcggtgtgggggatgtggccctctcaggtgcccctacttgctttctgcttccttctggtgaagtccacctccaacattaacctgcccaccccacccccgtcatccctggagaattccagctttgtcgtatctcagagagggaatctaattgtttttggggggcaaaagaaagcaacgtttaggtatcacttctacttggaccgcatgcctttttatagccaaatttctgtgtatttcgtaaatggatttcgcgttaatggatatttatgtaataactagacttctcagattattgtgagaagggtcaggttggaaggggtgtaggaagaggggtgaggggtagtttttttctgttctagtttttttttttttttttgtcatctctgaggtggaccttgtcacctgtggttattggggccaaggcggactcagctccggggagaagggcctctctgccatttcggtcccaaggtgagctgacacaggcgttccttttgggactgtggaagcatcagatgccagcactgactcaggaacagcaagtcagggcagagaggaggagggaggctgtcaggatggaaatacctggacttttctttgcttccctcgcaaactggggtcttctctaccgaacttcccaggatttcatctcaccatatctgtgtgccgcccccagcaccccccacccacctctggggggcccgtgagcgtgtgtcttcattgcctctctccccttggcgtctgatgaccacagcaaagcactgggaatttctactcttcatgcctcatcctgcagcctcgggttcgcattctctctttcttttcctctttccctctttccctgggattgactctgagtggaataccttggcacatccactaggatctactgtctgcactgttttctttgcatgactttatacgcagtaagtatgttgaaaacaaacaaaaagaagaaaacactcaacaaaaccaatctacatgttttggactaaaaaaaaaaatagaggttgtattctcagtgtccgactcggaattatgttgctgcctctctgtgcttttggcctctgtgtggccgtgttttgccagcatgagatactgtcccctctggaggattttaggggaggaagagccacgtccccagggattggaggaggctccggtacccttgaccctcctgggtgttggttggagcagaactggtgaggatgtttgatccgagattttctgagctctccccgatcaccagctgtctgctgggttcttttctcaagtcctgctgcccaggcccaggtgagacaggcaacgccaggtctgcaggccaggagagatgctgcccaggcctcctggtttccaagctggtccatcactggcctctgtccttggcagagaccttgctgcccaggcccagagggcttcccagtaaggcccagtgatcccattatcccaggggcaaaaccacctgtccccttttgagctgccagttccctacagccatccccagtcaagggtgagggtgtggccttcaccaggggctgctgtaattaccgagcaaggtctgagctcttcttcagcctcagttccctcattggttaaaagggttctttgttcccatccagccgatgaaggagcaaacgtctggctatgtgaagcctaatttacctgcaggaactggcagggatagtcactggctggactcctgtttacttctagacctggtcaggctccatcccctcccccacctgcccctgattcccctcgtcggtgcctgtcaactgcttttcagcagtggactgcaggggaaagagcagtgatttggggtgagtaggcttcaattcccagctctgaccagacttgctgtgtgaccttgggcaagttcctttccctctttggagcttggtttccctgccagaggaaactgagctggaggagcctgaggtcctgcctttcattggctgacacacctcctgtccactgtgtcactctccaagtgccagagaagtggaggcagatcgctaccccaggctgagatggcccccactgtgaaggccacgcctgtgggtgggcagccacctggtgccaccacagggcaccagggatgatcctgatgcggcaggcaggggagactcacagaaaaatctgcccagagcctaccctcaccagacaaactctgtgctcctccaaaacatcctttagatgcaaaataataataataataataataaataaataaataaaaatccaaacccaagtcaaaaccttggctccagcatgaaaacacgtttacaggaaagtgttctcctgggtttgtgcccaccatggtgcgaatcctgacccaaggcctcctgtctcccttcaaagggagacccttttgggggatgagtttgccagactccccgtgctggtttctttgttactatttgtttggggttttgttttagttcttttttttttttcttttcttttttaaaaatatgtggctgtgaacttgaatgaacactgctcaaactttctgctattgggggggcgggtgggatgggaagaaggggcgtttgttttattcttggtgttttcagtgcaataaatagctacaaacttctgtgcaaaaaaaatg

SEQ ID NO: 733303 - DNA, 3528 bp, Homo sapiens
gagggaagagtgggggaaacaagaagagcgatggtgtgaaggaatcctcagagagcaccaacaccaccatcgaggatgaagacaccaaagccccggtctcagcaccttatctggactgacttcctggagtgtcactatagcccatgaagtaggtgctgctgtgaacctcattctacagctgaggaaacagaggacagagaggccggtgtggtcccggaacagcaagcccgtgcacaccaccatcctgaatccccacatccacctgatgggcgacgagtcagcctgcatcgcctacatccgcatcacgcagtacctggacgctggcggcatcccacgcaccgcccagtcggaggagacccgtgtctggcaccgccgggacggcaaatggcagatcgtccacttccacagatctggggcgccctccgtcctgccccactgagggaccaggctggggtcgctgcgttgctgtgccgcagagatccactctgtccgtggagtggagctgctggttctcccaggtggattttgctggaattctcccatgtcatcaccccaccaccgtcacttctgtacctgcatcaagaaaacctgcttgttcacaaaagtcatcgcaacttcagagcgaacggccacatctccccacctctcacccccaccctctcccctgccaggctggggcttcctcaggcatgggtgtccacagcactggccccctctccccagcctcagctgctgtccgcctgatctgtcttgggctgtaggctagaatgcccgggctggtgcccaccaggggctggggagaaggaggggtggcatgatgaggaaggcagcatccgtccgtccctctcccagacctctcctcttccagtgtccccggggaagggcagatgacactcccttccccctaagccaaccgcactgaaggagtggggagaagagcatacgccaggagcctcctgcctcaaagtgctcccctaagtcttcttcctcctgtgctgacctcagggtggtctgacccttccctcggtgtgggggatgtggccctctcaggtgcccctacttgctttctgcttccttctggtgaagtccacctccaacattaacctgcccaccccacccccgtcatccctggagaattccagctttgtcgtatctcagagagggaatctaattgtttttggggggcaaaagaaagcaacgtttaggtatcacttctacttggaccgcatgcctttttatagccaaatttctgtgtatttcgtaaatggatttcgcgttaatggatatttatgtaataactagacttctcagattattgtgagaagggtcaggttggaaggggtgtaggaagaggggtgaggggtagtttttttctgttctagtttttttttttttttttgtcatctctgaggtggaccttgtcacctgtggttattggggccaaggcggactcagctccggggagaagggcctctctgccatttcggtcccaaggtgagctgacacaggcgttccttttgggactgtggaagcatcagatgccagcactgactcaggaacagcaagtcagggcagagaggaggagggaggctgtcaggatggaaatacctggacttttctttgcttccctcgcaaactggggtcttctctaccgaacttcccaggatttcatctcaccatatctgtgtgccgcccccatctttcttttcctctttccctctttccctgggattgactctgagtggaataccttggcacatccactaggatctactgtctgcactgttttctttgcatgactttatacgcagtaagtatgttgaaaacaaacaaaaagaagaaaacactcaacaaaaccaatctacatgttttggactaaaaaaaaaaatagaggttgtattctcagtgtccgactcggaattatgttgctgcctctctgtgcttttggcctctgtgtggccgtgttttgccagcatgagatactgtcccctctggaggattttaggggaggaagagccacgtccccagggattggaggaggctccggtacccttgaccctcctgggtgttggttggagcagaactggtgaggatgtttgatccgagattttctgagctctccccgatcaccagctgtctgctgggttcttttctcaagtcctgctgcccaggcccaggtgagacaggcaacgccaggtctgcaggccaggagagatgctgcccaggcctcctggtttccaagctggtccatcactggcctctgtccttggcagagaccttgctgcccaggcccaggggcaggctcttggcctgccccaggcccagagggcttcccagtaaggcccagtgatcccattatcccaggggcaaaaccacctgtccccttttgagctgccagttccctacagccatccccagtcaagggtgagggtgtggccttcaccaggggctgctgtaattaccgagcaaggtctgagctcttcttcagcctcagttccctcattggttaaaagggttctttgttcccatccagccgatgaaggagcaaacgtctggctatgtgaagcctaatttacctgcaggaactggcagggatagtcactggctggactcctgtttacttctagacctggtcaggctccatcccctcccccacctgcccctgattcccctcgtcggtgcctgtcaactgcttttcagcagtggactgcaggggaaagagcagtgatttggggtgagtaggcttcaattcccagctctgaccagacttgctgtgtgaccttgggcaagttcctttccctctttggagcttggtttccctgccagaggaaactgagctggaggagcctgaggtcctgcctttcattggctgacacacctcctgtccactgtgtcactctccaagtgccagagaagtggaggcagatcgctaccccaggctgagatggcccccactgtgaaggccacgcctgtgggtgggcagccacctggtgccaccacagggcaccagggatgatcctgatgcggcaggcaggggagactcacagaaaaatctgcccagagcctaccctcaccagacaaactctgtgctcctccaaaacatcctttagatgcaaaataataataataataataataaataaataaataaaaatccaaacccaagtcaaaaccttggctccagcatgaaaacacgtttacaggaaagtgttctcctgggtttgtgcccaccatggtgcgaatcctgacccaaggcctcctgtctcccttcaaagggagacccttttgggggatgagtttgccagactccccgtgctggtttctttgttactatttgtttggggttttgttttagttcttttttttttttcttttcttttttaaaaatatgtggctgtgaacttgaatgaacactgctcaaactttctgctattgggggggcgggtgggatgggaagaaggggcgtttgttttattcttggtgttttcagtgcaataaatagctacaaacttctgtgcaaaaaaaatg

SEQ ID NO: 733304 - DNA, 3498 bp, Homo sapiens
gagggaagagtgggggaaacaagaagagcgatggtgtgaaggaatcctcagagagcaccaacaccaccatcgaggatgaagacaccaaagccccggtctcagcaccttatctggactgacttcctggagtgtcactatagcccatgaagtaggtgctgctgtgaacctcattctacagctgaggaaacagaggacagagaggccggtgtggtcccggaacagcaagcccgtgcacaccaccatcctgaatccccacatccacctgatgggcgacgagtcagcctgcatcgcctacatccgcatcacgcagtacctggacgctggcggcatcccacgcaccgcccagtcggaggagacccgtgtctggcaccgccgggacggcaaatggcagatcgtccacttccacagatctggggcgccctccgtcctgccccactgagggaccaggctggggtcgctgcgttgctgtgccgcagagatccactctgtccgtggagtggagctgctggttctcccaggtggattttgctggaattctcccatgtcatcaccccaccaccgtcacttctgtacctgcatcaagaaaacctgcttgttcacaaaagtcatcgcaacttcagagcgaacggccacatctccccacctctcacccccaccctctcccctgccaggctggggcttcctcaggcatgggtgtccacagcactggccccctctccccagcctcagctgctgtccgcctgatctgtcttgggctgtaggctagaatgcccgggctggtgcccaccaggggctggggagaaggaggggtggcatgatgaggaaggcagcatccgtccgtccctctcccagacctctcctcttccagtgtccccggggaagggcagatgacactcccttccccctaagccaaccgcactgaaggagtggggagaagagcatacgccaggagcctcctgcctcaaagtgctcccctaagtcttcttcctcctgtgctgacctcagggtggtctgacccttccctcggtgtgggggatgtggccctctcaggtgcccctacttgctttctgcttccttctggtgaagtccacctccaacattaacctgcccaccccacccccgtcatccctggagaattccagctttgtcgtatctcagagagggaatctaattgtttttggggggcaaaagaaagcaacgtttaggtatcacttctacttggaccgcatgcctttttatagccaaatttctgtgtatttcgtaaatggatttcgcgttaatggatatttatgtaataactagacttctcagattattgtgagaagggtcaggttggaaggggtgtaggaagaggggtgaggggtagtttttttctgttctagtttttttttttttttttgtcatctctgaggtggaccttgtcacctgtggttattggggccaaggcggactcagctccggggagaagggcctctctgccatttcggtcccaaggtgagctgacacaggcgttccttttgggactgtggaagcatcagatgccagcactgactcaggaacagcaagtcagggcagagaggaggagggaggctgtcaggatggaaatacctggacttttctttgcttccctcgcaaactggggtcttctctaccgaacttcccaggatttcatctcaccatatctgtgtgccgcccccatctttcttttcctctttccctctttccctgggattgactctgagtggaataccttggcacatccactaggatctactgtctgcactgttttctttgcatgactttatacgcagtaagtatgttgaaaacaaacaaaaagaagaaaacactcaacaaaaccaatctacatgttttggactaaaaaaaaaaatagaggttgtattctcagtgtccgactcggaattatgttgctgcctctctgtgcttttggcctctgtgtggccgtgttttgccagcatgagatactgtcccctctggaggattttaggggaggaagagccacgtccccagggattggaggaggctccggtacccttgaccctcctgggtgttggttggagcagaactggtgaggatgtttgatccgagattttctgagctctccccgatcaccagctgtctgctgggttcttttctcaagtcctgctgcccaggcccaggtgagacaggcaacgccaggtctgcaggccaggagagatgctgcccaggcctcctggtttccaagctggtccatcactggcctctgtccttggcagagaccttgctgcccaggcccagagggcttcccagtaaggcccagtgatcccattatcccaggggcaaaaccacctgtccccttttgagctgccagttccctacagccatccccagtcaagggtgagggtgtggccttcaccaggggctgctgtaattaccgagcaaggtctgagctcttcttcagcctcagttccctcattggttaaaagggttctttgttcccatccagccgatgaaggagcaaacgtctggctatgtgaagcctaatttacctgcaggaactggcagggatagtcactggctggactcctgtttacttctagacctggtcaggctccatcccctcccccacctgcccctgattcccctcgtcggtgcctgtcaactgcttttcagcagtggactgcaggggaaagagcagtgatttggggtgagtaggcttcaattcccagctctgaccagacttgctgtgtgaccttgggcaagttcctttccctctttggagcttggtttccctgccagaggaaactgagctggaggagcctgaggtcctgcctttcattggctgacacacctcctgtccactgtgtcactctccaagtgccagagaagtggaggcagatcgctaccccaggctgagatggcccccactgtgaaggccacgcctgtgggtgggcagccacctggtgccaccacagggcaccagggatgatcctgatgcggcaggcaggggagactcacagaaaaatctgcccagagcctaccctcaccagacaaactctgtgctcctccaaaacatcctttagatgcaaaataataataataataataataaataaataaataaaaatccaaacccaagtcaaaaccttggctccagcatgaaaacacgtttacaggaaagtgttctcctgggtttgtgcccaccatggtgcgaatcctgacccaaggcctcctgtctcccttcaaagggagacccttttgggggatgagtttgccagactccccgtgctggtttctttgttactatttgtttggggttttgttttagttcttttttttttttcttttcttttttaaaaatatgtggctgtgaacttgaatgaacactgctcaaactttctgctattgggggggcgggtgggatgggaagaaggggcgtttgttttattcttggtgttttcagtgcaataaatagctacaaacttctgtgcaaaaaaaatg

SEQ ID NO: 733305 - DNA, 2989 bp, Homo sapiens
gagggaagagtgggggaaacaagaagagcgatggtgtgaaggaatcctcagagagcaccaacaccaccatcgaggatgaagacaccaaagccccggtctcagcaccttatctggactgacttcctggagtgtcactatagcccatgaagtaggtgctgctgtgaacctcattctacagctgaggaaacagaggacagagaggccggtgtggtcccggaacagcaagcccgtgcacaccaccatcctgaatccccacatccacctgatgggcgacgagtcagcctgcatcgcctacatccgcatcacgcagtacctggacgctggcggcatcccacgcaccgcccagtcggaggagacccgtgtctggcaccgccgggacggcaaatggcagatcgtccacttccacagatctggggcgccctccgtcctgccccactgagggaccaggctggggtcgctgcgttgctgtgccgcagagatccactctgtccgtggagtggagctgctggttctcccaggtggattttgctggaattctcccatgtcatcaccccaccaccgtcacttctgtacctgcatcaagaaaacctgcttgttcacaaaagtcatcgcaacttcagagcgaacggccacatctccccacctctcacccccaccctctcccctgccaggctggggcttcctcaggcatgggtgtccacagcactggccccctctccccagcctcagctgctgtccgcctgatctgtcttgggctgtaggctagaatgcccgggctggtgcccaccaggggctggggagaaggaggggtggcatgatgaggaaggcagcatccgtccgtccctctcccagacctctcctcttccagtgtccccggggaagggcagatgacactcccttccccctaagccaaccgcactgaaggagtggggagaagagcatacgccaggagcctcctgcctcaaagtgctcccctaagtcttcttcctcctgtgctgacctcagggtggtctgacccttccctcggtgtgggggatgtggccctctcaggtgcccctacttgctttctgcttccttctggtgaagtccacctccaacattaacctgcccaccccacccccgtcatccctggagaattccagctttgtcgtatctcagagagggaatctaattgtttttggggggcaaaagaaagcaacgtttaggtatcacttctacttggaccgcatgcctttttatagccaaatttctgtgtatttcgtaaatggatttcgcgttaatggatatttatgtaataactagacttctcagattattgtgagaagggtcaggttggaaggggtgtaggaagaggggtgaggggtagtttttttctgttctagtttttttttttttttttgtcatctctgaggtggaccttgtcacctgtggttattggggccaaggcggactcagctccggggagaagggcctctctgccatttcggtcccaaggtgagctgacacaggcgttccttttgggactgtggaagcatcagatgccagcactgactcaggaacagcaagtcagggcagagaggaggagggaggctgtcaggatggaaatacctggacttttctttgcttccctcgcaaactggggtcttctctaccgaacttcccaggatttcatctcaccatatctgtgtgccgcccccatctttcttttcctctttccctctttccctgggattgactctgagtggaataccttggcacatccactaggatctactgtctgcactgttttctttgcatgactttatacgcagtaagtatgttgaaaacaaacaaaaagaagaaaacactcaacaaaaccaatctacatgttttggactaaaaaaaaaaatagaggttgtattctcagtgtccgactcggaattatgttgctgcctctctgtgcttttggcctctgtgtggccgtgttttgccagcatgagatactgtcccctctggaggattttaggggaggaagagccacgtccccagggattggaggaggctccggtacccttgaccctcctgggtgttggttggagcagaactggtgaggatgtttgatccgagattttctgagctctccccgatcaccagctgtctgctgggttcttttctcaagtcctgctgcccaggcccaggtgagacaggcaacgccaggtctgcaggccaggagagatgctgcccaggcctcctggtttccaagctggtccatcactggcctctgtccttggcagagaccttgctgcccaggcccaggggcaggctcttggcctgccccaggcccagagggcttcccagtaaggcccagtgatcccattatcccaggggcaaaaccacctgtccccttttgagctgccagttccctacagccatccccagtcaagggtgagggtgtgggtgggcagccacctggtgccaccacagggcaccagggatgatcctgatgcggcaggcaggggagactcacagaaaaatctgcccagagcctaccctcaccagacaaactctgtgctcctccaaaacatcctttagatgcaaaataataataataataataataaataaataaataaaaatccaaacccaagtcaaaaccttggctccagcatgaaaacacgtttacaggaaagtgttctcctgggtttgtgcccaccatggtgcgaatcctgacccaaggcctcctgtctcccttcaaagggagacccttttgggggatgagtttgccagactccccgtgctggtttctttgttactatttgtttggggttttgttttagttcttttttttttttcttttcttttttaaaaatatgtggctgtgaacttgaatgaacactgctcaaactttctgctattgggggggcgggtgggatgggaagaaggggcgtttgttttattcttggtgttttcagtgcaataaatagctacaaacttctgtgcaaaaaaaatg

SEQ ID NO: 733306 - DNA, 3811 bp, Homo sapiens
ggccagctctgctccctgcagtctgccctccggctgcgtgtggatgctgctcgtcctcgccctgtgggccctggtgccctgcctggcgttgttaaccctctactttttctcctccacaggagggaagagtgggggaaacaagaagagcgatggtgtgaaggaatcctcagagagcaccaacaccaccatcgaggatgaagacaccaaagtgcggaaacaggaaattataaaagtgacagagcagctgattgaagccataagcaatggagattttgagtcctacacgaagatgtgcgaccctggcatgacagccttcgaacctgaggccctggggaacctggttgagggcctggacttccatcgattctattttgaaaacctgtggtcccggaacagcaagcccgtgcacaccaccatcctgaatccccacatccacctgatgggcgacgagtcagcctgcatcgcctacatccgcatcacgcagtacctggacgctggcggcatcccacgcaccgcccagtcggaggagacccgtgtctggcaccgccgggacggcaaatggcagatcgtccacttccacagatctggggcgccctccgtcctgccccactgagggaccaggctggggtcgctgcgttgctgtgccgcagagatccactctgtccgtggagtggagctgctggttctcccaggtggattttgctggaattctcccatgtcatcaccccaccaccgtcacttctgtacctgcatcaagaaaacctgcttgttcacaaaagtcatcgcaacttcagagcgaacggccacatctccccacctctcacccccaccctctcccctgccaggctggggcttcctcaggcatgggtgtccacagcactggccccctctccccagcctcagctgctgtccgcctgatctgtcttgggctgtaggctagaatgcccgggctggtgcccaccaggggctggggagaaggaggggtggcatgatgaggaaggcagcatccgtccgtccctctcccagacctctcctcttccagtgtccccggggaagggcagatgacactcccttccccctaagccaaccgcactgaaggagtggggagaagagcatacgccaggagcctcctgcctcaaagtgctcccctaagtcttcttcctcctgtgctgacctcagggtggtctgacccttccctcggtgtgggggatgtggccctctcaggtgcccctacttgctttctgcttccttctggtgaagtccacctccaacattaacctgcccaccccacccccgtcatccctggagaattccagctttgtcgtatctcagagagggaatctaattgtttttggggggcaaaagaaagcaacgtttaggtatcacttctacttggaccgcatgcctttttatagccaaatttctgtgtatttcgtaaatggatttcgcgttaatggatatttatgtaataactagacttctcagattattgtgagaagggtcaggttggaaggggtgtaggaagaggggtgaggggtagtttttttctgttctagtttttttttttttttttgtcatctctgaggtggaccttgtcacctgtggttattggggccaaggcggactcagctccggggagaagggcctctctgccatttcggtcccaaggtgagctgacacaggcgttccttttgggactgtggaagcatcagatgccagcactgactcaggaacagcaagtcagggcagagaggaggagggaggctgtcaggatggaaatacctggacttttctttgcttccctcgcaaactggggtcttctctaccgaacttcccaggatttcatctcaccatatctgtgtgccgcccccagcaccccccacccacctctggggggcccgtgagcgtgtgtcttcattgcctctctccccttggcgtctgatgaccacagcaaagcactgggaatttctactcttcatgcctcatcctgcagcctcgggttcgcattctctctttcttttcctctttccctctttccctgggattgactctgagtggaataccttggcacatccactaggatctactgtctgcactgttttctttgcatgactttatacgcagtaagtatgttgaaaacaaacaaaaagaagaaaacactcaacaaaaccaatctacatgttttggactaaaaaaaaaaatagaggttgtattctcagtgtccgactcggaattatgttgctgcctctctgtgcttttggcctctgtgtggccgtgttttgccagcatgagatactgtcccctctggaggattttaggggaggaagagccacgtccccagggattggaggaggctccggtacccttgaccctcctgggtgttggttggagcagaactggtgaggatgtttgatccgagattttctgagctctccccgatcaccagctgtctgctgggttcttttctcaagtcctgctgcccaggcccaggtgagacaggcaacgccaggtctgcaggccaggagagatgctgcccaggcctcctggtttccaagctggtccatcactggcctctgtccttggcagagaccttgctgcccaggcccagagggcttcccagtaaggcccagtgatcccattatcccaggggcaaaaccacctgtccccttttgagctgccagttccctacagccatccccagtcaagggtgagggtgtggccttcaccaggggctgctgtaattaccgagcaaggtctgagctcttcttcagcctcagttccctcattggttaaaagggttctttgttcccatccagccgatgaaggagcaaacgtctggctatgtgaagcctaatttacctgcaggaactggcagggatagtcactggctggactcctgtttacttctagacctggtcaggctccatcccctcccccacctgcccctgattcccctcgtcggtgcctgtcaactgcttttcagcagtggactgcaggggaaagagcagtgatttggggtgagtaggcttcaattcccagctctgaccagacttgctgtgtgaccttgggcaagttcctttccctctttggagcttggtttccctgccagaggaaactgagctggaggagcctgaggtcctgcctttcattggctgacacacctcctgtccactgtgtcactctccaagtgccagagaagtggaggcagatcgctaccccaggctgagatggcccccactgtgaaggccacgcctgtgggtgggcagccacctggtgccaccacagggcaccagggatgatcctgatgcggcaggcaggggagactcacagaaaaatctgcccagagcctaccctcaccagacaaactctgtgctcctccaaaacatcctttagatgcaaaataataataataataataataaataaataaataaaaatccaaacccaagtcaaaaccttggctccagcatgaaaacacgtttacaggaaagtgttctcctgggtttgtgcccaccatggtgcgaatcctgacccaaggcctcctgtctcccttcaaagggagacccttttgggggatgagtttgccagactccccgtgctggtttctttgttactatttgtttggggttttgttttagttcttttttttttttcttttcttttttaaaaatatgtggctgtgaacttgaatgaacactgctcaaactttctgctattgggggggcgggtgggatgggaagaaggggcgtttgttttattcttggtgttttcagtgcaataaatagctacaaacttctgtgcaaaaaaaatg

SEQ ID NO: 733307 - DNA, 3702 bp, Homo sapiens
ggccagctctgctccctgcagtctgccctccggctgcgtgtggatgctgctcgtcctcgccctgtgggccctggtgccctgcctggcgttgttaaccctctactttttctcctccacaggagggaagagtgggggaaacaagaagagcgatggtgtgaaggaatcctcagagagcaccaacaccaccatcgaggatgaagacaccaaagtgcggaaacaggaaattataaaagtgacagagcagctgattgaagccataagcaatggagattttgagtcctacacgaagatgtgcgaccctggcatgacagccttcgaacctgaggccctggggaacctggttgagggcctggacttccatcgattctattttgaaaacctgtggtcccggaacagcaagcccgtgcacaccaccatcctgaatccccacatccacctgatgggcgacgagtcagcctgcatcgcctacatccgcatcacgcagtacctggacgctggcggcatcccacgcaccgcccagtcggaggagacccgtgtctggcaccgccgggacggcaaatggcagatcgtccacttccacagatctggggcgccctccgtcctgccccactgagggaccaggctggggtcgctgcgttgctgtgccgcagagatccactctgtccgtggagtggagctgctggttctcccaggtggattttgctggaattctcccatgtcatcaccccaccaccgtcacttctgtacctgcatcaagaaaacctgcttgttcacaaaagtcatcgcaacttcagagcgaacggccacatctccccacctctcacccccaccctctcccctgccaggctggggcttcctcaggcatgggtgtccacagcactggccccctctccccagcctcagctgctgtccgcctgatctgtcttgggctgtaggctagaatgcccgggctggtgcccaccaggggctggggagaaggaggggtggcatgatgaggaaggcagcatccgtccgtccctctcccagacctctcctcttccagtgtccccggggaagggcagatgacactcccttccccctaagccaaccgcactgaaggagtggggagaagagcatacgccaggagcctcctgcctcaaagtgctcccctaagtcttcttcctcctgtgctgacctcagggtggtctgacccttccctcggtgtgggggatgtggccctctcaggtgcccctacttgctttctgcttccttctggtgaagtccacctccaacattaacctgcccaccccacccccgtcatccctggagaattccagctttgtcgtatctcagagagggaatctaattgtttttggggggcaaaagaaagcaacgtttaggtatcacttctacttggaccgcatgcctttttatagccaaatttctgtgtatttcgtaaatggatttcgcgttaatggatatttatgtaataactagacttctcagattattgtgagaagggtcaggttggaaggggtgtaggaagaggggtgaggggtagtttttttctgttctagtttttttttttttttttgtcatctctgaggtggaccttgtcacctgtggttattggggccaaggcggactcagctccggggagaagggcctctctgccatttcggtcccaaggtgagctgacacaggcgttccttttgggactgtggaagcatcagatgccagcactgactcaggaacagcaagtcagggcagagaggaggagggaggctgtcaggatggaaatacctggacttttctttgcttccctcgcaaactggggtcttctctaccgaacttcccaggatttcatctcaccatatctgtgtgccgcccccatctttcttttcctctttccctctttccctgggattgactctgagtggaataccttggcacatccactaggatctactgtctgcactgttttctttgcatgactttatacgcagtaagtatgttgaaaacaaacaaaaagaagaaaacactcaacaaaaccaatctacatgttttggactaaaaaaaaaaatagaggttgtattctcagtgtccgactcggaattatgttgctgcctctctgtgcttttggcctctgtgtggccgtgttttgccagcatgagatactgtcccctctggaggattttaggggaggaagagccacgtccccagggattggaggaggctccggtacccttgaccctcctgggtgttggttggagcagaactggtgaggatgtttgatccgagattttctgagctctccccgatcaccagctgtctgctgggttcttttctcaagtcctgctgcccaggcccaggtgagacaggcaacgccaggtctgcaggccaggagagatgctgcccaggcctcctggtttccaagctggtccatcactggcctctgtccttggcagagaccttgctgcccaggcccaggggcaggctcttggcctgccccaggcccagagggcttcccagtaaggcccagtgatcccattatcccaggggcaaaaccacctgtccccttttgagctgccagttccctacagccatccccagtcaagggtgagggtgtggccttcaccaggggctgctgtaattaccgagcaaggtctgagctcttcttcagcctcagttccctcattggttaaaagggttctttgttcccatccagccgatgaaggagcaaacgtctggctatgtgaagcctaatttacctgcaggaactggcagggatagtcactggctggactcctgtttacttctagacctggtcaggctccatcccctcccccacctgcccctgattcccctcgtcggtgcctgtcaactgcttttcagcagtggactgcaggggaaagagcagtgatttggggtgagtaggcttcaattcccagctctgaccagacttgctgtgtgaccttgggcaagttcctttccctctttggagcttggtttccctgccagaggaaactgagctggaggagcctgaggtcctgcctttcattggctgacacacctcctgtccactgtgtcactctccaagtgccagagaagtggaggcagatcgctaccccaggctgagatggcccccactgtgaaggccacgcctgtgggtgggcagccacctggtgccaccacagggcaccagggatgatcctgatgcggcaggcaggggagactcacagaaaaatctgcccagagcctaccctcaccagacaaactctgtgctcctccaaaacatcctttagatgcaaaataataataataataataataaataaataaataaaaatccaaacccaagtcaaaaccttggctccagcatgaaaacacgtttacaggaaagtgttctcctgggtttgtgcccaccatggtgcgaatcctgacccaaggcctcctgtctcccttcaaagggagacccttttgggggatgagtttgccagactccccgtgctggtttctttgttactatttgtttggggttttgttttagttcttttttttttttcttttcttttttaaaaatatgtggctgtgaacttgaatgaacactgctcaaactttctgctattgggggggcgggtgggatgggaagaaggggcgtttgttttattcttggtgttttcagtgcaataaatagctacaaacttctgtgcaaaaaaaatg

SEQ ID NO: 733308 - DNA, 3672 bp, Homo sapiens
ggccagctctgctccctgcagtctgccctccggctgcgtgtggatgctgctcgtcctcgccctgtgggccctggtgccctgcctggcgttgttaaccctctactttttctcctccacaggagggaagagtgggggaaacaagaagagcgatggtgtgaaggaatcctcagagagcaccaacaccaccatcgaggatgaagacaccaaagtgcggaaacaggaaattataaaagtgacagagcagctgattgaagccataagcaatggagattttgagtcctacacgaagatgtgcgaccctggcatgacagccttcgaacctgaggccctggggaacctggttgagggcctggacttccatcgattctattttgaaaacctgtggtcccggaacagcaagcccgtgcacaccaccatcctgaatccccacatccacctgatgggcgacgagtcagcctgcatcgcctacatccgcatcacgcagtacctggacgctggcggcatcccacgcaccgcccagtcggaggagacccgtgtctggcaccgccgggacggcaaatggcagatcgtccacttccacagatctggggcgccctccgtcctgccccactgagggaccaggctggggtcgctgcgttgctgtgccgcagagatccactctgtccgtggagtggagctgctggttctcccaggtggattttgctggaattctcccatgtcatcaccccaccaccgtcacttctgtacctgcatcaagaaaacctgcttgttcacaaaagtcatcgcaacttcagagcgaacggccacatctccccacctctcacccccaccctctcccctgccaggctggggcttcctcaggcatgggtgtccacagcactggccccctctccccagcctcagctgctgtccgcctgatctgtcttgggctgtaggctagaatgcccgggctggtgcccaccaggggctggggagaaggaggggtggcatgatgaggaaggcagcatccgtccgtccctctcccagacctctcctcttccagtgtccccggggaagggcagatgacactcccttccccctaagccaaccgcactgaaggagtggggagaagagcatacgccaggagcctcctgcctcaaagtgctcccctaagtcttcttcctcctgtgctgacctcagggtggtctgacccttccctcggtgtgggggatgtggccctctcaggtgcccctacttgctttctgcttccttctggtgaagtccacctccaacattaacctgcccaccccacccccgtcatccctggagaattccagctttgtcgtatctcagagagggaatctaattgtttttggggggcaaaagaaagcaacgtttaggtatcacttctacttggaccgcatgcctttttatagccaaatttctgtgtatttcgtaaatggatttcgcgttaatggatatttatgtaataactagacttctcagattattgtgagaagggtcaggttggaaggggtgtaggaagaggggtgaggggtagtttttttctgttctagtttttttttttttttttgtcatctctgaggtggaccttgtcacctgtggttattggggccaaggcggactcagctccggggagaagggcctctctgccatttcggtcccaaggtgagctgacacaggcgttccttttgggactgtggaagcatcagatgccagcactgactcaggaacagcaagtcagggcagagaggaggagggaggctgtcaggatggaaatacctggacttttctttgcttccctcgcaaactggggtcttctctaccgaacttcccaggatttcatctcaccatatctgtgtgccgcccccatctttcttttcctctttccctctttccctgggattgactctgagtggaataccttggcacatccactaggatctactgtctgcactgttttctttgcatgactttatacgcagtaagtatgttgaaaacaaacaaaaagaagaaaacactcaacaaaaccaatctacatgttttggactaaaaaaaaaaatagaggttgtattctcagtgtccgactcggaattatgttgctgcctctctgtgcttttggcctctgtgtggccgtgttttgccagcatgagatactgtcccctctggaggattttaggggaggaagagccacgtccccagggattggaggaggctccggtacccttgaccctcctgggtgttggttggagcagaactggtgaggatgtttgatccgagattttctgagctctccccgatcaccagctgtctgctgggttcttttctcaagtcctgctgcccaggcccaggtgagacaggcaacgccaggtctgcaggccaggagagatgctgcccaggcctcctggtttccaagctggtccatcactggcctctgtccttggcagagaccttgctgcccaggcccagagggcttcccagtaaggcccagtgatcccattatcccaggggcaaaaccacctgtccccttttgagctgccagttccctacagccatccccagtcaagggtgagggtgtggccttcaccaggggctgctgtaattaccgagcaaggtctgagctcttcttcagcctcagttccctcattggttaaaagggttctttgttcccatccagccgatgaaggagcaaacgtctggctatgtgaagcctaatttacctgcaggaactggcagggatagtcactggctggactcctgtttacttctagacctggtcaggctccatcccctcccccacctgcccctgattcccctcgtcggtgcctgtcaactgcttttcagcagtggactgcaggggaaagagcagtgatttggggtgagtaggcttcaattcccagctctgaccagacttgctgtgtgaccttgggcaagttcctttccctctttggagcttggtttccctgccagaggaaactgagctggaggagcctgaggtcctgcctttcattggctgacacacctcctgtccactgtgtcactctccaagtgccagagaagtggaggcagatcgctaccccaggctgagatggcccccactgtgaaggccacgcctgtgggtgggcagccacctggtgccaccacagggcaccagggatgatcctgatgcggcaggcaggggagactcacagaaaaatctgcccagagcctaccctcaccagacaaactctgtgctcctccaaaacatcctttagatgcaaaataataataataataataataaataaataaataaaaatccaaacccaagtcaaaaccttggctccagcatgaaaacacgtttacaggaaagtgttctcctgggtttgtgcccaccatggtgcgaatcctgacccaaggcctcctgtctcccttcaaagggagacccttttgggggatgagtttgccagactccccgtgctggtttctttgttactatttgtttggggttttgttttagttcttttttttttttcttttcttttttaaaaatatgtggctgtgaacttgaatgaacactgctcaaactttctgctattgggggggcgggtgggatgggaagaaggggcgtttgttttattcttggtgttttcagtgcaataaatagctacaaacttctgtgcaaaaaaaatg

SEQ ID NO: 733309 - DNA, 562 bp, Homo sapiens
gtggccattgacttcactgcctccaatggggacccgaggagcagccagtccctgcactgcctcagtccccgacagcccaaccactacctgcaggccctgcgtgcagtgggaggcatctgccaggactatgacagtgataagcggttcccagcttttggctttggggctcgaatcccccccaacttcgaggtgtcccatgactttgctatcaactttgacccggaaaatcctgaatgtgaaggtaaaaggggagattttcacctgccccgcctccccgcagacacactccacacaggagcacagactccactccccagggcccagcttcctgtcccttccacccatcccaggcctgtctttatcaggtgaggcttccagggccgaggcccagcatctgcacccaactctccctgccaagggaccatccaactctcccactgcttaatgaaggaactcgaggggagggcagtcctcagacctggaagcatttccttgctttaaggagtgtcaggagggggccctgctcatttctgccagcttcacaacttctcttcactcacag

SEQ ID NO: 733310 - DNA, 4623 bp, Homo sapiens
  misc_feature (2369)..(2369): n is a, c, g, or t
gccccataaatagcagcagagccggagctggagccggcgccagcggctggagcagcaagggagtcagggccagggccagagagccggagagaggagcccccgaccgagagcccaggtgagcccacccttcctccccagcccagccccagcccagcccagcttggcccagtctccataacaacatctcctggagcccgcagagagatcccagccctgcccaatcccttcaccaccacaagcccctgcctatctcggggacccccaagaactgggagacttgtggctggaaggcagagacccccctcccccagcccagaccctccctcacatatccagaaaggcacacactgtggggaggtagatacccagccagagaaaggtcccacttctgagggaggtacaggaactgtcacaccctcctggaaacggacacacgacatggggggacagacacggagggtggggcactcagacacaccaatgcacactcactcggggaagcatgacatgggatcagacagcctcaccctgagatctgtacagacacagatagatggactgaccggccatgaactctggccggcatacccctgcctgcttcagccgaggcttggtaccactgctgggggaaggtggcatgcgtgcatcccacgggcagcatggagggagccacgactccccaaaaatcctgtcgctaagagacggtgccagtgctgccaagaagtgtgaaaacaggggaggtggggagggatgtgaggcttgtcacagttagagctcctgccaggagcctgaaggagctttcagcagagccctggtcctgcctcccagcccaccaccactccttttccatcagctagccagaaggggaatgggggtagggagtggatagggatagccagcaggggactttccaacctgtctcctgcccactgcagactccacttctgagacccatcctcttcagaactccagaggcctctccaccccctgccccacccccttgccctagtttagctccctcgtgccaagactgagtgcagcgctggcacaacaccagtcgggaaatagcagaaggtgctgaggcggcagaaagtgtagatcaatcgatggcctaggagccaagactgccaggaacatccccaccccaatccttcagccctctccagccccatccacgcatacctaggccagcagcacagggcttctgagcaggagtgggaggctcaggtcctctgccctcccctgctcagaactctggtgaagctgaggaagcaggaggtccgtgaggccccagggtctagggaaggaggttaaggggtggggcccagggaccctagaggatagacccctctgctggcaggtgttccctttccagagtccaggccacctgctctgtccccacagtgacatgtcggaccctgagatgggatgggtgcctgagcccccaaccatgacgctgggggcctctcgggtggagctgcgggtgtcctgccatggcctcctggaccgggacacactcaccaaaccccacccctgcgtgctgctcaagctctactctgatgagcagtgggtggaggtagagcgcacagaggtgcttcgctcctgttccagccctgtcttctcccgggtgctggcccttgagtatttttttgaggagaagcagcccctgcagttccacgtgttcgatgccgaggacggagccaccagcccccgaaatgataccttcctcggctctacggagtgcaccttgggccagattgtgtcacaaaccaaggtcactaagccattattgctgaagaatgggaagactgcgggcaagtccaccatcacggtaggcaagatcacctgtactcacccttggtccaggtattcaatgcccctgcatggacacctatggtgacatcatgcccaggaccacccccacctaagggaaaggggatggggtggcccttgtggtaaggttaggggagtcctgccacttgtatcccccttgcagatcgtggccgaggaggtatcaggcacaaacgactatgtgcaactcaccttcagagcctacaagctggacaacaaggttggaaccccagagtccaggcccccaactcccctgtcactcctaggcctcccactcaagacagatcccaggagcccaggcctgctctcttcccagtggagcccatcccccaccctccttgcagctctcaccaacctcaagggccctttctcctgtatcttcaggatctgttcagcaagtctgaccctttcatggaaatctataagaccaacgaggaccaaagtgatcagctggtctggagaactgaggttggtgcctggggctatggggatgaagggagggagagtaaagtaagaanacacagacaggagctgaccagccacctggtgcctctccaaggtggtgaagaacaacctgaaccccagctgggagccgttccgcctgtccctgcattccctatgcagctgtgatgttcaccgacctctcaagttcctggtgtatgactatgactccagtgggaagcatgacttcatcggcgagttcaccagcactttccaggagatgcaggaagggacggcaaaccctgggcaggaggtgccacaaataccccacccccagaatcccacccagatccctgggagaatcctgagggtgatgctgaagagaccaccataggtgataggaagtggagagggtggaaagcacctgggctcagctgaaggacggaaccatgggggtcttgctctgggaggctctgctggaagggagaaagaggggtcacctgatggacttgtgaccctgagcttgtggggtggggtctagatgcagtgggactgtatcaaccccaagtatcgggacaagaagaagaattacaagagctcagggacggtagtgctggcccagtgcacggtaaatttcacttcctgcttcaagccttgccccagcccctgcccctaccacactctcaggttcaacccttcccttgtttcaaagaccagtttctctgcttctgggaactggaaaccacccccaactgcaacccaaaaaactctggctcccccatgttccccacagaagccctacccaagctccctcctcaaaggaccaccccatcccctcgccttacccctctccctacctccaggtggagaaggtgcacaccttcctggattacatcatgggtggctgccagatcagcttcacggtggccattgacttcactgcctccaatggggacccgaggagcagccagtccctgcactgcctcagtccccgacagcccaaccactacctgcaggccctgcgtgcagtgggaggcatctgccaggactatgacaggtaggagagagtggggcgggagggaacaggcagggaggccttgcccaacggattccacagctttttcttctccccagtgataagcggttcccagcttttggctttggggctcgaatcccccccaacttcgaggtgtcccatgactttgctatcaactttgacccggaaaatcctgaatgtgaaggtaaaaggggagattttcacctgccccgcctccccgcagacacactccacacaggagcacagactccactccccagggcccagcttcctgtcccttccacccatcccaggcctgtctttatcaggtgaggcttccagggccgaggcccagcatctgcacccaactctccctgccaagggaccatccaactctcccactgcttaatgaaggaactcgaggggagggcagtcctcagacctggaagcatttccttgctttaaggagtgtcaggagggggccctgctcatttctgccagcttcacaacttctcttcactcacagagatctcaggggtcatcgcctcctaccgtcgttgcctgccccagatccagctctacggccccaccaatgtggcccccatcatcaaccgtgtggctgagccggcccagcgggagcagagcaccggccaagccacgaagtactcggtgctgctggtgctcactgacggtgtggtgagcgacatggctgagactcgcactgctatcgtgcgtgcctcccgcctgcccatgtccatcatcatcgtaggcgtgggcaatgctgacttctctgacatgcggctgctggatggcgacgacggccccttgcgctgcccccgaggggtgcctgcagcccgagacattgtccagttcgtgcccttccgagacttcaaggatgctgccccctctgcactcgccaagtgtgtcctggctgaggtgccacggcaggtggtggagtactacgccagccagggcatcagccctggggctcccaggccctgcacactggctacgactcccagccctagcccgtgactgcctccctccggaccgacactccctcagcctctcagtgcctgtcctgaccctcgtgactccagtgaccaatgcctccacctcttggaccaggtgtgccccctgggttctggacgtgagtggtgggtcctgctcctatctctccaaaccccatacccttcaatgctgtggcccctcagtgacttccttgggtgatcctgactttctagccattaataaagagaactgctcctagcacctcagcctctaaaaaaaaaaac

SEQ ID NO: 733311 - DNA, 554 bp, Homo sapiens
gccccataaatagcagcagagccggagctggagccggcgccagcggctggagcagcaagggagtcagggccagggccagagagccggagagaggagcccccgaccgagagcccagattgtgtcacaaaccaaggtcactaagccattattgctgaagaatgggaagactgcgggcaagtccaccatcacgatcgtggccgaggaggtatcaggcacaaacgactatgtgcaactcaccttcagagcctacaagctggacaacaaggatctgttcagcaagtctgaccctttcatggaaatctataagaccaacgaggaccaaagtgatcaggtgcctgtcctgaccctcgtgactccagtgaccaatgcctccacctcttggaccaggtgtgccccctgggttctggacgtgagtggtgggtcctgctcctatctctccaaaccccatacccttcaatgctgtggcccctcagtgacttccttgggtgatcctgactttctagccattaataaagagaactgctcctagcacctcagcctctaaaaaaaaaaac

SEQ ID NO: 733312 - DNA, 2809 bp, Homo sapiens
gccccataaatagcagcagagccggagctggagccggcgccagcggctggagcagcaagggagtcagggccagggccagagagccggagagaggagcccccgaccgagagcccagattgtgtcacaaaccaaggtcactaagccattattgctgaagaatgggaagactgcgggcaagtccaccatcacgatcgtggccgaggaggtatcaggcacaaacgactatgtgcaactcaccttcagagcctacaagctggacaacaaggatctgttcagcaagtctgaccctttcatggaaatctataagaccaacgaggaccaaagtgatcagctggtctggagaactgaggtggtgaagaacaacctgaaccccagctgggagccgttccgcctgtccctgcattccctatgcagctgtgatgttcaccgacctctcaagttcctggtgtatgactatgactccagtgggaagcatgacttcatcggcgagttcaccagcactttccaggagatgcaggaagggacggcaaaccctgggcaggagatgcagtgggactgtatcaaccccaagtatcgggacaagaagaagaattacaagagctcagggacggtagtgctggcccagtgcacggtaaatttcacttcctgcttcaagccttgccccagcccctgcccctaccacactctcaggttcaacccttcccttgtttcaaagaccagtttctctgcttctgggaactggaaaccacccccaactgcaacccaaaaaactctggctcccccatgttccccacagaagccctacccaagctccctcctcaaaggaccaccccatcccctcgccttacccctctccctacctccaggtggagaaggtgcacaccttcctggattacatcatgggtggctgccagatcagcttcacggtaaagactcagagggagggcacacaggcaagagggaggggctgagtccatagtgaaaggaaggagcccagaatctccactgccccaacttgggctgctcatgagccttcgcattgtcagcttatgcacccccacatcattatgtggctacctgtagcctccccaccactcatcttagtcctccctacagatcccagctctggcctaggcaatctggtggctctcatggttgcagcatgaccttcttcccacccccacccaggtggccattgacttcactgcctccaatggggacccgaggagcagccagtccctgcactgcctcagtccccgacagcccaaccactacctgcaggccctgcgtgcagtgggaggcatctgccaggactatgacaggtaggagagagtggggcgggagggaacaggcagggaggccttgcccaacggattccacagctttttcttctccccagtgataagcggttcccagcttttggctttggggctcgaatcccccccaacttcgaggtaggctagatgcgagggaaagaaggagatggggggcgtgtcagtcaggcagaaaaggcaggccctcactgctcccgccttgccctcacaggtgtcccatgactttgctatcaactttgacccggaaaatcctgaatgtgaaggtaaaaggggagattttcacctgccccgcctccccgcagacacactccacacaggagcacagactccactccccagggcccagcttcctgtcccttccacccatcccaggcctgtctttatcagagatctcaggggtcatcgcctcctaccgtcgttgcctgccccagatccagctctacggccccaccaatgtggcccccatcatcaaccgtgtggctgagccggcccagcgggagcagagcaccggccaagccacgaagtactcggtgctgctggtgctcactgacggtgtggtgagcgacatggctgagactcgcactgctatcgtgcgtgcctcccgcctgcccatgtccatcatcatcgtaggcgtgggcaatgctgacttctctgacatgcggctgctggatggcgacgacggccccttgcgctgcccccgaggggtgcctgcagcccgagacattgtccagttcgtgcccttccgagacttcaaggatgtgagtcccccgggccccttccggctgaaggactcctcagcttctcatccccccaaatctgaccttcgtcttccaccatttgatgtcctgctaaggacgcgggagcccagctggccaccctgaagccccacttctccctcagatgaccctgcctcccctactcttcctctcacccctaaccacatcactgtccccaccctaggctgccccctctgcactcgccaagtgtgtcctggctgaggtgccacggcaggtggtggagtactacgccagccagggcatcagccctggggctcccaggccctgcacactggctacgactcccagccctagcccgtgactgcctccctccggaccgacactccctcagcctctcagtgagtcctggggcttccaaaggagtggacacagggggtgcaaagtggggcttggtagagcccaactaggctgggtgtagtgtagaagagagtgcttatgactctcccaccccctccgtgcctgtcctgaccctcgtgactccagtgaccaatgcctccacctcttggaccaggtgtgccccctgggttctggacgtgagtggtgggtcctgctcctatctctccaaaccccatacccttcaatgctgtggcccctcagtgacttccttgggtgatcctgactttctagccattaataaagagaactgctcctagcacctcagcctctaaaaaaaaaaac

SEQ ID NO: 733313 - DNA, 2186 bp, Homo sapiens
tcctgtgtctccttataaaatggtggctagggaactggacatcattctcaaagctatgacgttcagcaaggtatgtgatggcttttaaggagcacgggaagatcacatcctgctgtattccgggttagtttgagccccataaatagcagcagagccggagctggagccggcgccagcggctggagcagcaagggagtcagggccagggccagagagccggagagaggagcccccgaccgagagcccagtgacatgtcggaccctgagatgggatgggtgcctgagcccccaaccatgacgctgggggcctctcgggtggagctgcgggtgtcctgccatggcctcctggaccgggacacactcaccaaaccccacccctgcgtgctgctcaagctctactctgatgagcagtgggtggaggtagagcgcacagaggtgcttcgctcctgttccagccctgtcttctcccgggtgctggcccttgagtatttttttgaggagaagcagcccctgcagttccacgtgttcgatgccgaggacggagccaccagcccccgaaatgataccttcctcggctctacggagtgcaccttgggccagattgtgtcacaaaccaaggtcactaagccattattgctgaagaatgggaagactgcgggcaagtccaccatcacgatcgtggccgaggaggtatcaggcacaaacgactatgtgcaactcaccttcagagcctacaagctggacaacaaggatctgttcagcaagtctgaccctttcatggaaatctataagaccaacgaggaccaaagtgatcagctggtctggagaactgaggtggtgaagaacaacctgaaccccagctgggagccgttccgcctgtccctgcattccctatgcagctgtgatgttcaccgacctctcaagttcctggtgtatgactatgactccagtgggaagcatgacttcatcggcgagttcaccagcactttccaggagatgcaggaagggacggcaaaccctgggcaggagatgcagtgggactgtatcaaccccaagtatcgggacaagaagaagaattacaagagctcagggacggtagtgctggcccagtgcacggtggagaaggtgcacaccttcctggattacatcatgggtggctgccagatcagcttcacggtggccattgacttcactgcctccaatggggacccgaggagcagccagtccctgcactgcctcagtccccgacagcccaaccactacctgcaggccctgcgtgcagtgggaggcatctgccaggactatgacagtgataagcggttcccagcttttggctttggggctcgaatcccccccaacttcgaggtgtcccatgactttgctatcaactttgacccggaaaatcctgaatgtgaagagatctcaggggtcatcgcctcctaccgtcgttgcctgccccagatccagctctacggccccaccaatgtggcccccatcatcaaccgtgtggctgagccggcccagcgggagcagagcaccggccaagccacgaagtactcggtgctgctggtgctcactgacggtgtggtgagcgacatggctgagactcgcactgctatcgtgcgtgcctcccgcctgcccatgtccatcatcatcgtaggcgtgggcaatgctgacttctctgacatgcggctgctggatggcgacgacggccccttgcgctgcccccgaggggtgcctgcagcccgagacattgtccagttcgtgcccttccgagacttcaaggatgctgccccctctgcactcgccaagtgtgtcctggctgaggtgccacggcaggtggtggagtactacgccagccagggcatcagccctggggctcccaggccctgcacactggctacgactcccagccctagcccgtgactgcctccctccggaccgacactccctcagcctctcagtgcctgtcctgaccctcgtgactccagtgaccaatgcctccacctcttggaccaggtgtgccccctgggttctggacgtgagtggtgggtcctgctcctatctctccaaaccccatacccttcaatgctgtggcccctcagtgacttccttgggtgatcctgactttctagccattaataaagagaactgctcctagcacctcagcctctaaaaaaaaaaac

SEQ ID NO: 733314 - DNA, 473 bp, Homo sapiens
  misc_feature (86)..(86): n is a, c, g, or t
  misc_feature (107)..(107): n is a, c, g, or t
atctttgcatccctgggacgatttccagttgagcatggtgaataatctttttgataggctgttggatttgagttgctagtattttnttggggcattttgcatctgtnttcatcagggatagtggccttcagctttcttttcgtgtgtgtgtgtccctgtcttgttctggtattggggtaatattggccttgtagaatgaatttagaagaattcctttccttttgatttttttggaataatttaagaagaattagtattagttcttctttaaatgtttggtagaattcatcagtgaagccatgtggtcctggacttttctttgctaggagagtttttattactgattcaatcttgttactcattattggtctgtttgagttttccatttcttcatgatacagtcttggcaagttgtatgtgttgagtaatttatcaatttccattaggttttccaatttgttggagtatgattg

SEQ ID NO: 733315 - DNA, 4006 bp, Homo sapiens
  misc_feature (361)..(361): n is a, c, g, or t
gtcttctagacccagctcctcggcgctcatctccagctgctttaagacaaggggtgggggaaggggagggaggcaagaaaagatgagggtgggggaggggaaaagagggaatgcaaggggaaggagggaggagacggggagaaggaaagattggaagaaaaggatctccgaggaaggggctgagagaagggcagggtgaactggactaaaggccagagtaggaaggagaagaggggccaaaaaagaaggggatgaaattaagcacagaagatgggtaaagaaaaaagtatcagggaaagggcaaaataagagaaagccttgaggataagagggtagaaggctaaagaacaaggggaccacngggtcggggaagcgctgcctgaacggcgggacagtgacaaagaaagggcgctggcgatattcgcaccaagggtgcgaaacgcaatcgggaggtgagaaatggaaagaaggcgaatgcccggctacaagtagcctgggactgaaaggggacctgggggaggggctgggcccagggcagaaaagtccaggttcccatgcggcctgggcccacgtggagcgggcgctgaatcaccgttcagccgcccccctcccctcctccccgaccggtgcccgcagtccccgcctcctcggccgccgcctccacggggcggggccctggcccgggaccagcgccgcggctataaatgggctgcggcgaggccggcagaacgctgtgacagccacacgccccaaggcctccaagatgagctacacgttggactcgctgggcaacccgtccgcctaccggcgggtaaccgagacccgctcgagcttcagccgcgtcagcggctccccgtccagtggcttccgctcgcagtcgtggtcccgcggctcgcccagcaccgtgtcctcctcctataagcgcagcatgctcgccccgcgcctcgcttacagctcggccatgctcagctccgccgagagcagccttgacttcagccagtcctcgtccctgctcaacggcggctccggacccggcggcgactacaagctgtcccgctccaacgagaaggagcagctgcaggggctgaacgaccgctttgccggctacatagagaaggtgcactacctggagcagcagaataaggagattgaggcggagatccaggcgctgcggcagaagcaggcctcgcacgcccagctgggcgacgcgtacgaccaggagatccgcgagctgcgcgccaccctggagatggtgaaccacgagaaggctcaggtgcagctggactcggaccacctggaggaagacatccaccggctcaaggagcgctttgaggaggaggcgcggttgcgcgacgacactgaggcggccatccgcgcgctgcgcaaagacatcgaggaggcgtcgctggtcaaggtggagctggacaagaaggtgcagtcgctgcaggatgaggtggccttcctgcggagcaaccacgaggaggaggtggccgaccttctggcccagatccaggcatcgcacatcacggtggagcgcaaagactacctgaagacagacatctcgacggcgctgaaggaaatccgctcccagctcgaaagccactcagaccagaatatgcaccaggccgaagagtggttcaaatgccgctacgccaagctcaccgaggcggccgagcagaacaaggaggccatccgctccgccaaggaagagatcgccgagtaccggcgccagctgcagtccaagagcatcgagctagagtcggtgcgcggcaccaaggagtccctggagcggcagctcagcgacatcgaggagcgccacaaccacgacctcagcagctaccaggacaccatccagcagctggaaaatgagcttcggggcacaaagtgggaaatggctcgtcatttgcgcgaataccaggacctcctcaacgtcaagatggctctggatatagaaatcgctgcgtacagaaaactcctggagggtgaagagactagatttagcacatttgcaggaagcatcactgggccactgtatacacaccgacccccaatcacaatatccagtaagattcagaaaaccaaggtggaagctcccaagcttaaggtccaacacaaatttgtcgaggagatcatagaggaaaccaaagtggaggatgagaagtcagaaatggaagaggccctgacagccattacagaggaattggccgtttccatgaaggaagagaagaaagaagcagcagaagaaaaggaagaggaacccgaagctgaagaagaagaagtagctgccaaaaagtctccagtgaaagcaactgcacctgaagttaaagaagaggaaggggaaaaggaggaagaagaaggccaggaagaagaggaggaagaagatgagggagctaagtcagaccaagccgaagagggaggatccgagaaggaaggctctagtgaaaaagaggaaggtgagcaggaagaaggagaaacagaagctgaagctgaaggagaggaagccgaagctaaagaggaaaagaaagtggaggaaaagagtgaggaagtggctaccaaggaggagctggtggcagatgccaaggtggaaaagccagaaaaagccaagtctcctgtgccaaaatcaccagtggaagagaaaggcaagtctcctgtgcccaagtcaccagtggaagagaaaggcaagtctcctgtgcccaagtcaccagtggaagagaaaggcaagtctcctgtgccgaaatcaccagtggaagagaaaggcaagtctcctgtgtcaaaatcaccagtggaagagaaagccaaatctcctgtgccaaaatcaccagtggaagaggcaaagtcaaaagcagaagtggggaaaggtgaacagaaagaggaagaagaaaaggaagtcaaggaagctcccaaggaagagaaggtagagaaaaaggaagagaaaccaaaggatgtgccagagaagaagaaagctgagtcccctgtaaaggaggaagctgtggcagaggtggtcaccatcaccaaatcggtaaaggtgcacttggagaaagagaccaaagaagaggggaagccactgcagcaggagaaagagaaggagaaagcgggaggagagggaggaagtgaggaggaagggagtgataaaggtgccaagggatccaggaaggaagacatagctgtcaatggggaggtagaaggaaaagaggaggtagagcaggagaccaaggaaaaaggcagtgggagggaagaggagaaaggcgttgtcaccaatggcctagacttgagcccagcagatgaaaagaaggggggtgataaaagtgaggagaaagtggtggtgaccaaaacggtagaaaaaatcaccagtgaggggggagatggtgctaccaaatacatcactaaatctgtaaccgtcactcaaaaggttgaagagcatgaagagacctttgaggagaaactagtgtctactaaaaaggtagaaaaagtcacttcacacgccatagtaaaggaagtcacccagagtgactaagatttgagtccattgcaaaaggttaagccatatgacaatttcaaaatgcatgtgattggcagcttcaaaacagaacgggttctcccatgggggctccagacattgtattttactttgtgcaatatgaggggactgcatgcaagctcagggtgctccctcctcagtctttgggggattcaaatgcatgatattgtatgtacctgggaaatttgccgatttcctaagctgttggaagggggtcacttaaggggggatgtcttgagatgtattatgcaaagtaccaactgagccaaaaacaataaacgaaacacagaactcagccttaagaaagctatatatgaataattatgtttacctcactggtgcatttaaaatggacttttgttcatgggagaacctcgttgacatgcacagtttgcaatcttatgttgatcgatgttaaacgtcacagcagtacttgctcaataaaggtcatattggaaacatagtcaa

SEQ ID NO: 733316 - DNA, 3685 bp, Homo sapiens
  misc_feature (361)..(361): n is a, c, g, or t
gtcttctagacccagctcctcggcgctcatctccagctgctttaagacaaggggtgggggaaggggagggaggcaagaaaagatgagggtgggggaggggaaaagagggaatgcaaggggaaggagggaggagacggggagaaggaaagattggaagaaaaggatctccgaggaaggggctgagagaagggcagggtgaactggactaaaggccagagtaggaaggagaagaggggccaaaaaagaaggggatgaaattaagcacagaagatgggtaaagaaaaaagtatcagggaaagggcaaaataagagaaagccttgaggataagagggtagaaggctaaagaacaaggggaccacngggtcggggaagcgctgcctgaacggcgggacagtgacaaagaaagggcgctggcgatattcgcaccaagggtgcgaaacgcaatcgggaggtgagaaatggaaagaaggcgaatgcccggctacaagtagcctgggactgaaaggggacctgggggaggggctgggcccagggcagaaaagtccaggttcccatgcggcctgggcccacgtggagcgggcgctgaatcaccgttcagccgcccccctcccctcctccccgaccggtgcccgcagtccccgcctcctcggccgccgcctccacggggcggggccctggcccgggaccagcgccgcggctataaatgggctgcggcgaggccggcagaacgctgtgacagccacacgccccaaggcctccaagatgagctacacgttggactcgctgggcaacccgtccgcctaccggcgggtaaccgagacccgctcgagcttcagccgcgtcagcggctccccgtccagtggcttccgctcgcagtcgtggtcccgcggctcgcccagcaccgtgtcctcctcctataagcgcagcatgctcgccccgcgcctcgcttacagctcggccatgctcagctccgccgagagcagccttgacttcagccagtcctcgtccctgctcaacggcggctccggacccggcggcgactacaagctgtcccgctccaacgagaaggagcagctgcaggggctgaacgaccgctttgccggctacatagagaaggtgcactacctggagcagcagaataaggagattgaggcggagatccaggcgctgcggcagaagcaggcctcgcacgcccagctgggcgacgcgtacgaccaggagatccgcgagctgcgcgccaccctggagatggtgaaccacgagaaggctcaggtgcagctggactcggaccacctggaggaagacatccaccggctcaaggagcgctttgaggaggaggcgcggttgcgcgacgacactgaggcggccatccgcgcgctgcgcaaagacatcgaggaggcgtcgctggtcaaggtggagctggacaagaaggtgcagtcgctgcaggatgaggtggccttcctgcggagcaaccacgaggaggaggtggccgaccttctggcccagatccaggcatcgcacatcacggtggagcgcaaagactacctgaagacagacatctcgacggcgctgaaggaaatccgctcccagctcgaaagccactcagaccagaatatgcaccaggccgaagagtggttcaaatgccgctacgccaagctcaccgaggcggccgagcagaacaaggaggccatccgctccgccaaggaagagatcgccgagtaccggcgccagctgcagtccaagagcatcgagctagagtcggtgcgcggcaccaaggagtccctggagcggcagctcagcgacatcgaggagcgccacaaccacgacctcagcagctaccaggacaccatccagcagctggaaaatgagcttcggggcacaaagtgggaaatggctcgtcatttgcgcgaataccaggacctcctcaacgtcaagatggctctggatatagaaatcgctgcgtacagaaaactcctggagggtgaagagactagatttagcacatttgcaggaagcatcactgggccactgtatacacaccgacccccaatcacaatatccagtaagattcagaaaaccaaggtggaagctcccaagcttaaggtccaacacaaatttgtcgaggagatcatagaggaaaccaaagtggaggatgagaagtcagaaatggaagaggccctgacagccattacagaggaattggccgtttccatgaaggaagagaagaaagaagcagcagaagaaaaggaagaggaacccgaagctgaagaagaagaagtagctgccaaaaagtctccagtgaaagcaactgcacctgaagttaaagaagaggaaggggaaaaggaggaagaagaaggccaggaagaagaggaggaagaagatgagggagctaagtcagaccaagccgaagagggaggatccgagaaggaaggctctagtgaaaaagaggaaggtgagcaggaagaaggagaaacagaagctgaagctgaaggagaggaagccgaagctaaagaggaaaagaaagtggaggaaaagagtgaggaagtggctaccaaggaggagctggtggcagatgccaaggtggaaaagccagaaaaagccaagtctcctgtgccaaaatcaccagtggaagagaaaggcaagtctcctgtgcccaagtcaccagtggaagagaaaggcaagtctcctgtgcccaagtcaccagtggaagagaaaggcaagtctcctgtgccgaaatcaccagtggaagagaaaggcaagtctcctgtgtcaaaatcaccagtggaagagaaagccaaatctcctgtgccaaaatcaccagtggaagaggcaaagtcaaaagcagaagtggggaaaggtgaacagaaagaggaagaagaaaaggaagtcaaggaagctcccaaggaagagaaggtagagaaaaaggaagagaaaccaaaggatgtgccagagaagaagaaagctgagtcccctgtaaaggaggaagctgtggcagaggtggtcaccatcaccaaatcggtaaaggtgcacttggagaaagagaccaaagaagaggggaagccactgcagcaggagaaagagaaggagaaagcgggaggagagggaggaagtgaggaggaagggagtgataaaggtgccaagggatccaggaaggaagacatagctgtcaatggggaggtagaaggaaaagaggaggtagagcaggagaccaaggaaaaaggcagtgggagggaagaggagaaaggcgttgtcaccaatggcctagacttgagcccagcagatgaaaagaaggggggtgataaaagtgaggagaaagtggtggtgaccaaaacggtagaaaaaatcaccagtgaggggggagatggtgctaccaaatacatcactaaatctgtaaccgtcactcaaaaggttgaagagcatgaagagacctttgaggagaaactagtgtctactaaaaaggtagaaaaagtcacttcacacgccatagtaaaggaagtcacccagagtgactaagatttgagtccattgcaaaaggttaagccatatgacaatttcaaaatgcatgtgattggcagcttcaaaacagaacctcgttgacatgcacagtttgcaatcttatgttgatcgatgttaaacgtcacagcagtacttgctcaataaaggtcatattggaaacatagtcaa

SEQ ID NO: 733317 - DNA, 3760 bp, Homo sapiens
  misc_feature (361)..(361): n is a, c, g, or t
gtcttctagacccagctcctcggcgctcatctccagctgctttaagacaaggggtgggggaaggggagggaggcaagaaaagatgagggtgggggaggggaaaagagggaatgcaaggggaaggagggaggagacggggagaaggaaagattggaagaaaaggatctccgaggaaggggctgagagaagggcagggtgaactggactaaaggccagagtaggaaggagaagaggggccaaaaaagaaggggatgaaattaagcacagaagatgggtaaagaaaaaagtatcagggaaagggcaaaataagagaaagccttgaggataagagggtagaaggctaaagaacaaggggaccacngggtcggggaagcgctgcctgaacggcgggacagtgacaaagaaagggcgctggcgatattcgcaccaagggtgcgaaacgcaatcgggaggtgagaaatggaaagaaggcgaatgcccggctacaagtagcctgggactgaaaggggacctgggggaggggctgggcccagggcagaaaagtccaggttcccatgcggcctgggcccacgtggagcgggcgctgaatcaccgttcagccgcccccctcccctcctccccgaccggtgcccgcagtccccgcctcctcggccgccgcctccacggggcggggccctggcccgggaccagcgccgcggctataaatgggctgcggcgaggccggcagaacgctgtgacagccacacgccccaaggcctccaagatgagctacacgttggactcgctgggcaacccgtccgcctaccggcgggtaaccgagacccgctcgagcttcagccgcgtcagcggctccccgtccagtggcttccgctcgcagtcgtggtcccgcggctcgcccagcaccgtgtcctcctcctataagcgcagcatgctcgccccgcgcctcgcttacagctcggccatgctcagctccgccgagagcagccttgacttcagccagtcctcgtccctgctcaacggcggctccggacccggcggcgactacaagctgtcccgctccaacgagaaggagcagctgcaggggctgaacgaccgctttgccggctacatagagaaggtgcactacctggagcagcagaataaggagattgaggcggagatccaggcgctgcggcagaagcaggcctcgcacgcccagctgggcgacgcgtacgaccaggagatccgcgagctgcgcgccaccctggagatggtgaaccacgagaaggctcaggtgcagctggactcggaccacctggaggaagacatccaccggctcaaggagcgctttgaggaggaggcgcggttgcgcgacgacactgaggcggccatccgcgcgctgcgcaaagacatcgaggaggcgtcgctggtcaaggtggagctggacaagaaggtgcagtcgctgcaggatgaggtggccttcctgcggagcaaccacgaggaggaggtggccgaccttctggcccagatccaggcatcgcacatcacggtggagcgcaaagactacctgaagacagacatctcgacggcgctgaaggaaatccgctcccagctcgaaagccactcagaccagaatatgcaccaggccgaagagtggttcaaatgccgctacgccaagctcaccgaggcggccgagcagaacaaggaggccatccgctccgccaaggaagagatcgccgagtaccggcgccagctgcagtccaagagcatcgagctagagtcggtgcgcggcaccaaggagtccctggagcggcagctcagcgacatcgaggagcgccacaaccacgacctcagcagctaccaggacaccatccagcagctggaaaatgagcttcggggcacaaagtgggaaatggctcgtcatttgcgcgaataccaggacctcctcaacgtcaagatggctctggatatagaaatcgctgcgtacagaaaactcctggagggtgaagagactagatttagcacatttgcaggaagcatcactgggccactgtatacacaccgacccccaatcacaatatccagtaagattcagaaaaccaaggtggaagctcccaagcttaaggtccaacacaaatttgtcgaggagatcatagaggaaaccaaagtggaggatgagaagtcagaaatggaagaggccctgacagccattacagaggaattggccgtttccatgaaggaagagaagaaagaagcagcagaagaaaaggaagaggaacccgaagctgaagaagaagaagtagctgccaaaaagtctccagtgaaagcaactgcacctgaagttaaagaagaggaaggggaaaaggaggaagaagaaggccaggaagaagaggaggaagaagatgagggagctaagtcagaccaagccgaagagggaggatccgagaaggaaggctctagtgaaaaagaggaaggtgagcaggaagaaggagaaacagaagctgaagctgaaggagaggaagccgaagctaaagaggaaaagaaagtggaggaaaagagtgaggaagtggctaccaaggaggagctggtggcagatgccaaggtggaaaagccagaaaaagccaagtctcctgtgccaaaatcaccagtggaagagaaaggcaagtctcctgtgcccaagtcaccagtggaagagaaaggcaagtctcctgtgcccaagtcaccagtggaagagaaaggcaagtctcctgtgccgaaatcaccagtggaagagaaaggcaagtctcctgtgtcaaaatcaccagtggaagagaaagccaaatctcctgtgccaaaatcaccagtggaagaggcaaagtcaaaagcagaagtggggaaaggtgaacagaaagaggaagggagtgataaaggtgccaagggatccaggaaggaagacatagctgtcaatggggaggtagaaggaaaagaggaggtagagcaggagaccaaggaaaaaggcagtgggagggaagaggagaaaggcgttgtcaccaatggcctagacttgagcccagcagatgaaaagaaggggggtgataaaagtgaggagaaagtggtggtgaccaaaacggtagaaaaaatcaccagtgaggggggagatggtgctaccaaatacatcactaaatctgtaaccgtcactcaaaaggttgaagagcatgaagagacctttgaggagaaactagtgtctactaaaaaggtagaaaaagtcacttcacacgccatagtaaaggaagtcacccagagtgactaagatttgagtccattgcaaaaggttaagccatatgacaatttcaaaatgcatgtgattggcagcttcaaaacagaacgggttctcccatgggggctccagacattgtattttactttgtgcaatatgaggggactgcatgcaagctcagggtgctccctcctcagtctttgggggattcaaatgcatgatattgtatgtacctgggaaatttgccgatttcctaagctgttggaagggggtcacttaaggggggatgtcttgagatgtattatgcaaagtaccaactgagccaaaaacaataaacgaaacacagaactcagccttaagaaagctatatatgaataattatgtttacctcactggtgcatttaaaatggacttttgttcatgggagaacctcgttgacatgcacagtttgcaatcttatgttgatcgatgttaaacgtcacagcagtacttgctcaataaaggtcatattggaaacatagtcaa

SEQ ID NO: 733318 - DNA, 669 bp, Homo sapiens
ccaacgtccgtcacggtgccgagcagtgccagccgctctaccatggccgacggcctgattcccaagggctgcgtcccggggccgtgctagtgcagtgaatgttcaggaaacagaccaggtggcaggagggagtcttgtcctcaaggaacctcataagtcttgctagggggacaaacaacgagagaatgaaactggcagccatagaatccgggccttgatgcccaggcctcgccatgcatacctgctggccggcatctccctgagacccgtctggcacaggcaacggcagggcccggcccttggagcacagggatggcagagcagggtcatcgaagcaggtggcgtgcagacagtggcttctccgcaagagctcctggctctcagggagctgagggctcctcaatggggaattctggctgagctccaggggaaagcgggttggaggcctggctcctccgcccccatctcctctgccccaaccctggaagggggtcagatatcaatgctaacatttgtgctgactcaattaattcaaacgattcacaaaaacaaacttgcttaaagtattaatttcctaaaaagaactaaaatgagttcaaataattcacataattaaattattttaattgttaatttaattaaaacatctcagttttcaaagcaaaaaaa

SEQ ID NO: 733319 - DNA, 898 bp, Homo sapiens
  misc_feature (6)..(6): n is a, c, g, or t
attacnaacatgcgcctggccaggtctcagtcttttagcaaccctggatctctggactgtaaacttcacttggactttgtagttcctccattcctcccttaagtgggacaggatgagtcaagtgggctgatgttggctatttctcttcctccaggtgaaaggcaggagctggagttgggtatctcccttctggtcagttaggctctgataaaacccctgcaggtttagctcacgttaaatagttcaccgcgctcagccctagtttaatggtttttagtatattcccagagttatgctattttaggacatttttataaccttacaaagagtccctgcccattagcagtagctcctcattccctacttttccagctactgacaatcactaatgtactttctaaggatttgcctattgtgggcatttcatttttatttttaattgattgattgattgatggatggatggagtctcgctgtgtggcccaggcttggagtgcagtgtcatgagctcagctcactgcagcctctgtctccttgttcaagcgattctcctgcctcatcctcccgagtagctgggattacaggtgggcaccaccacgcctggctaatttttgtatttttagtagagacagggtttcactatgttggccaggctggtctcaaactcctgacctcacgtaattcactcgcctcggccttccagattgctgggattacaggcgtgagtcactatgcccggccaattctaggcatttcatgtaatgtaatcatatgttctatggccatatgtgtctggcttcttagcataatgttttcaaggttcatcatctatgtatcagtacttcatttctttttgttttaacagactttattttatagagcagttttaggtttacag

SEQ ID NO: 733320 - DNA, 532 bp, Homo sapiens
  misc_feature (16)..(16): n is a, c, g, or t
ggaacatggttctganacttggggatataccctaggcttaaggactggaaagccccctgaagtcccgagaccacaaccctccaccttctaaagataagacaagtcactgaaggtaaaatcagctcctcagtgtctccaaggacaggaatgccatgggctgggaggcgccatgggtgaacagacttccctacttcctgcctccccaagggtggggagcagtctaggggatggctgtactcctgggcccagtgtctaagtgaaaattaggaggaaatggagggagggtggcgagcgaggacagactggccaaggtcccccgcagccactcctgaagtcctcacgagggagaagcagcctctccttccagccttccccaagtcctccctaagagtgtattctactggtttctgtgcagatttttttcggctgcgaccaatagtagcttaaacatggattattttctttttaatttcttcctgcaaaattcttaggaaaccattaataaaagtaatatacatgtgaaataataaaa

SEQ ID NO: 733321 - DNA, 653 bp, Homo sapiens
ctactgccctgtgtgcagggccaggaatctgggccactccggataggcatcggcttcggcctccgcctgcctcagggccaggccagggccttgcatctgctgcccgagaaaaggccgaaggaagcagggcctcagggcaaggctactcaggcctgtgggcatcaattgccagcatctcagcctccagcagctcaggcccgggccgacccagtcccaggcacaccctcccagaccaggagcttcaggtctgcaggccttcaatcaccaaactccccacgatgtttctccgggcctccacctcgggcaccaaaacaggtcactacctccctgaagcccaggccttgccctggcccaaagaggccagtttctctggagctcattctccaaaagtcatcagtctagttccagagccacggaggccccctggaacaccccctccaaacccaaccctcccaaccaggccccagatctcggggagtccccgagacaccctgaagggctggctggccggaggtcaggtgtgttctcctgctctgaaccctgggagccccttgtggagtctgctgtctccaggctgaagaggaccaagggcaccaaggccccattcagccctccgtgtatctaataaagtctgaccctgtgaaaaaaatgtt

SEQ ID NO: 733322 - DNA, 1154 bp, Homo sapiens
ttaaaaaaaaatccaaaacaatattgttagaacagtgcaacaaatatttacaagtcaatagtcttttctttgtagaatattacatttatggtttcaataaatgatttagcagttaaagctgagatgaagtgtggttctcatattcaatcttgaaaaactaaaccatctttaaaaagtagaacgtccatgtgaactcatgcctgaagccatgtttgaacgctagataaaattgccctgggacagaactgtagttcacctttatgaaatcaattttaaacttgttattgtgagccacaataaatacagttcacattgcaaactatcacacactcatacaaatgttactaaaaaaaacttaccaagttatatcctctctacatgcaatgcattctggtattttctctttcatttgctttttttaaaaagatctcacaatccactaatgagtcacaacctgtggtttgtaaagtagtgttagaatgaacccattggccacatcagaaatatctaaggattttctttccaacctaaaatcttttccttctctgttaattaagagatcttaacaaatgggaaattctgagtaagttcctgaatttttctttcatttgatcatggccttctagtgtttactaaagtggtttttcttttcactgccatccttgggtatttttgtatgctgggttgtattacgggtgaagggttgatggggttgtaggcctgagaggatcatttttattacagactctatccttgactataatatgatagcgttacatggagtttagtgactcatgagctcatgtctgactcgtaaggggtcctttgttaattcagatgacattggtcttatccgttatcaagaatccatgagtttggctgggtgcggtggttcatgcctgtaatcctagcactttgggaggccgaggcgggtggatcacaaagtcaggagttcaagaccagcctgaccaacatggtgaaaccccgtctctactaaaaatacaaaaattagccgggagtggtggcacgcacctataatcccggctactcaggaggttgaggcaggagattcgcttgaacccgggaagcagaggttgcagtgagccgagattcgcactgggcgccagcctgggcaacagaggcgactccgtctc

SEQ ID NO: 733323 - DNA, 520 bp, Homo sapiens
aattttttgtatttttagtagagacggggtttcaccatgttggccaggctggtctcgaactcctgacctcatgatccacccgcctctgcctcccaaagcactgagactacaggagtgagccactgtgcccagcctactctggttttagtgcattcaagaggaacaaaaaaggaagaaaatcactagtaaatatacctctttctggttagagtggatgtttggaaattatatatatattatataatatatattatatatatacacaaacacgtacatacatgcacacacatatatgcctttttgattataggatagtataccaaaactcagaaatattatggaattaacagaatttagtaaggcagataagtagtaggtagaaaaatattaattttatcttccagcagaagcactgtgaaaaattagacaacaagaaaacattccattcaaaataatgacaataaggccgggcatggtggctcacacctgtaatcccagcactttgggaggctgaggcagg

SEQ ID NO: 733324 - DNA, 792 bp, Homo sapiens; identical to SEQ ID NO: 577630
  misc_feature (186)..(187): n is a, c, g, or t
  misc_feature (193)..(193): n is a, c, g, or t
  misc_feature (197)..(197): n is a, c, g, or t
  misc_feature (199)..(199): n is a, c, g, or t
  misc_feature (205)..(205): n is a, c, g, or t
  misc_feature (207)..(207): n is a, c, g, or t
  misc_feature (224)..(224): n is a, c, g, or t
  misc_feature (240)..(241): n is a, c, g, or t
  misc_feature (244)..(245): n is a, c, g, or t
  misc_feature (250)..(251): n is a, c, g, or t
  misc_feature (277)..(277): n is a, c, g, or t

SEQ ID NO: 733325 - DNA, 817 bp, Homo sapiens; identical to SEQ ID NO: 314388

SEQ ID NO: 733326 - DNA, 491 bp, Homo sapiens
catatctaggtgccttctcccaactcagatcctttgactatagaaagacacagatttcaaggctgagatccacaaaactctagcaaatactgcacagacactgaccaatgacagcaggtgctgcctgtcaccctggagcaccaggcagggttccaaagcacccttgctgtgccagcctctgattgctggttatagggaggtctggggtagtcccaaaagctgggatgtctaaggcagctggggtcagtcaggaggctcagggcagtggcaggaaaatattttcctccctggtagagccacagcggggtatccaggctgaatattattggcgagaaggaccatggcaccgcaccaagacctgcaggacaaactttgttggagctgaatccagaaaaacaatcttcttctaaaccactctcctgcccctcatttaattattgtgcttttgggtgcacttggactactctgaaacattcagaactctgtcaaaa

SEQ ID NO: 733327 - DNA, 1032 bp, Homo sapiens
cttggacgtcagcactgaaggctacaacaactgggtcttcatgtccacccacttctgggatgagaacccacagggcgtgtggaccctgggcctagagaacaagggctactatttcaacacggggacgttgtaccgctacacgctgctgctctatgggacggccgaggacatgacagcgcggcctacaggcccccaggtgaccagcagcgcgtgtgtgcagcgggacacagaggggctgtgccaggcgtgtgacggccccgcctacatcctgggacagctctgcctggcctactgccccccgcggttcttcaaccacacaaggctggtgaccgctgggcctgggcacacggcggcgcccgcgctgagggtctgctccagctgccatgcctcctgctacacctgccgcggcggctccccgagggactgcacctcctgtcccccatcctccacgctggaccagcagcagggctcctgcatgggacccaccacccccgacagccgcccccggcttagagctgccgcctgtccccaccaccgctgcccagcctcggccatggtgctgagcctcctggccgtgaccctcggaggccccgtcctctgcggcatgtccatggacctcccactatacgcctggctctcccgtgccagggccacccccaccaaaccccaggtctggctgccagctggaacctgaagttgtcagctcagaaagcgaccttgcccccgcctgggtccctgacaggcactgctgccatgctgcctccccaggctggccccagaggagcgagcaccagcacccgacgcctggcctgccagggatgggccccgtggaaccccgaagcctggcgggagagagagagagagaagtctcctctgcattttgggtttgggcgggagtgggctggggggagaggctggagcaccccaaaagccaggggaaagtggagggagagaaacgtgacactgtccgcctcgggcaccgcgtccaacctcagagtttgcaaataaaggttgcttagaaggtgaaaaaaa

SEQ ID NO: 733328 - DNA, 416 bp, Homo sapiens
  misc_feature (281)..(281): n is a, c, g, or t
  misc_feature (283)..(283): n is a, c, g, or t
  misc_feature (296)..(296): n is a, c, g, or t
  misc_feature (298)..(298): n is a, c, g, or t
cagaaggttggggccatccaaccaggcagtccgcctgcacagcagctgtccctgctcatcgggctggaggacagaagacagaaccctaaaaccacaggttgctgaaaagccaggagtcaaaatgactgagcgctttgactgccaccattgcaacgaatctctctttggcaagaagtacatcctgcgggaggagagcccctactgcgtggtgtgctttgagaccctgttcgccaacacctgcgaggagtgtgggaagccatcggctgtgactcaaggacttntnttaaaggaccggnantggcataagctgtttcactgctcgagtcagaactactggtggacagcctttgctgcaaggaggacagctgctcttacagctctttcacgggtcctatccaggtccagggttcaagggg

SEQ ID NO: 733329 - DNA, 238 bp, Homo sapiens
aaccaggcagtccgcctgcacagcagctgtccctgctcatcgggctggaggacagaagacagaaccctaaaaccacaggtaagggccactggttcccctgtgcccttctctcacccttgccatccttcccagcctgtctctgcagcagctctgtaggcatcttgttgcatgcagagggagtgtccagccctgggaggaagctctcaggcactgggagctcgctgaccccagcagagat

SEQ ID NO: 733330 - DNA, 1737 bp, Homo sapiens; identical to SEQ ID NO: 1507

SEQ ID NO: 733331 - DNA, 1314 bp, Homo sapiens
  misc_feature (431)..(431): n is a, c, g, or t
  misc_feature (701)..(701): n is a, c, g, or t
atgagtcagcaaaacaccagtggggactgcctgtttgacggtgtcaacgagctgatgaaaaccctacagtttgcagtccacatccccaccttcgtcctgggcctgctcctcaacctgctggccatccatggcttcagcaccttccttaagaacaggtggcccgattatgctgccacctccatctacatgatcaacctggcagtctttgacctgctgctggtgctctccctcccattcaagatggtcctgtcccaggtacagtcccccttcccgtccctgtgcaccctggtggagtgcctttacttcgtcagcatgtacggaagcgtcttcaccatctgcttcatcagcatggaccggttcttggccatccgttacccgctactggtgagccactccggtcccccaggaagatctttgggatctgctgcacnatctgggtcctggtgtggaccggaagcatccctatctacagtttccatgggaaagtggaaaaatacatgtgcttccacaacatgtctgatgatacctggagcgccaaggtcttcttcccgctggaggtgtttggcttcctccttcccatgggcatcatgggcttctgctgctccaggagcatccacatcctgctgggccgccgagaccacacccaggactgggtgcagcagaaagcctgcatctacagcatcgcagccagcctggctgtnttcgtggtctccttcctcccagtccacctggggttcttcctgcagttcctggtgagaaacagctttatcgtagagtgcagagccaagcagagcatcagcttcttcttgcaattgtccatgtgtttctccaatgtcaactgctgcctggatgttttctgctactactttgtcatcaaagaattccgcatgaacatcagggcccaccggccttccagggtccagctggtcctgcaggacaccacgatctcccggggctaacggaaggacatcctgttcaggggaagaaagccctggccctgaattctggtaacggatatcgcgttccagggttttgatgtggtgggatgatccgcaccatcttcactgatgtgcttccctttgatgcccattgagtgccagctttgctcattataccccaaagaccttttttccactgcccagacagcttataccacccagtgttcagggatctctgaagaacccacagaccaggtgaattactgatttctaagtccaaaaactatagagcagaagaattgagaaagagaatgagaccatgtcaacaaggctgtttccaactctccccattttcctgttctactgggaggttctg

SEQ ID NO: 733332 - DNA, 791 bp, Homo sapiens
  misc_feature (20)..(20): n is a, c, g, or t
ctggggccgactgtctgtanctagtcagttttcaaaaatccccatttcttgttctttctcttttcacagtatgtttgaatcaagccatattcatacattgaatttgtttgacagagtctctgaatctgttaagtttgaaggctagctctcacattctctatcaccagctttatctctgtcttcctttcccacccttcttatttgtaatttgtttgttaaagagatcaggttgtcaggtaaaattagtcttccacaatctggattttgatgattatgtcaccatggtattgtttaacatctttctctttcccccaaaccattggttttcagtcatgagagatagatataagcattaaaactctatagctgaaatggccttgaagatcctttgtaacccatagcttttaaaagctggtacaagtcaattggccaaaggatattgagttaggcagggccagcctttggcaatgcaattgctgcttcctcagactcaacaaaaattatttgttttctttgaaaatgggaaaaagctacaggataagtcataaggcataagcataactagaattgtctgcaaaataagcttatacacatggtaaaggcctcatgattctaagcctgtgtcccaggttccctttcaagttaccaagatttgcagagttacttcattattatgaagatggtgagtgcatgcagaacaaatgtattcctggtaaaagaacattaacatgatggggaatgcagctattctagatgtgatatataagagtagggaaactaagtttttttta

SEQ ID NO: 733333 - DNA, 465 bp, Homo sapiens
atataatcataatacccattatcacttgttaaaacataaataataatcctttaataatgccattagtcagttttcaaaaatccccatttcttgttctttctcttttcacagtatgtttgaatcaagccatattcatacattgaatttgtttgacagagtctctgaatctgttaagtttgaaggctagctctcacattctctatcaccagctttatctctgtcttcctttcccacccttcttatttgtaatttgtttgttaaagagatcaggttgtcaggtaaaattagtcttccacaatctggattttgatgattatgtcaccatggtattgtttaacatctttctctttcccccaaaccattggttttcagtcatgagagatagatataagcattaaaactctatagctgaaatggccttgaagatcctttgtaacccatagcttttaaaagctggtacaagtc

SEQ ID NO: 733334 - DNA, 1283 bp, Homo sapiens
tgccactgctgtagcttctgccacctgccacgaccgggcctctccctggcgtttggtcacctctgcttcattctccaccgcgcctatggtccctcttggagccagcgtggcgggcctggcggctcccgggtggtgagagagcggtccgggaacgatgaaggcctcgcagtgctgctgctgtctcagccacctcttggcttccgtcctcctcctgctgttgctgcctgaactaagcgggcccctggcagtcctgctgcaggcagccgaggccgcgccaggtcttgggcctcctgaccctagaccacggacattaccgccgctgccaccgggccctacccctgcccagcagccgggccgtggtctggctgaagctgcggggccgcggggctccgagggaggcaatggcagcaaccctgtggccgggcttgagacggacgatcacggagggaaggccggggaaggctcggtgggtggcggccttgctgtgagccccaaccctggcgacaagcccatgacccagcgggccctgaccgtgttgatggtggtgagcggcgcggtgctggtgtacttcgtggtcaggacggtcaggatgagaagaagaaaccgaaagactaggagatatggagttttggacactaacatagaaaatatggaattgacacctttagaacaggatgatgaggatgatgacaacacgttgtttgatgccaatcatcctcgaagataagaatgtgccttttgatgaaagaactttatctttctacaatgaagagtggaatttctatgtttaaggaataagaagccactatatcaatgttggggggggtatttaagttacatatattttaacaacctttaatttgctgttgcaataaataccgtatccttttattatatctttatatgtatagaagtactctgttaatgggctcagagatgttggggataaagtatactgtaataatttatctgtttgaaaattactataaaacggtgttttctgatcggtttttgtttcctgcttaccatatgattgtaaattgttttatgtattaatcagttaatgctaattatttttgctgatgtcatatgttaaagagctataaattccaacaaccaactggtgtgtaaaaataatttaaaatttcctttactgaaaggtatttcccatttttgtggggaaaagaagccaaatttattactttgtgttggggtttttaaaatattaagaaatgtctaagttattgtttgcaaaacaataaatatgattttaaattctctta

SEQ ID NO: 733335 - DNA, 514 bp, Homo sapiens; identical to SEQ ID NO: 4130

SEQ ID NO: 733336 - DNA, 1225 bp, Homo sapiens
tttttttttttgagacggattcgctctgtcgcccaggccggactgcggactgcagtggcgcaatctcggctcactgcaagctccgcttcccgggttcacgccattctcctgcctcagcctcccgagtagctgggactacaggcgcccgcaccgcgcccggctaattttttgtatttttagtagagacggggtttcaccttgttagccaggatggtctcgatctcctgacctcatgatccacccgcctcggcctcccaaagtgctgggattacaggcgtgacaccgcgcccggcctcctccactgatttttaaaaatccagtcaacagtaggattttcttgttgaactgtgaaggcctgtgctcggtagggactttgtgaatcatccctgtttgggtcccagagccactggagggcccatcactggagtggctggtgagacactccagggcatgagagttgctatgggcctctgtgtggcttctagaggcttcccaggggcacaaagactatgtgacccaggtggaagctcgggaggctcacgctggacacatgctgcacactctggctcccctgtggctgcagctgcacccacctacccagcattctccccacgacctgtccagcccaagcccacggcactcccaggggagcccaggacaccctcaactttttagtggattactagagtatcagaccacccatttatctctcagttcctcactcccacccctgcacccagcaagtcaccaagtcccccaggtgagtaaactggagctaacagcagttggtacttacggcatatactggatttggctcactcacacgtggtattcctatcttcatctactgtatcttcctggactacataagctgcaaagttaaaaactgcatttctcagattcccttgagctaggttccagacgtgatttattatcagtcaatcaaacacattcgcatgagttttgtatagggaacaatgttaagtcggaagaaaggcagaatgcaagacacggttctggagccagcagctttattggtagcatcctgactcaataggcagctttcctgataatagcaggaacatcagcctccttggtggcccactcattgtgtggctctggaaatcattcctggatattccacctagtctgtttctttagctttcccaacaactctgtgagccatgtaacattctgtaataaatttctttctgcttaaattagt

SEQ ID NO: 733337 - DNA, 903 bp, Homo sapiens
gcaccagaagaagggacaagcagttctgtatgaaggtggaaaaggctatggaaaaagccagctgttggctgaaataaactttctggcacagaaagaagggcatagctacccttcacaggtgctttggaaacccactttattgtgaggtcctatgccaggaccttctctctaaggacgtgttgctctttcatgtcctacaaaaggaggaagaggaaaacagcaagtgggaaaccctctcagccaatgccatgaaatccataatgtatagtatttctcctgccaactctgaggaagcccaggaactttatgtctgcacagtcaaggatgatgtgaacttggatacagtacttctcctaccctttttgaaagaaatagcagtaagccaactggatcaactgagcccagaggaacagttgctggtcaagtgtgctgcaatcattggtcactccttccatatagatttgctgcagcacctcctgcctggctgggataaaaataagctacttcaggtcttgagagctcttgtggatatacatgtgctctgctggtctgacaagagccaagagcttcctgctgagcccatattaatgccttcctctatcgacatcattgatggaaccaaagagaagaagacaaagttagatggtaggtatgatgaaaggaggtaggtatgatgaaggacgcgtccttcatcatacctaccaatgaatatcttcctattcccagtctaagagtttttccattatattctacaaatccatcatttccctaaagaaacaaacgaaaaaaatccttgcttttggctatagttcataaatgatttaatagatcatcatttcttcattgtaaatgtagtgttttaaccatacaatgtaggtgggtatgggtaggtatgatgaaaga

SEQ ID NO: 733338 - DNA, 991 bp, Homo sapiens
ttctatttcctatattcatcataaacttcatgcttgatgttgaaattgttttctgaaaatagagaatacaaagaggagattttaaaatgtcagtggcagccccacactcctttttaatcttatttcctgatatcttgagtttacttggacgtagagttttccttgactatggttatttctggtagtagcagctccagattaggcaatggttttcttcagagatagcttagagtgagccccagaacaaggtcaatgcgaagattgcttgtgtctgcgtgtccagggcacagtgatcctcatcactagccggggggctccgtgaggatctgctcctggtcgtttctgttctgtatcttctctgcagcccttactgaagccgttaccaactggcacaattcaattcctactgtacccatcatgcacagatggctgaagtattgagaacgctccagtgaccgggaggcaatagtctgtctctctgtctttctcatacacacttacacacacatacacacaaccttgttgcttaattttcagagagtctactttcagaaaagccttcaggaatacatcatgtacaaaactgagaaattacctgaagtatctttaaatttagtaaaaagttgcattgttttttgaacatcacacttgaaaagtacatgaatacaaacatacttaggaaaaaaagctttaattaatttaaaaaggagaacaatgctatatgctgtatcccacctttctctgaatgttacattttctcccctatcccaggctgcatctaagaaaactcaaagggaatatgctatctatcttttccgagcaatgaaagctctgggttttttccttgcttttcagggcacaatacttctctttcttcctggttagacaggataagttctgagtcccctggtatcatcagcttacttcttctctgttaaatattcacaaaaaatcactaactttcatgcctcagcaaacctccactgcctaa

SEQ ID NO: 733339 - DNA, 972 bp, Homo sapiens; identical to SEQ ID NO: 12579

SEQ ID NO: 733340 - DNA, 776 bp, Homo sapiens; identical to SEQ ID NO: 11952

SEQ ID NO: 733341 - DNA, 1189 bp, Homo sapiens
tggtatagctttctctatccttttgcttttaatgtattttcttgtggataacacacgattgggctttgtttgtttttgaaatccattctgacaatctcttttttaattggtgtaatcagattattcacatttaaagtggttattgatacagttggattaatatctacaatgtctgtaactgttttgtatgtgtctcacttgactttcatatctaattttgaatttgtaatttcatattctttgccttaaagagaacgcttgcagatccctcaaaacctggagacaccccccaccttgcacacattataccggtatgtgatggtagaaaagctgcacatcagtcttggcaggcagggcaggagggatgcagggattcacagatgcgactgtgcaacgcacagatgcactgggtctttgcttggtgggttcgaagcctccagacgctgacaaacactgcagccaatgagtgggttcctatggtccgatatggagggcaaggggcgggactccctcctgcctctccctggctgggttcagagcctccgcggagagactgcgttgggcccagagtgggcgtggcttacgtgtccgccggctttcctggcaggcctggcgggggggccaggttgccatgacgaccgcggctaggtcgcggcagactcggttggtgactccgggcgcgtcgaagatcttgtacctgtcgttcgcagtggctcactttcccaagccatgggcagcaggaagaaggaaattgccctgcaggtcaacatcagcacccaagagctttgggaggaaatgctcagttccaaaggactaactgttgttgatgtctatcaaggctggtgtggcccctgcaaacctgtggtgagcctcttccagaagatgaggatcgaggtcggcctggaccttctgcactttgcattagcagaggcagatcgtcttgatgtcctcgaaaagtacagagggaagtgcgagccaacctttctgttttatgcaggaggagaactggtggctgtggttagaggagcaaatgccccactgctgcagaaaaccatcctagaccagctggaggccgaaaagaaagtgctggctgaaggcagagaacggaaagtgattaaagatgaggctctttctgatgaagatgaatgtgtttcccatggaaagaataatggtgaagatgaggacatgg

SEQ ID NO: 733342 - DNA, 439 bp, Homo sapiens
gtcaacatcagcacccaagagctttgggaggaaatgctcagttccaaaggactaactgttgttgatgtctatcaaggctggtgtggcccctgcaaacctgtggtgagcctcttccagaagatgaggatcgaggtcggcctggaccttctgcactttgcattagtaagattctctctcagccaacagtcatacaacattgtaaaaagaatttaaaaatttaaaagagtcaggaaggagaagtgtgagagtgacctttctcaggtcattaaaaaggaatcagtgtggactttttgttgatactgtcatgatactttctaatttctctagttatgaaggttcctattccccaccccacctccctgtgtccctcttggcttgagcagttcttggtgctgtatgaagagaagaaatatatgtcactcaaatgcatattctccct

SEQ ID NO: 733343 - DNA, 2542 bp, Homo sapiens
atatgtaggctcatttgtgggagattgcaaactttatgtgcccccagttctccttggttttgtaggaaagctaaaagaaaaccttgtactctcactaataatgaaattcatagccaatttagaaagggaaaataacctgaaaaccaaaatacctcattcatctgaagatgcctggaataaaatatggaattcttctgtacctacctcccccttacagacttttctcctattttgagagagaaattcaagaagaagaatacagcttgttctctttccacaaatgatactttgtctaagggaataggagataccaagaaacagtatctttaaaaaagtaagctgcccacaggccttcttggagaatgaagaatatcagccccattcagggtttaccaatgtctctctgaggtgacaatacattctggttttccaggacagtcctggcttaggtctgctgtccttctataaatattaacaatgatccctcttatttccaaacgtgtcccagtttagacaacaaattatacagtgtctgcccccaacacacacacacacaccccaccatctttatgggttgttgttgttttcttgttgtttttaattttgtagaattggctttgtcttctccaaagcagataacagcttaaactaaagagcctagctacttctttctgactgagcagggtcatagtaaacagagaagaatggatcacttcctcctctgaaatctccatcaatccactttctgtccaactatctctctacccagcctatttttggtcctagttttcctctcataacccctgggctgtgagtcctgagttctgccttcatatggcagagcaagctagtcattattatgccaggttaggtggtggggcaagacaaaagatagctcttggggacacttgcttggtctgtagagatccacagggcactagtagggtattagagcatttattggtttctttcttccttgagttgagttacttctatcccaaaacagacaggtcttacgttaaccttcaccttaaaaaggatattgccttttttccttctgcttcacaaatttgctccaacactaattcccttgcatttgatttcatcattatgattgttcatcaaccattcttcacgaaaaatcctcacatcatgtcatataaaggttttattatttttaatggaaaataacattgagagattattttcctttttcataaaatttccctttttccctccctctattctctttactaacattggaaattaaacaagttttacaggctctattgttattaaccctcaaatctattcttcagagaatatatgatcagcctgtgtttactatgcacctactcttataccagaaactgtgaatacaaatacatatatttcctacttctctctttaattggggcacacagtcccatggtccattctgcatttttcaaaattgaatataattgcaacacctgataggttttgccacttagaattctgaaaataaatcaactctgttctaaaccttaagtttccactattattgccaaactctggactgatacaataagccttttaaaaggtgaatttaacacttcacctattatggttatttaagtaaaatgagttttcaaatatttcccccaggagaaatataaaggactatgcaaaaatagaaggagaaaaaggttagttagaggtccagaaggagaattaaaacatggaattgataaattcacctactgatttatgatgttaatgagcaggtacctatacattttatttacttgaaaacattttggccattaactatttctgttttctaaatacatttgtgtttataaaattttaaaatctatatcacaagccttagacatgcctttctttgcaataaagtatatatacctttttacaaatgtaaattttattttgaaacttggcattttctttataattcctaagatatctttgggcacacagactacagataaatctatttaaatcaattcatcattatcactggtttaaatatttaatgtaaccattggaatttttattcttattccttcagagaatcctccttttcttctatgtttctgactgcaatacagcccgatattgttattccctatatcttaatgaaaagcaagctgtcagcaaaatgcatttatagtttccagatgtttaacaatctctttcttcttttcttttttgttattatttttatttatgtgaagttagttagctgaggtaccaaaaaagagacaaagacagtattaaaaagtgtgcataaagcacttatttttgtactttagtacaatgttttatagaactttgtgatctatctaaatatattaagtaaaattacaccattcacttgttgggaaaataatctttggtttggaagatattaacataatgggcatcttagaatcataaatcacatgaaatgagagacaatgcaatattgtataattcctggatgatgcaattgttttaattgaattttcaagtgccattataaagttttaaaaattatcaa

SEQ ID NO: 733344 - DNA, 2487 bp, Homo sapiens
atatgtaggctcatttgtgggagattgcaaactttatgtgcccccagttctccttggttttgtaggaaagctaaaagaaaaccttgtactctcactaataatgaaattcatagccaatttagaaagggaaaataacctgaaaaccaaaatacctcattcatctgaagatgcctggaataaaatatggaattcttctgtacctacctcccccttacagacttttctcctattttgagagagaaattcaagaagaagaatacagcttgttctctttccacaaatgatactttgtctaagggaataggagataccaagaaacagtatctttaaaaaagtaagctgcccacaggccttcttggagaatgaagaatatcagccccattcagggtttaccaatgtctctctgaggtgacaatacattctggttttccaggacagtcctggcttaggtctgctgtccttctataaatattaacaatgatccctcttatttccaaacgtgtcccagtttagacaacaaattatacagtgtctgcccccaacacacacacacacaccccaccatctttatgggttgttgttgttttcttgttgtttttaattttgtagaattggctttgtcttctccaaagcagataacagcttaaactaaagagcctagctacttctttctgactgagcagggtcatagtaaacagagaagaatggatcacttcctcctctgaaatctccatcaatccactttctgtccaactatctctctacccagcctatttttggtcctagttttcctctcataacccctgggctgtgagtcctgagttctgccttcatatggcagagcaagctagtcattattatgccaggttaggtggtggggcaagacaaaagatagctcttggggacacttgcttggtctgtagagatccacagggcactagtagggtattagagcatttattggtttctttcttccttgagttgagttacttctatccccttctgcttcacaaatttgctccaacactaattcccttgcatttgatttcatcattatgattgttcatcaaccattcttcacgaaaaatcctcacatcatgtcatataaaggttttattatttttaatggaaaataacattgagagattattttcctttttcataaaatttccctttttccctccctctattctctttactaacattggaaattaaacaagttttacaggctctattgttattaaccctcaaatctattcttcagagaatatatgatcagcctgtgtttactatgcacctactcttataccagaaactgtgaatacaaatacatatatttcctacttctctctttaattggggcacacagtcccatggtccattctgcatttttcaaaattgaatataattgcaacacctgataggttttgccacttagaattctgaaaataaatcaactctgttctaaaccttaagtttccactattattgccaaactctggactgatacaataagccttttaaaaggtgaatttaacacttcacctattatggttatttaagtaaaatgagttttcaaatatttcccccaggagaaatataaaggactatgcaaaaatagaaggagaaaaaggttagttagaggtccagaaggagaattaaaacatggaattgataaattcacctactgatttatgatgttaatgagcaggtacctatacattttatttacttgaaaacattttggccattaactatttctgttttctaaatacatttgtgtttataaaattttaaaatctatatcacaagccttagacatgcctttctttgcaataaagtatatatacctttttacaaatgtaaattttattttgaaacttggcattttctttataattcctaagatatctttgggcacacagactacagataaatctatttaaatcaattcatcattatcactggtttaaatatttaatgtaaccattggaatttttattcttattccttcagagaatcctccttttcttctatgtttctgactgcaatacagcccgatattgttattccctatatcttaatgaaaagcaagctgtcagcaaaatgcatttatagtttccagatgtttaacaatctctttcttcttttcttttttgttattatttttatttatgtgaagttagttagctgaggtaccaaaaaagagacaaagacagtattaaaaagtgtgcataaagcacttatttttgtactttagtacaatgttttatagaactttgtgatctatctaaatatattaagtaaaattacaccattcacttgttgggaaaataatctttggtttggaagatattaacataatgggcatcttagaatcataaatcacatgaaatgagagacaatgcaatattgtataattcctggatgatgcaattgttttaattgaattttcaagtgccattataaagttttaaaaattatcaa

SEQ ID NO: 733345 - DNA, 818 bp, Homo sapiens
cagaaacaatataaaaagctttcagaaaagataaaaatattgtatttctctagtctgttcactctccagtgtctctggttctttcatatcatcttcctttcctcaaatcttttaatactccctccctcatcatttccaactagtgaccctactttctatttcattaagaaaacagatacattcagaagagaactgccagtttaaagaacatttacaaagccatcacccatgtaataaccagccagagcaagaaatagagccctttaataacctactcttctccccccaccactgatgacaccgctccctccatcttaggtgtagcccccatgctgacttttgtaataataatttctttgcttttgtttataagttttcttccttataagcatctctaaacaacagttttgttttacagatgttcaaacattaaatgctttttagacttggaattgtgactatcttgtttcactccacattgcttgtgagactcattgatattgcagatagctgtagttgatccatttttattgttgtacagtttaccattgtataaatataccatgatttattcatgataactttgaggaacattctggttgtttgcaggttttatttttacagttcattagttttattgatgtataataattgtatatgtttatggggtatatgtgatattttgatacatgtgtacaatgtgtaatgattaaatcaaggtaattgggatatccatcagctcaaacatttatcatttctttgcattgggaacattccaaatcttctcttctagctattttgaaatacacaataaattg

SEQ ID NO: 733346 - DNA, 570 bp, Homo sapiens
  misc_feature (545)..(545): n is a, c, g, or t
  misc_feature (558)..(558): n is a, c, g, or t
tggagctcgcgcgcctgcgaggcacaggccagcccagctccacgaggactgaacaaggtgctgtctcactgccaccatgccggaagtcgagagaaaacccaagatcactgcctcccgcaaactcttgctgaagagcctgatgctggccaaggcaaggaatgctgggagcaggagcacgaggagcgcgaggcttgagaaggtgcgctacctgtgcagagcgcatccccacgctgcagacccgtggcctgtccctcaagtgcccttgcaaggaccttgtgcccgggagcttgcacgccaaaggtggaaggttgggtggattgaaggaagcgattaccgacatttgaaggcccaaattgcctccaacaaacacccagggaagatttaaggaccttgaagcttgaaaggtgaatggaccttccgttgggaagttcaagcgcccgcccctgcgttcgagtccgtgtctcggctgacgccatgctccgggccctgctggggtccaaagcacaaaggtgtccatggatctgcggggcaacctcaagtctgtnaagaaggaagacncagagaaggagc

SEQ ID NO: 733347 - DNA, 404 bp, Homo sapiens
  misc_feature (290)..(290): n is a, c, g, or t
  misc_feature (294)..(294): n is a, c, g, or t
  misc_feature (300)..(300): n is a, c, g, or t
ccacacctctgcagagagaatggccagcaggaaggcggggacccggggcaaggtggcagccaccaagcaggcccaacgtggttcttccaacgtcttttccatgtttgaacaagcccagatacaggagttcaaagagccttcagctgtatcgaccagaatcgtgatggcatcatctgcaaggcagacctgagggagacctactcccagctggggaaggtgagtgtcccagaggaggagctggacgccatgctgcaagagggcaagggcccatcaacttcaccgtcttcctnacgntctttngggagagctaattggacagaccccggggagccatcctgagtgccttccgcatgtttgacccagccgcaaaggggtgtgacaaggatgagttcaagcagcttctc

SEQ ID NO: 733348 - DNA, 344 bp, Homo sapiens
  misc_feature (221)..(221): n is a, c, g, or t
  misc_feature (265)..(265): n is a, c, g, or t
  misc_feature (277)..(277): n is a, c, g, or t
ccacacctctgcagagagaatggccagcaggaaggcggggacccggggcaaggtggcagccaccaagcaggcccaacgtggttcttccaacgtcttttccatgtttgaacaagcccagatacaggagttcaaagagccttcagctgtatcgaccagaatcgtgatggcatcatctgcaaggcagacctgagggagacctactcccagctgggaaggtagtntccagagagagctggacgcatgctgcagagcagggccatcactnacgtctctagtnttggagagctcatggacagccgagagcatctagtcctcgatttcaccagcgcaagggtgtacagata

SEQ ID NO: 733349 - DNA, 382 bp, Homo sapiens
  misc_feature (146)..(146): n is a, c, g, or t
  misc_feature (259)..(259): n is a, c, g, or t
  misc_feature (303)..(303): n is a, c, g, or t
  misc_feature (315)..(315): n is a, c, g, or t
ccacacctctgcagagagaatggccagcaggaaggcggggacccggggcaaggtggcagccaccaagcaggcccaacgtggttcttccaacgtcttttccatgtttgaacaagcccagatacaggagttcaaagaagctggggctnctcccacctaaggccccattccacaaggccttcagctgtatcgaccagaatcgtgatggcatcatctgcaaggcagacctgagggagacctactcccagctgggaaggtagtntccagagagagctggacgcatgctgcagagcagggccatcactnacgtctctagtnttggagagctcatggacagccgagagcatctagtcctcgatttcaccagcgcaagggtgtacagata

SEQ ID NO: 733350 - DNA, 292 bp, Homo sapiens
ccacacctctgcagagagaatggccagcaggaaggcggggacccggggcaaggtggcagccaccaagcaggcccaacgtggttcttccaacgtcttttccatgtttgaacaagcccagatacaggagttcaaagagccttcagctgtatcgaccagaatcgtgatggcatcatctgcaaggcagacctgagggagacctactcccagcttggtgcgtgcaccaccttccaccctgcgcacttgggtacctactctgagcttcttgcggtggagttgcttgggacaagacctg

SEQ ID NO: 733351 - DNA, 362 bp, Homo sapiens
  misc_feature (146)..(146): n is a, c, g, or t
ccacacctctgcagagagaatggccagcaggaaggcggggacccggggcaaggtggcagccaccaagcaggcccaacgtggttcttccaacgtcttttccatgtttgaacaagcccagatacaggagttcaaagaagctggggctnctcccacctaaggccccattccacaagagctgggcgtgctccaccttaaggcccctatcccaaaggcctttagttgtattgccagattgtgatgcatatatctaggagacttaggagacttatctcagttgggaggtagtcttagagagcagttgaggatgcttaagagcaagccccatattcaagttcctagttttgggaaagttatgcaacccg

SEQ ID NO: 733352 - DNA, 471 bp, Homo sapiens
  misc_feature (175)..(175): n is a, c, g, or t
  misc_feature (357)..(357): n is a, c, g, or t
  misc_feature (361)..(361): n is a, c, g, or t
  misc_feature (367)..(367): n is a, c, g, or t
ccacacctctgcagagagaatggccagcaggaaggcggggacccggggcaaggtggcagccaccaagcaggcccaacgtggttcttccaacgtcttttccatgtttgaacaagcccagatacaggagttcaaagaggtctctccccacctcccaccttccctagagctggggctnctcccacctaaggccccattccacaaggccttcagctgtatcgaccagaatcgtgatggcatcatctgcaaggcagacctgagggagacctactcccagctggggaaggtgagtgtcccagaggaggagctggacgccatgctgcaagagggcaagggcccatcaacttcaccgtcttcctnacgntctttngggagagctaattggacagaccccggggagccatcctgagtgccttccgcatgtttgacccagccgcaaaggggtgtgacaaggatgagttcaagcagcttctc

SEQ ID NO: 733353 - DNA, 760 bp, Homo sapiens; identical to SEQ ID NO: 613039

SEQ ID NO: 733354 - DNA, 823 bp, Homo sapiens
gtaacttgttcaagttgagtgattgaataaattaatgaatgtctgacagctagtgtggtcttggtcacaatcagctcttctggttccctagctggaaccctgagccctccagaactgattcactgctaataaatatcaattactctacagataaaggaagtggatttggactgagggtgcctggaggactctgagaaagggctctgacaaatgaacttccccaaagcaaaccctctttcccgtctgtgttaaagttggtgaagataaagatggttttctagatagtggctctggggacacactgaagactccatctcaaaaaacaaacatggtggctcacgcctgtagtcccagcgctttgggaggccgaggcgggtggatcacctgaggtcgggagttcgggaccggcctggccgggatgtttacaccccgccactcctgagcaccgcacaccggcttcctcccagtccctcatctgagaactcatgaagccacttggaatccctctctgctttgcctggctcattccatgtcaatttcagatcttcacttcaggtcagctccaaggaggctatccttgcccatcttcctaaaatagagctctcaaaacctggctgttttccttcagagcactggcctccaatttaaatcccaagtaaggtacctgccgtcggcagatttgagctttcttcttggacacctaatacccagagtcctccaggctccggtagattgcaaatgacctgctttctttctgttcccgggcggcatcggacccgtcggagagtaaatcccagtaaggtacctgcccgtggcagatttg

SEQ ID NO: 733355 - DNA, 1024 bp, Homo sapiens
tgaatctgaaggatgccttcatctgtattcccctgagtccagagtcccatgaagtgtttgcctttgaataggaagactctgacactaaagctaaatgatagtattgctggatgatgctccatcaaggcttcaaaaactcactaaccgtccgggggaaatacatgctaaggagttttgggacctccaattgaaaaatgagactttgcttatatatgttgatggcatattagaagccagcacaactatggcaaattgaccagaatattatactggctttacattttttttttgtctggatggggatccaaagtatccaagaaaaaaatcacaaatattgaaaaactcaattatatattttaggtttgaattttctcaggagcagagtaatctgctttcggactggagagaagctcttgtcagggtggccagactcaggacatggcagcagctgtgaggggtttttaggtatggctgaatgttgccatatttcattttcttattttgggcttatagcaaaatgtctctatgaagccctaagaccagacacttgacttctagaatggacaaggaatgtcaaaaggcctttctaaccattaagtaaaaattactaatggatctggctactgagaccccctgaactaagaaagccatttgatttgttcatacatgagagagaagggatgggtttaggagtagtaacccaagacttggggaatatcatgaggcctgtagcctacttttcaaaacagctggacattgttatgatgggttggacttcttatctctgaccactggcaccacttgtgatcttctccaggaggcagaagagttcactttgggttaacctagcactgtacacaccccacactgtgtatgctatttgttggaacagaagtggagctactgacttacctctagaagactgaataggtatcaggtcatcctcctggataatcctagtgttactttgagagctgtttctgctttaaatcctgctaaataaacctatacatgattgcatata

SEQ ID NO: 733356 - DNA, 838 bp, Homo sapiens
aggaacgagcatttgtcccttttgtccttctgccatttgaggaagcaacaagaaggcccttaccagatgctggtgccttgatcttcaacttcccagccttcagaactgttgcgttcccccagtagacagacactgagatggaaatttgcataccgaaggtggattgaggattgtttatctgaaaaaaacatctatggtggagtaagaaaaatcacgactgggctatggagaaagctgaactgggatgcagaacagaagcttcagcctcactcgtggggagctctggcgctaaaaaaactcatcgaagatttcccaaattggaacaaggcctctgtactcctgcattgaccagtcatggaaagcaacagtgtgttcagcaagctggaactaaactgttcctgaatggagagttcccatcctgcctcagtggaatcaaagaaaagagaaaggctccaaaatgaacacaatgcgtgttatttgctaccataaactgtgcaactggtttctactgctgtgttgcaattgaatagtaatcaggagaagttacacgttgttcttagaaataatacaacgaatcctgtcaatcttaagtcctgacactgaatttaacgctctctgtttagtcctaccatcaaggatgatttgcaggtgaagaattcttgatagtcagatgcagactacgtcttcagatcctatggcctaaggttattaaggtgggagaagcaaaacaaatgcggttctcatccagtaataatggatttacaagaatttgaaacaaaactttccttccagctactgctttcatgtcagagaaataaaatacatgtacaagatttaa

SEQ ID NO: 733357 - DNA, 1375 bp, Homo sapiens
  misc_feature (472)..(472): n is a, c, g, or t
aatgaaatgctttgctacactggatccttttcaacttagcacttacaaatataggtagcttttgcaacactaaactgcattctaataaacagcattcagctaaatgacatgttagttacccccttcctcttccccagttgatgcctcctaagagccgactgctattcttgagaacaaattcctggatactggcattagtgacaaagaagtgtcaggacagtttgccaagaatgttgtttcttcttgtacaacacaaagcaaggaaacctctgtattttatggctttgaggttttaaaaaatgttctgcagtttgattgatatggcttttaaattcagtgaatcactttcatgaatactgaagtaggtataatcttcagaactagtaatcattatagttacagataggattccatcgcatgtcctgctcaaatgaagacctgttctcattaatcaatactgcatgaaaatatnactggctcacactaaaattaggagcatcaggtgtccagagttttcctgttggggttcagatataaaatctaagtttctattgaggttaataagctggaagcatttgtttcctttaagccttggagaggtcattttcttactcattgatagcttatgtctactgaatgcaatattcttttctgttcagggattttggctgcattatgatttggttatgacataactcagttaaggaatatatttactaatttccaatgtagtctatgaggttcatttaatgtttttaaattttctatgtgtgtggctagaaggcatttgtagatatgcaaatatttgttataatcctgatcccttttataatttgagttattttcttgccctgggggtttacaaggacacgagtgcaacactctttatatggagaagacaggaaatagaccttgagctctaaacctttgcctgaccccctcttctgtgggcctgtgtttctggacaatggggaggtttacagccagtatgagcagagcagactgggagcacctcaatcctcatgcttatattagaaaatgccttagcaatgttgatgggctccttgtagcactggagcatggggagggaacaagctcactgatgtcatttatgcctattgtcttcagtaacttagaacttattatggtatattaaatcaataaaatgttggtgatgaaaaatgtgttttgtaaccataaggctgaaagggacttccaggaatatccaatctatttctctcactttttataaagatttgtctaagcaactactctaaacacatatttattatctccatacttaagaatatctacgggaagcatatttgaaaagcatcattggaaatccacctcaatactagtgataggcctggag

SEQ ID NO: 733358 - DNA, 827 bp, Homo sapiens
gagaattagacatttaataaaaatgccaggtgttccttgtcctcattcttccatatttgtcttatatatgtttagcaaaataattgagttaaatatgagcttttatgcttaagcgatggctgtgttttcgctcttaataaaattgcaccataaaatttgatttttagtgccaaaattataaaaaggggttgggcttgtttcctcaacctgaacaacttcttaccttcaagatggatgattcaaagaggaataatagggaatttcttagtatgaagttacttggttgttttcttaggaaaacaaaaggtagaatttaacagcatggggcctgatttaaatagaaaataaatgtacagatataatcaactctgctgtcatggggatttcaagttataaatgcaataagtaacatcccctgacttattctatgtacttttgccctaatctactacctattagtctgaaacttgagtttttaaatttaatctctatgtaaaagaggaataaattgaatgcataattaaaatatatgttgtcaattatcacacctttttgcctagactataagcttcatttttcctgttatatccactaaattaatttatgcttgtttttccattaaaacaagttactttggctgggtgcagtgactcccgcctgtaatcctagcactttgggaggctgaggtgggcagatcatgaggtcaggagttcgagaccagcctgtccaacatggtgaaaacctgtctctactaaaaatacaaaaattagccgggcatggtggccggcacctgtagtcccagttgcttgggaggctgaggcaggaga

SEQ ID NO: 733359 - DNA, 1267 bp, Homo sapiens
gctggtaaaaagttggaatagctttcgttaagcgtcggatgtgtagagtgctgagttaggggctggactagagacgttgggacatctcccgggaacagcagcctggaggggaaaaatctcctgacctaagtggtcattcggccttggcgcttggacacgggagtgcggcgacagccatatgtccatccatcttggcacttttccgtcctctgcctttgaagatgggtgtgcccggcaggctgtgaaagataaacattagagggttgtttagaagacttttttgacctgagcccatgaggtgcataccctttgtttggcggagaaaccagtggcttctgaagatcagggacgggccacaagtgcgaggcattgcagacatttcgaacccagacttccagcctggagacatccacacgcttccagtttcttgcactggtacttcattctgtcattatgattgccaccactcgtaactgagagttgcgtgccctcaagttttgagtgtctgcagggtacctttgagctttcttagctgtgtagtgagtggggggaatggagaaaatgaaggacagatgactgatttgtagtttttcatttggacactgtccttgccgcacaagcacagcagcttgaacctctttgaacaagagtcgagagttcttttacagctaattacccactagttaaacttgatcatactgtgctgttttcttcctctccattgtcaatgtaatacggctcctgacaaaagttaaattcgctgggcgtggtggctcacccctgtactcccagcactttgggggctgaggcgggtggatcacctgaagtcaggaattcaagaccagcctggccaacatggtgaaaccccgtctctactaaaaatacaaaagttagctgcgtgtggtggcgggcgcctgtaatcccagctactcaggaggctgaggcaggagaatcgtttgaacccgggggggcggaggttgcagtgagctgagatcgcgccactgcacttcagcctgggtgacagagtgaaactccgtctcaaaaaaaaaaaaaaaagccgggcgctgtggctcacacctataatcccagcactttgggaagccgaggggggaggatctcgaggtcaggagttggagaccagcctgaccaacatggagaaacctcgtctctactaaaaatacaaaattagccaggcgtggtggtgggcacctgtaatcccagctactggggaggccgaggcaggagaatcctttgatcccgggaagca

SEQ ID NO: 733360 - DNA, 984 bp, Homo sapiens
gctggtaaaaagttggaatagctttcgttaagcgtcggatgtgtagagtgctgagttaggggctggactagagacgttgggacatctcccgggaacagcagcctggaggggaaaaatctcctgacctaagtggtcattcggccttggcgcttggacacgggagtgcggcgacagccatatgtccatccatcttggcacttttccgtcctctgcctttgaagatgggtgtgcccggcaggctgtgaaagataaacattagagggttgtttagaagacttttttgacctgagcccatgaggtgcataccctttgtttggcggagaaaccagtggcttctgaagatcagggacgggccacaagtgcgaggcattgcagacatttcgaacccagacttccagcctggagacatccacacgcttccagtttcttgcactgtaaatcctgctgctgctcactctttgggtctgcactgcctttatgagctgtaacactcaccggaaggtctgcagcttcactcctgaagccagcgagaccatgaacccaccgggagaagagaacagtgctgtctttatgagctgtaacactgtaacactcactgcaaaggtcgaaggtctgcggcttcactcctgaagtcagcgagaacatgaacccaccagaaggaagaaactccggatacacctgaacatcagaaagaataaactccggacacaccatctttaaaaactgtaacactcaccgcgagggtccgtggcttcattcttgaagtcaacgagaccaagaacccaccggaaggaacaaatttcggacacaataggaaatctctaaggtggaatactatatcaaaagagagaagccaaaatgatatcatacgctgaaaatgttaatggaattccacaaccttgcctattaaaaactccacagtttgagcacagcatggaatcaaaatttaaaaaataaacatgacatagtatttttatcatttga

SEQ ID NO: 733361 - DNA, 1119 bp, Homo sapiens
  misc_feature (13)..(13): n is a, c, g, or t
  misc_feature (57)..(57): n is a, c, g, or t
  misc_feature (64)..(64): n is a, c, g, or t
  misc_feature (79)..(79): n is a, c, g, or t
  misc_feature (121)..(121): n is a, c, g, or t
  misc_feature (155)..(155): n is a, c, g, or t
atacaactcaagnatgagacaagtcggcaaggtgtgaagacggaagccactggcagngtctgcncccgtcccgtgcggnggccatgcggcgtgctgcgtcggcttgggacggacgagcgcnctcagatccgcgcagactctcgctggctccgcgnagcccagtggcctgggcgcccccgcgcgcgggttaagagcaggggagccgggcagaagaggaaggagcccggccgccgcccaacaccgccccccgccccacgccccgggagacccggcccgagcgccgcgggcaccgccctgaacctcttcgaggccccgctgcgggcgtccagagctggggactgtgggtctgactcctgcgttccagccgtgggtgccacctcttgcgggaagcagggcaaaaccactttggtcaggcgctcctcgtgcctttctcccttcgtaggtgaccagcatctcgtaagaatgataaccatcagtaaccgggaccccaaaccttctcatcaaggcacctctcgggtcaccattactttaactttgaatttgggtctccttcatttttccgctggatgcgttaatgtgcgcgacccacagctccaggcggcggtttcctggcggaactggaccaccgccacaggctgggggtctgcagtgggggatgggaccggccgcggccgccggccccttccgcgtccactgagccggcgctggttcggcgctgggatcctgcaccgggcctctctgcttggtgctgcgcgtctgcctgagagtaggaggttgctcccagctgtgccggccccagcagaaggctgctggtggtggtgctggggcaggtcggccttgaatccatgcgacaggaagggacgttaccagaagagattcatcgctttctcttggtctgggcagcccgggccttttgagggtgggaccgctgctacccccacccccaggttctttgcctgcctgttgactgccggtgtttcatgttttgtttctctgtttcactattttttattttttgccttaaaaaaaaaagtattaccatgcagcagttgcccatttattttaatttactattaatagtgtgattgctgtgtttcctcctacaaacactgaagcctg

SEQ ID NO: 733362 - DNA, 922 bp, Homo sapiens
gttgaggctgagggaggtcacttggccttcgcgacacgtgaggcgcttatcaggagttctcagtaggaagcgctttcctgcagcctcaggcagagaccgtgcgtgcaaggcgggaccgaccgcaggtgcagaggccccgggcctgcccaagatcgaattggtcgcaaatacgttccctcgccagaaactttaaaaggccagaagaaaataaaccggattcagctccctctcatctccaaatctcggtgaccagcatctcgtaagaatgataaccatcagtaaccgggaccccaaaccttctcatcaaggcacctctcgggtcaccattactttaactttgaatttgggtctccttcatttttccgctggatgcgttaatgtgcgcgacccacagctccaggcggcggtttcctggcggaactggaccaccgccacaggctgggggtctgcagtgggggatgggaccggccgcggccgccggccccttccgcgtccactgagccggcgctggttcggcgctgggatcctgcaccgggcctctctgcttggtgctgcgcgtctgcctgagagtaggaggttgctcccagctgtgccggccccagcagaaggctgctggtggtggtgctggggcaggtcggccttgaatccatgcgacaggaagggacgttaccagaagagattcatcgctttctcttggtctgggcagcccgggccttttgagggtgggaccgctgctacccccacccccaggttctttgcctgcctgttgactgccggtgtttcatgttttgtttctctgtttcactattttttattttttgccttaaaaaaaaaagtattaccatgcagcagttgcccatttattttaatttactattaatagtgtgattgctgtgtttcctcctacaaacactgaagcctg

SEQ ID NO: 733363 - DNA, 4135 bp, Homo sapiens
  misc_feature (1003)..(1003): n is a, c, g, or t
  misc_feature (1745)..(1745): n is a, c, g, or t
ctaataaaaatagtttattattttgaatgatttaatggttttctacacaatttacatcacaacatgtaaattttagcagtaacatctgattctaacagcacatcatgctattcctttcatagagccttcagagattcaatgctaaacaaatttccttagttggcatcaaggcactgatcactttagaggcttttaagaaattatttaaagatgcaaatgcctctgagtgaagtgtactatcccatcactgaagcccacaggaacaagtcctacaattttaaaaaggctcgatggaaaaatttctcaatcctgaaatcccctagggaaggggtcaggagaaagtgccatggttgatatttaagaactccacagctcttaaaaataagcacttatccctaacatgcaatactgcagatgcaagttaaacttatctgttaacagctgcctgctgttttctgctcccagatgaaatgaagcaactcttctgataacgaagagatacctgtctgaggcaaacgaaacattggcacacagcacagcctcctcaatccacttgatcccaactcatctctcatttatttcggcttcttttattccaggattaatgtagtgtaacattttcatttcttttcgcttttattctgcttttgtaaaagcagtattttgagatggacattgcctcttcattgtatttctcatcaattcattatttttgtggttatagcttgacaagcaattaactttaaaatggtagattccgtaactttaaattggtagctttcatttgcttaaaattttttggcatatgcagataatgttctcatcagtagtaagaatctcagggttatgcttattccccaatggaggtatgacatataatcttttctgcctttacttatcaattcaccaaggagctgttttctctgcatctaggccatcatactgccaggctggttatgactcagaagatgttatctgaaaaaagtctatagaaaaaaaaaangtttcccctccctcatcaacaaaagcccaccctctaagagacattcaagctgaactatcacaattcttaatcagttacaatttacaaacagataagtttaaaataaacaatttacaaaatttttgaagcataccttaacatcttgttttgcagttaaacaatggaaaagtatttctcctacactaaaaaaaaacttgcttacacacaactgaaaatagaatcttacttgataatacaaaagctaccatcagaagaaatcccttcaggatcattaagccacttcctttgctctgcagtttctatagtagttttaaattattattaaatcacctgaaaaaaattccaaaagagaaccacacactaccatatccaaacaacttttgcatttcccataattgtagttaatgtcagcccagtaggccagaccaacccccagttcaatactttccttccccaaaagctctatactttgaaggaaaacagatacagtatcaaattatgacactttccttgcccaaattaatgcactggtacacccagtggctcatatttaacttcccccagcttcccaattcaaactggggggaaaaaaactaaatcattgggagttacttgccaacttggaagttgatatttctttactttttccattctaagactttaagttctctggcatgagtttatctgcaatcataaactaaacaattacctaaacccaccccaccaatcccaaccgtaacangccactgccaactaattgccaatatttgcccctcccctttaataaaacttttaagaagtcacattattggaaaacttaacttcaacatttggcctactcaagctcttctgaagttctcctgagatgactgaatatgaaccaaagctgcactgtgctgtacttttcagcttcaactgggaatactcttccaaggataaaagcagctccagtccctgaaggtgttcgtgccaacagcacagcggtacactccttctctaacccagtttgtcaatagtactatagcatctgtggaaaatcttagaaaaaaacattttctcccccaccctctctcttccctgttaagaccatcccaaaatgcttcaagtaaaaaataacaagtttaaggggttaagcacttttaaagtctgattaagggggtggggggaaaaaagagtaactaccagccatttctccaatggacatctcttccacagacctcaacgtgagaactgctctagtttctataaactgtaaacctgtggtggtctgattatcctgatattggattttcttgttttctgttacaccttgagtcatttgcctttaggattctagacagacctaagggaaaaagaactgaaaacatattttgcccccacccccacaaaaaaaaatactgaaaactcccccccgcctcagttacacatccaaactctacatttacaaaacgaattcagggtgaggaagtaaaaacaggtcatctattcacaaaactgaaatacttcattaccccaactaaacatacaaactgcttacagatttgctgaaattgtctcaatttggctatcaaattcatttggttttcctcaaattcgtgtaaaaaaaaaaaacccacaaacttgccatctactatttctccaggacttggcagtctgccctcaaaagcttcagacaagattcatgagtataagcctgaaaaagagaaacctacaacacccggaaatcggcctacgtccccatataaatccctttacacctcagtacgaaactcccccattatattagaaaataaataaaaggttaccataagtaagttccagaaaaacaacatatgccgacctcacggatttttaccaaccactcgctttccctgtggccttggcacactggcatgctggtctaggatcctctacgcacaacgcctgctcgcctcctccgtgtggttgccaagccaagccgcctgctaccttcatcaccaaattgcactcgctccttcctggaatcctttttcctagcttcaccaccaaatcgttagcgctccttccttcttcctagcttccttcaccaaatcgcactggctcctggactcttttcctatcttcaccacgaactgctgcttgctcgcttgctcctcagtcctagcttcatcaaacactggttcctggaatcctgtctgctgctgtcttcctagattcactgaatccacttctgtgtagcacctgggtcagctgtcaattaatgctagtcctcaggatttaaaaaataatcttaactcaaagtccaatgcaaaaacattaagttggtaattactcttgatcttgaattacttccgttacgaaagtccttcacatttttcaaactaagctactatatttaaggccttccaaattcttctaactcttccaaaagccttctgccttagttttttttaaattacaccagtccttttagtagctttttgatgtgatttttaaccaacttccccttctagcttcaagtattcttctaaattggttctggtctacgtaaacaccctcatcttctcaagctttaccttctaacttctgcaccaccagaaattaaattgatgggcttttaaaataaattggttaccaataatttcctcattttttcagtgctattttatccaatttttggctttatatttttctatcttctatacttctccaatacttgtcttagcttgtttttcattttctatctgaaactcttgacaatattttcattttctatcttgtttctatcttccaattttcttctaagtttgtacattttgcccttagctttttgtttcctagcttgtcttttttcttctgcttcctacttttcaggtttaaatttatcttttttcttctaaaagtatgtttttatcttctaatttccctatcttctctattcttttcttcgccttcccgtacttctgtcttccagttttccacttcaaacttctatcttctccaaattgtttcatcctaccactcccaattaatctttccattttcgtctgcgtttagtaaatgcgttaactaggctttaaatgacgcaattctccctgcgtcatggatttcaaggtcttttaatcaccttcggtttaatctctttttaaaaga

SEQ ID NO: 733364 - DNA, 3468 bp, Homo sapiens; identical to SEQ ID NO: 27295
  misc_feature (69)..(69): n is a, c, g, or t
  misc_feature (854)..(854): n is a, c, g, or t
  misc_feature (1302)..(1302): n is a, c, g, or t

SEQ ID NO: 733365 - DNA, 3331 bp, Homo sapiens; identical to SEQ ID NO: 27296
  misc_feature (69)..(69): n is a, c, g, or t
  misc_feature (717)..(717): n is a, c, g, or t
  misc_feature (1165)..(1165): n is a, c, g, or t

SEQ ID NO: 733366 - DNA, 2512 bp, Homo sapiens; identical to SEQ ID NO: 29678

SEQ ID NO: 733367 - DNA, 2088 bp, Homo sapiens; identical to SEQ ID NO: 29679

SEQ ID NO: 733368 - DNA, 398 bp, Homo sapiens
  misc_feature (2)..(2): n is a, c, g, or t
  misc_feature (17)..(17): n is a, c, g, or t
tntttaatacggactcncctatagggggaattttggccctcggagggccaagaattcgggcacgagaactggacgcaacctaaacacaaatgagggaggtactggcttctgcctcagggcttctgcacatgctctcttcccttgcactgaacactgccctcaccccctgcccacatcttcacggttcttaagttgttgctctaacgccacctcctctgcgaggcccgcccctaaccactctacttaaaaacagcaccagactgggcatggtggctcatgcctgtaatcccagcactttgggaggccaaggcgggcagatcacttgagattagggagttcgagaccagcctgggccaacatgacaaaaccccatctttactaaagatacaaaaaaaaaa

SEQ ID NO: 733369 - DNA, 1033 bp, Homo sapiens
gttgtttcctgacagcaaggacctcgtgaactttgcttcctggtttgcatttgcctttcccaacatgctggtgatgctgctgttcgcctggctgtggctccagtttgtttacatgagattcaattttaaaaagtcctggggctgcgggctagagagcaagaaaaacgagaaggctgccctcaaggtgctgcaggaggagtaccggaagctggggcccttgtccttcgcggagatcaacgtgctgatctgcttcttcctgctggtcatcctgtggttctcccgagaccccggcttcatgcccggctggctgactgttgcctgggtggagggtgagacaaagtatgtctccgatgccactgtggccatctttgtggccaccctgctattcattgtgccttcacagaagcccaagtttaacttccgcagccagactgaggaagaaaggaaaactccattttatccccctcccctgctggattggaaggtaacccaggagaaagtgccctggggcatcgtgctgctactagggggcggatttgctctggctaaaggatccgaggcctcggggctgtccgtgtggatggggaagcagatggagcccttgcacgcagtgcccccggcagccatcaccttgatcttgtccttgctcgttgccgtgttcactgagtgcacaagcaacgtgccaccaccaccttgttcctgcccatctttgcctccatgtctcgctccatcggcctcaatccgctgtacatcatgctgccctgtaccctgagtgcctcctttgccttcatgttgcctgtggccacccctccaaatgccatcgtgttcacctatgggcacctcaaggttgctgacatggtaacacagctgtttttatttactcccgtcggactataacgctgttgtcataagggatgccccatttatgaatgacagagtttcaaaacgatgtcatgtgacttgggaatgccacggaacatccagacctgtagccattgttgacatttataatgcagcttttcttctttttctg

SEQ ID NO: 733370 - DNA, 744 bp, Homo sapiens
cactggaagaaaaatgtttcccaagcaaccagctttattctagctgactcactttgtactccctccttccatgtcattgctcctttttacctctttaggagtctgttaggaattttgcaacctgacaaaaggcttctgcagagccaaccaccttttttttcctcagggcctgaaaaaaaagtgagtcttcctactgacaggaaaataaaaagagaccttgttagtcaatttttttctgtatgttcaattgttctggtatattcttttccttgagtataaagaaaagtctgaaaataatggtaaaagtgtgagattgctctgatatttcctttttgtactttaggaggtggttctttgagttcctagttgtttagttgaacatgaagcaggtggcaaatgtaagtttagtctacacactgattccttcctgttcgcagaagggttcatgtgttcgtttttaaataatcttcgggtaaggaatagagaaacaccaagcccaagaggcagaaggatctgtctatagctaatgagtgagaaactaactgtgggatggtttatggtctctggctctttgaaaccacagaaatttaaagttatttttaaaaagccaacttgactgggcacagtggctcatgcctgtaatcccgaggcaggcggggggccaaggcagacagatttcttgagcccaagagttcaagaacagcctgggcaatatggtgaaaccccatcttctcaaaaaagtta

SEQ ID NO: 733371 - DNA, 503 bp, Homo sapiens
gttgaggttgtgcttcttcaggaagtccttcagcaggccacgctcggacagggtgcgcctcaaggacttctttctgatgagggggaccctgtggtttggagaaggaagaggaattaggcaaggattctgctgaccgggtgctgtggcagccccagaagggaagggaagctggtctaagagaggaagaaggaaggaaaggagacgccccctcttctgcccaacaatgcaaagaagttaagttgactagtgctggagctgggagccaaacccaggctggactcttaaccagctgatctaagagaggaagatggaaggaagggagaagctcccacttctgccccataatgcaaagaagttaagctgactagggctggagctgggaaccacagtcaggctgggcccgagttttaaccatgtctgcagggctgcctcccaaaaaggcagagagagaggcggaaaagggggatggagacagctgaatagagagggagaaaaaagggaag

SEQ ID NO: 733372 - DNA, 2251 bp, Homo sapiens
cgagggggagggcggagctgccggcggcccgggcgggctggcagctagagtgggtgcgatagccgcctccgcctctgcccgcctccgccgtcgcctcctccgcccgggccgttcgctgctgcgcggggagagcgaggcggggccgccggggccgccatggagcccgactcggtgattgaggacaagaccatcgagctcataacacttcagttctggaagatcaagatgaagataagtccccaaagaaaaatactccttggcagataagtaatggaacatcatctgtgatcgtctccagaaagaggccatcagaaggaaactatcaaaaagaaaaagacttgtgtattaaatattttgaccagtggtctgaatcagatcaagtggaatttgtggaacatcttatttcacgaatgtgtcattatcagcatggacatattaactcttacctgaagcccatgttgcagcgggactttattaccgctttaccagagcaaggcttagatcacatagcagaaaacattctttcgtacctggatgccaggtctctgtgtgcagcagagctggtatgtaaagaatggcagcgagtgatctcagaaggaatgctttggaagaagctgattgaacgaatggtacgcactgatcccctatggaaaggactttcagaaagaagagggtgggatcagtacctgtttaaaaacagacccacagatggccctccaaattcattttataggtcattatacccaaagattatccaggatatagagactatagaatctaactggcggtgtggacgacacaacttgcagaggattcagtgccgctctgaaaatagtaaaggtgtctactgtttacagtacgatgatgaaaaaattatcagtggcctacgagataattctattaagatatgggataaaaccagcctggaatgtttgaaagtgttaacaggacacacaggctctgtcctctgtctgcagtatgatgagcgtgtcattgtaactggctcttcagattctacggtgagagtgtgggatgtgaacacgggtgaagttcttaacacattgatccaccacaatgaggctgtattgcacttacgcttcagcaatggactgatggtgacctgttccaaggaccgctccattgctgtgtgggacatggcttctgcgaccgacatcactttacgccgtgtcctggttggccaccgggctgccgtcaatgtagtagactttgacgacaagtacatcgtgtctgcctctggtgacaggaccatcaaagtctggagcacgagcacctgtgaatttgttcgtactctcaatgggcacaagcggggcattgcctgtctccagtacagggatcgcctggttgttagtggatcatcagataataccattaggctctgggatattgaatgtggtgcctgtttaagagtcctagagggacatgaagaattggtccgatgcatccagtttgataacaagaggatggtcagccgggcctatgatgggaaaattaaagtttaggacttgcaagccgctcttgaccctcgagccccagcaagcacattgtgtttgcgcacattggtggaacattctggacatgtgttttgcctacagtttgatgagtttcaaatcgtcagcagctcccatgatgacactattttgatttgtgatttcttaaatgtgcctcccagtgcccagaatgagacccattccccctccagaacatacacttacatctctagataacagtctgcactttcacccgtttccgggttttctagtcttgaactactggctacgtggctaccaatgcctaagggagttcgttcacagctgagttatgaagctggaattggttctagacgctgggtagatgcaaagcagcctaactcttcaagtcccgacatttctcacctctgattccagctctactttgagaaggagaccttagcttcactgacttgaaagtagcacagaagcccgtttccttccctcattagtgaaaaaatctaatgtttcaaatgtaaactgttcatagaaaaggaacatagaatctgttttacagaagtaaatcgaccgtcaagagaagacttggcctctaatttatattgctttgcactttggtttgatattaagaaacagcattcttcttcagtgaaattttgggtgccaaacacctacccagaatgtccagggctttcattttcaaaagttagcattctccttttgaccgtccaagtcattatgaattc

SEQ ID NO: 733373 - DNA, 2291 bp, Homo sapiens
cgagggggagggcggagctgccggcggcccgggcgggctggcagctagagtgggtgcgatagccgcctccgcctctgcccgcctccgccgtcgcctcctccgcccgggccgttcgctgctgcgcggggagagcgaggcggggccgccggggccgccatggagcccgactcggtgattgaggacaagaccatcgagctcatgtgttctgtgccaaggtctttgtggctaggctgcgccaacctggtagagagcatgtgcgcactgagttgcctgcagagcatgcccagtgtcagatgtctccagataagtaatggaacatcatctgtgatcgtctccagaaagaggccatcagaaggaaactatcaaaaagaaaaagacttgtgtattaaatattttgaccagtggtctgaatcagatcaagtggaatttgtggaacatcttatttcacgaatgtgtcattatcagcatggacatattaactcttacctgaagcccatgttgcagcgggactttattaccgctttaccagagcaaggcttagatcacatagcagaaaacattctttcgtacctggatgccaggtctctgtgtgcagcagagctggtatgtaaagaatggcagcgagtgatctcagaaggaatgctttggaagaagctgattgaacgaatggtacgcactgatcccctatggaaaggactttcagaaagaagagggtgggatcagtacctgtttaaaaacagacccacagatggccctccaaattcattttataggtcattatacccaaagattatccaggatatagagactatagaatctaactggcggtgtggacgacacaacttgcagaggattcagtgccgctctgaaaatagtaaaggtgtctactgtttacagtacgatgatgaaaaaattatcagtggcctacgagataattctattaagatatgggataaaaccagcctggaatgtttgaaagtgttaacaggacacacaggctctgtcctctgtctgcagtatgatgagcgtgtcattgtaactggctcttcagattctacggtgagagtgtgggatgtgaacacgggtgaagttcttaacacattgatccaccacaatgaggctgtattgcacttacgcttcagcaatggactgatggtgacctgttccaaggaccgctccattgctgtgtgggacatggcttctgcgaccgacatcactttacgccgtgtcctggttggccaccgggctgccgtcaatgtagtagactttgacgacaagtacatcgtgtctgcctctggtgacaggaccatcaaagtctggagcacgagcacctgtgaatttgttcgtactctcaatgggcacaagcggggcattgcctgtctccagtacagggatcgcctggttgttagtggatcatcagataataccattaggctctgggatattgaatgtggtgcctgtttaagagtcctagagggacatgaagaattggtccgatgcatccagtttgataacaagaggatggtcagccgggcctatgatgggaaaattaaagtttaggacttgcaagccgctcttgaccctcgagccccagcaagcacattgtgtttgcgcacattggtggaacattctggacatgtgttttgcctacagtttgatgagtttcaaatcgtcagcagctcccatgatgacactattttgatttgtgatttcttaaatgtgcctcccagtgcccagaatgagacccattccccctccagaacatacacttacatctctagataacagtctgcactttcacccgtttccgggttttctagtcttgaactactggctacgtggctaccaatgcctaagggagttcgttcacagctgagttatgaagctggaattggttctagacgctgggtagatgcaaagcagcctaactcttcaagtcccgacatttctcacctctgattccagctctactttgagaaggagaccttagcttcactgacttgaaagtagcacagaagcccgtttccttccctcattagtgaaaaaatctaatgtttcaaatgtaaactgttcatagaaaaggaacatagaatctgttttacagaagtaaatcgaccgtcaagagaagacttggcctctaatttatattgctttgcactttggtttgatattaagaaacagcattcttcttcagtgaaattttgggtgccaaacacctacccagaatgtccagggctttcattttcaaaagttagcattctccttttgaccgtccaagtcattatgaattc

SEQ ID NO: 733374 - DNA, 310 bp, Homo sapiens; identical to SEQ ID NO: 34262

SEQ ID NO: 733375 - DNA, 5243 bp, Homo sapiens
gcagttaagtatttgtttaatcttgctttgtcttttcaaacagcgatttagtaatcctgtttgaggctgcagtgtggcaatgctttccagaggatggagtcctttttgtttgttttgaaaaaatagagatggggtttcactatgttgcctaggctggtctcatactcggcctcgagccatcctcctgcctgggcctcccaaagtgttgggattacaggcgtgagccatggtgccagactggagtccttttattaaaattaactgccctgctcagctttctgctgggccaccccagagccaatccttggttcttgggcccaaggctggacccaggggttgcaggaaacagtctgtagcatccaagtggggcctgtcgtacccactccagtgtgtaggtgcagaacgctctttgggggatttctctgctgggccaccttactccagggatccctcagttttcaaaacaaagcaagagggcaaggaagaatggagaaacagctcagtgttgactctcttccccctggtgagtgctgtgctggggcctctgtgcacatcataccacttcccccttgaatcagccccacaaggcagggtgagagatgaggactcagggtgcaaggaggtctcacagcttggaaatggatcaggacagctctgattctccaaggccaaggtcttctctatatcatgaggcagcccaaaaatgtgtttctacacatattctgtgtagaaactcaggccaggctcctatatgctctgggtgacagcgggaaggtgctttccagtgtgtatcagtgtggcccatctgggagtcataatgtcattgcctcttccaaaatatcagcaaagctgaccctagtgcttgtagtgctcaaatgcacctctctgcctttgtgccatagggaaatggatttggtcctgggggtggtgataccaacttctgtctcaattccatgaccctcactcagcacccccaccccaggcctgtgcagaggaggaataaccgtccttgagaaccatccagccctaggtggagaaattagatttatggacttaatcagttcttcttccctgtcagtggtggtgagaatgacatgggggaaattgataagcctcagtcatgttttcctgcgagacaaggcagctttggtagctggtgggactgacgccttcttcacctgtgtcctctgcctctgagtgactataaattgcgaaccccatgaggtggcacctgcagccacagatcgcttaggcaccttgcacagggggccacctaatgaactggctgcaggacggcaatcctgccgtgaagccaggcacctcgggaggggcaaggtggcagaaccgagagagcagatgctccttgctgtttctgtaaggccaccagtggctgggtggcctggccctggtagcaaggtggtaaccgtgtgagtggctgaatcctgcaccacttttcctgagcctccttcctcctggattcctgcaactatattctcactacatggctcaccaccaattcgttctctctgccccaaggaggctggacaagaggctcaggtcagtgcgggtacgcaggaacctatgtctgtaaaatgaaaatgcctgccttcaagggctgtcttgaggttgaaaggagatggtctacatcaagggttaggaagaccacaatgtggctgtgccggccacctccaggctggcttcagtctcccatccccatagtcatacccctgtgaagtcccttcccatactgaatcgggctacctgtgtatcttatagggtgttggaaatgacagattgtgaattccaaggccccataaaagacagcgtgggctgggcgtggtggctcacgcctgtaatcccagcactttgggaggccgagccaagtggatcacttgaggtcaggagttctagaccagcctggccagcatggtgaaaacctatctctactaaaaatacaaaaaaaaaaatttagccaggtgtgttggcacctgtgcctgtagtcccagatacttgggaggctgagccaggagaatcacttgaacctgagaggtggaggtttcagtgagccgagattgtgccactgcactccagctgggtggcagagactctgtctctaaacaaagaaaatgtggtttctgctgtcctttctcttggatcactttctctgggaaaccagccaccatcttgtgaggacactcaagctctctggaaaggttcagaaatgtggtgaggaagtgagacagacctcttgccaaaaaccatgtactaacttatcagtcacgtacatgagttgacttagaaatgactctatcagcctcagccaaaccttcagatgactgcagccctggtcaacatcttgactgtgaccccatggaagaccctgaaacactcagccaagccactctcagcttcctgatccacagaagcagcatgaaataataaatttttcttgttttaaactaagttttgggttaatttgttatacagctgtagataactccaagaataatactccataaatgttgatttcctttctgcggctccactgagtcatctttgttcatgggcaaagctcactgtctctctactggctgcaaaagatgtccatttgttggctctgactcatgcttgtggtcttgttggctcacagcaaggccttttcacagaggatggtggtttgtcacactcagaatccaggtcttacctgctttcctgctccatggaattttgacctgagtttgaaggctgataggggattgatggatgagggagaaagacacagtcagttcttagagcagtagctaatccaggggtttctctggctttgtttgcatgagtagtgatagttggggatgaagcatgggtattcgagatcttttttgtgtgagtatgggaggaaaaattctgttctcttcctcctccatctttattcatctttgtcttccctcggatcagctttaaagacccctgagactctaggactcggtttgcttttttctcaccactgggatccatctcccactagtaggaagaaggatctaagtagttgagctgcataaaggggaagtaaacagccagacaaatgttacattttagagccttgagtgacccagagctttctatcagcttcattgggtgcagggagggtagcgatttctggctgctgtcacctccttgctcatatcaggaagcgctaattttgaggcaaagttcagtgccctctggctcacctagggcccctgttgcctaatttcacgaggccaagagtttgagggtgggttcggggctgcgcagcctggatgccttggtttgcatgcctacagcagctgtgcccgaaagctttttttagagtaaatatgtagcttttgctaggctttttgtgtgccttgttcattcctctatcattttttgtatacctgctatggtgtcaggcactggggatacaaattagccggggactcggacatgtaagcaagtaagcccaacagcagctaacatttatgcagtgctcactgtgtgcttggatgtccagagtgatagagcaggtttagtaagggggacagagggctgagaccagaggcaaggtggagaagggcatttctggaggcagcaatatgagtgcaaaggagacatacacaaggttccctgggggattccaagttgttgctgtcgtggcttcaaatcttactttagggcctactcagatggcatcttgttcatgaagatgtgcctgttttttgttttatttgtccctctccccccaacaaagagtaaactttttttctgaacttctcgaaagtttgctaacatcagctataaaactctctgggcctgggatattttgcggggagcagggaagatctttgattatcattttaacttatttctgttcatttattcaagctttttcttctttcaccaattctcaaaagccccacaccaccctcctgccaaccccacacccctccacttccagtcgctaccttccacccatcattctcacttctaaagccatcaacagaggttttgaacaccactcatgtgccaggtgttgttctaagcacagattcatcagtgagccaaatgaaattccttcctaaaatatgctctttggtggtgctaaatgccaggaagaaaagtaagcaaggggagggaagagagaggtgtggggtggcggggggcgggagcttggataggatggtcagaaaggacctctttgtagaaacttaaataaatttagaaagcaagtcatgtaatatctgggaaagaggaaatagcaggtgcaaagaccctgaggttgaagtgtcctggcaagtttgaggcaagcaaggaaggcagggtggttggaacagaacaagagaagaaacgtggtaggaaatgatggagagtcagggacacgaccttggaggacttgcaggtcatggtaaagacgctggactcgacacgaagtgtgaacagagttcttggaggattctgaggtagagagtagcataatctcatttgtgtttttattctaacatgctcacttgggccaccttgtagaggctagagtgaaaaggagggagactagttagaaattctgtattgctggctgggcgtggtagctcccggcactgtgggaggccaaggccagaggattgcttgagtctagcagtttgagcccagcctaggcaacatagcgagaccctgtctctacaaaaaattttaaaattgcccagggatggtggtgcacacttgtagtcccaactacttgggaggctgaggtgggaggattgcctgagcccaggagtttgaggctccagtgagctgtgattgtgccattgcactccagcctgggtgacagagcgagaccctgtctctaaaaaaaaaagaaaaaaaaagaaattctgtattgcagcagcctaagagagtcattagttaagagatttgtagtaggcattttttagaaagttgcattgagggctaggtacggtggctcatgcctataatcccagcactttgggaggccaaggtgggtagatcatttgaggtcaggagcctggccaacatagcgaaaccccgtctctactaaaaaaattagccgggcggtagtggcatgcgcctgtaatcccagctactcgggaggctgaggcaggagaattgcttgagcctgggaggtggaggttgccagtgagtcgagatcgcgccactgcactccagcagtctgggcgacagagtgagacgctgtttcaaaaaaaaaaaag

SEQ ID NO: 733376 - DNA, 544 bp, Homo sapiens
aatcagcttatacataagcaggacagcctgaaaagctactgtgaaatacagaaataggataaatatcctaacacctctttgaaaaaggcagcatgggatgaagatactttacttctaagaatatttattccttggccttttagagggttttcttttttggtggggagggagcagttggagaggaaagtgtgttgtcgtggctggagaagcaaaatgacagagacatggataaggggggagaccttcgaatgccccagaagtcaatgtaactcctataatatagccctacacagggcctttgctagatgacgactcatcagcaagcttcttaatatctgttactctgtgcccacctactaggaatgatgataggccttctggacaagttaccattgttattaactcaaaagatccagcaatacaatataaaagctcattaatctacaccttgttaactaataatctgtgatgtgttagacaagctggatatgtttacctatatattgctaagggtagacagaggaaaggagaagactaagttagc

SEQ ID NO: 733377 - DNA, 1621 bp, Homo sapiens; identical to SEQ ID NO: 37517

SEQ ID NO: 733378 - DNA, 1685 bp, Homo sapiens
ggaggggtctgtgcacacagcatcgagggcggagagctcttcgagaggattgtggatgaggactaccatctgaccgaggtggacaccatggtgtttgtcaggcagatctgtgacgggatcctcttcatgcacaagatgagggttttgcacctggacctcaagccagagaacatcctgtgtgtcaacaccaccgggcatttggtgaagatcattgactttggcctggcacggaggtataaccccaacgagaagctgaaggtgaactttgggaccccagagttcctgtcacctgaggtggtgaattatgaccaaatctccgataagacagacatgtggagtatgggggtgatcacctacatgctgctgagcggcctctcccccttcctgggagatgatgacacagagaccctaaacaacgttctatctggcaactggtactttgatgaagagacctttgaggccgtatcagacgaggccaaagactttgtctccaacctcatcgtcaaggaccagagggcccggatgaacgctgcccagtgtctcgcccatccctggctcaacaacctggcggagaaagccaaacgctgtaaccgacgccttaagtcccagatcttgcttaagaaatacctcatgaagaggcgctggaagaaaaacttcattgctgtcagcgctgccaaccgcttcaagaagatcagcagctcgggggcactgatggctctgggggtctgagccctgggcgcagctgaagcctggacgcagccacacagtggccggggctgaagccacacagcccagaaggccagaaaaggcagccagatccccagggcagcctcgttaggacaaggctgtgccaggctgggaggctcggggctccccacgcccccatgcagtgaccgcttccccgatgtgagccgcctcggagtgtggcctggatccatcctgctagcacctccccagacagggctccagcctgtcggccacaccccagactccaggcccccgttgaagccgctcccggttccctccccagctcctcgtctttgaactgccgccgccgtggtgacccctgctttgccccactgggagagtccttagcctgggcctcctcctagctggagtgccatggctggggggtctcagcatgtagggcttctgtggttgtggatgggaggctcctggtggggcagaaaggctgcaacgctgattcctaaggcccagctgccagggaagacagagcaggctttgtgagagaggacctccatgcccccgccacctccccactccagcagataaggccgagcccacaccatctggcccaggctggcccccacccaccttccttgcgaccaccaacacacaggaactctgtgtgagagagagggcgcccagcccaggcctggtggagggggaggggagaagccaagggacacaggagaccacccccgagcttgcctcagggccaagccggcccaacccaaccactcggggcccccatcttgggggtcacccatggcctcagatgatggggtcagcaggcccaggagaattaggaaggccatggggcagcctccagtctgctctcagcttgtgccttgtaaataaatgtacaggttggatgtggcctccttccctctgtgtgtgcctgcactggtgtgaggtcgctgatgaccacagttcactgagca

SEQ ID NO: 733379 - DNA, 2747 bp, Homo sapiens; identical to SEQ ID NO: 37518

SEQ ID NO: 733380 - DNA, 2683 bp, Homo sapiens; identical to SEQ ID NO: 37519

SEQ ID NO: 733381 - DNA, 547 bp, Homo sapiens; identical to SEQ ID NO: 40676

SEQ ID NO: 733382 - DNA, 547 bp, Homo sapiens
aaactctggacttcaagtgatcacctgcctcagccttctaaggtgctaggattataggcttgagccactgcagccaccactctgtatatctcttttgaaagtcataagcaatatctttggaaaaaacacttaaggttatttatttagaggtagtgtctcctctgtacccccagctggagtacagtggcacagtatcacagcttgctgcagcatcaaattccctaggctcaagccatccttccaccggacatgttggcgtgcacctcctgagtagctgggactacagttgtgctctaccacaccgggctaatttttgtattttttagtagagacagggttttgccatgttggacaggctggtctggaacacctgacctccggtgatctgcccacctcagtctcccaaagggctgggattaaaggcatgagccaccgcactcagccacttaaggcttttaaaaaatcaattaatttctaaatggttttggacttttgactccttataagtgttaagatattttggtatcacttttttccttccaaaaaa

SEQ ID NO: 733383 - DNA, 531 bp, Homo sapiens; identical to SEQ ID NO: 75590

SEQ ID NO: 733384 - DNA, 547 bp, Homo sapiens
tgttattggggagttgcgtttccctactattattgcgtggctacttgagtcttattgtaggtctagcagtacttgttgtataactctatgttccccaaagttgggtgcatctacatttaggatagttaagtcttcttgttgaattgaaccctctatcgttatgcaatgcctttctttgttttattttactattaatgatttaaagtccttttttcttaaaagagaaacaattccaggtatggtggctcatgccagcactttcagactgaggcagtaggattgcctgagaccaggagtttgagaccagccgaggcaacataacaacattctgtttgtacagattcttttaaagaaactatacaggtgtggtagtgtgcccaactgtggtcatatttactcaggagacataggaggcatgactgctttacttcagaaatttgaggttacagtgagctgtgattgcaccactgcaatctgtcccaggagatagagtaagatcctgtgtataaaatgaaaaaataaagaaaaataaaatgattttaagtta

SEQ ID NO: 733385 - DNA, 854 bp, Homo sapiens
  misc_feature (838)..(839): n is a, c, g, or t
gctgcctcctctgactgtggtggagcagctcagcaggataataagcttactcgcctgaccttgggtctctctctcatcctttctcttggctaaccttcattttggtgccaaaacccaggaaggggataggctctggctgggcgtccttagaggattctctctctctctctcctatcatcccttacccagccaacctccccttcccgaacctgctaaagaccctaaggatctcccaaaattctcccattgttggccacctcatccaccatcaaagcctctgagagggtttttacagggccgtgttagagccttcacccatggaacagtacaagacatgatgctactccgagaataccgacagctccaggaacagcagtccctactacccagcctctccccccaaccatcgcccctattcagcaagaagcagccagaggacaacggcgcccctcttctattacctattaaaaggctggaatgttaggaacaagttgcacccagaacccctccccaccccaatgcagctgtcccttaccctgaatactctgcagctgcattcctggacccttatctaggcgctacagcaaggtcaccagacttgctttaaccctacgggcagcatgggggaggtcacgagaaacgtggataaacctaagttacaccctcttgtaaattcctatattgtaacctggtcacgagatgatatgtggtaaggttaaccaacaaacaaccccagggtctctctcccccatataaaaccctcattttgtaagctcagggctgcctcctttgactgtggtgaagcagcctggcaggttagtaaacttactctcctgannttgggtctctctctc

SEQ ID NO: 733386 - DNA, 598 bp, Homo sapiens
gctgcctcctctgactgtggtggagcagctcagcaggataataagcttactcgcctgaccttgggtctctctctcatcctttctcttggctaaccttcattttggtgccaaaacccaggaaggggataggctctggctgggcgtccttagaggattctctctctctctctcctatcatcccttacccagccaacctccccttcccgaacctgctaaagaccctaaggatctcccaaaattctcccattgttggccacctcatccaccatcaaagcctctgagaggggtgagtaagagagacttttgcctattacctggaacccttgaccatctcttcactcccaaaagacccagcgctgggccaagggcttcctctggcctccaggcctctggttcctctgtttcctggacgcctgactccgcagctacctcctctattccatacaaggcctgcaagacaggcgccgccctctctcgtctttgtcgtctgtggtcccttcttcctctaccctcacctcctccattcactatgggagcctctcagtctacccctcccaagaccaccccccttgggtgtctcctccgcaatcgcaaggct

SEQ ID NO: 733387 - DNA, 1674 bp, Homo sapiens
tttttaattattattatactttaagttttagggtacatgtgcacaatgtgcaggtttgttacatatgtaggaactattgttcttaatacccattttatttcccaatctgcccctgacatccggcacaaacttaaaaaggctgaagatggctctcaaaccccacaacaagacctccttaacctggctttcaaagtctttaataacagggacgagcaaaataaattagataaagcccaaagagatcgtgctaaataccagcttccagcagtggctatctgtcagtctagccatagtacccaagggcacaaaagacctgatagcagcaaacctcctgggccttgttttaagtgcggcaaagaaggccactggacgggggcatgtccccacccatgagtgccgaagagcccttgcctagtctgccagcagatgggcactggaagtctgactgtcctctcaacagatgggcagacaagcatgctcctcagagccaccatcccttcaacaagacaaaaagtgaagaatcacttgcactcccatagctccttggcctagccactgaagactgatgaggccagggcccctgggccccggctcccggcccccactgccatcactgcatcggagcccagggtaactctactagtagcaggtaagctgatctcttttttaattgatagtggggccacctactcagctttgcctgagttctcaggacccactcatccctctcaagtctcagttgtgggggttgacggactcatctcttgtccgcttgccaccagacctcttacttgttccctgtttgatgccattttctcacactctttccttatcatgcctcattgccccacccccattctaggctgagaccttttagccaaagtcaaagcttctatcaccttttcttgcccccttcaaccagagtcccctcctgctcctctccgctagtccggcccctgacccctttccccagtacccacttcctgcctctctcattaacccttccgtagctgctcaccatgaccccatcagaatccagttaaaagactcttccaaatttcccagcgttcctcaataccccatctctctaacccaccaaaagggcctacagcccatcgtaaacaagctctgctcatgcagtcttcttagaccaacacactctccatataacacccctatcctccctgttaaaaagtctgatggctcataccgactcgttcacaacctccaagccatcagtcaagctgtcctccctattcatcccatagtccataacccctatccacttctctctctcgtcgctaccaacaccaccctctacactgcaattgacctgaaggatgccttctttaccatttccctacaccctgattcccaaaacctatttgctttcacctggactgaccctgacaccctccagtcacaacaactcacatggactgtcctccctcagggcttcagggatagccctcatttctttggacaagctctagcccgaaacctcacttccttaaacctgtctcccagtcatcttcaatatgtggacgaccttcttctttgcagcccctctctaaaagactctcaaactcacacggccactgctctcttaaactttctcgctatcaaagggtatagggtctccccctccaaggcccaactctccatctccatgat

SEQ ID NO: 733388 - DNA, 1312 bp, Homo sapiens
  misc_feature (1296)..(1297): n is a, c, g, or t
ggagaatacctcccaacagtctccctcatgagctatctcctctgccaacaagccgaccaggccctcccaaaaccccacgaaggggtctccaatcccaaatagacttgctctccaattccaaaagactctttaagcagcagtgacacttcaaaaccatcgaggtttagatctcctcactgccgagaaaggcggcctgtgtatctttttagaagaggagtgctgtttctatactaaccagtcaggactagtacaagatgctgctggacgaataaatgaaaaagcttctggccgggtgcagtggctcacgcctgtaatcccagatctttgggaggctgaggcgggcggatcacgaggtcaggagatcgagaccatcttggctaacacggtgaaaccccgtctctactaaaaatagaaaaaattagccgggcgtggtggccggcagctgtactccccgctactccaggaggctgaggccggagaattgcgtgtggggtgaaccccggaggccgagctttccgtgagcagagatgatgcccctgcactcccacctgggcgacagagccagactccatctccaaaaaaaaaaaaaaaaaagctgctgaaatcaggcagcgcctttcagattcccggcccaggtgatttcgtaactcctgggcaccctggctactgcccttcctaggccctgccattaccctcttcctccatttagcacttggcccatgtctcttacatctccttacccagtttttacagggccgtgttagagccttcacccatggaacagtacaagacatgatgctactccgagaataccgacagctccaggaacagcagtccctactacccagcctctccccccaaccatcgcccctattcagcaagaagcagccagaggacaacggcgcccctcttctattacctattaaaaggctggaatgttaggaacaagttgcacccagaacccctccccaccccaatgcagctgtcccttaccctgaatactctgcagctgcattcctggacccttatctaggcgctacagcaaggtcaccagacttgctttaaccctacgggcagcatgggggaggtcacgagaaacgtggataaacctaagttacaccctcttgtaaattcctatattgtaacctggtcacgagatgatatgtggtaaggttaaccaacaaacaaccccagggtctctctcccccatataaaaccctcattttgtaagctcagggctgcctcctttgactgtggtgaagcagcctggcaggttagtaaacttactctcctgannttgggtctctctctc

SEQ ID NO: 733389 - DNA, 814 bp, Homo sapiens
  misc_feature (814)..(814): n is a, c, g, or t
ggagaatacctcccaacagtctccctcatgagctatctcctctgccaacaagccgaccaggccctcccaaaaccccacgaaggggtctccaatcccaaatagacttgctctccaattccaaaagactctttaagcagcagtgacacttcaaaaccatcgaggtttagatctcctcactgccgagaaaggcggcctgtgtatctttttagaagaggagtgctgtttctatactaaccagtcaggactagtacaagatgctgctggacgaataaatgaaaaagcttctggccgggtgcagtggctcacgcctgtaatcccagatctttgggaggctgaggcgggcggatcacgaggtcaggagatcgagaccatcttggctaacacggtgaaaccccgtctctactaaaaatagaaaaaattagccgggcgtggtggccggcagctgtactccccgctactccaggaggctgaggccggagaattgcgtgtggggtgaaccccggaggccgagctttccgtgagcagagatgatgcccctgcactcccacctgggcgacagagccagactccatctccaaaaaaaaaaaaaaaaaagctgctgaaatcaggcagcgcctttcagattcccggcccaggtgatttcgtaactcctgggcaccctggctactgcccttcctaggccctgccattaccctcttcctccatttagcacttggcccatgtctcttacatctccttacccagtttttacagggccgtgttagagccttcacccatggaacagtacaacctgccgtgggggatgcgctctagn

SEQ ID NO: 733390 - DNA, 1343 bp, Homo sapiens
  misc_feature (1327)..(1328): n is a, c, g, or t
ggagaatacctcccaacagtctccctcatgagctatctcctctgccaacaagccgaccaggccctcccaaaaccccacgaaggggtctccaatcccaaatagacttgctctccaattccaaaagactctttaagcagcagtgacacttcaaaaccatcgaggtttagatctcctcactgccgagaaaggcggcctgtgtatctttttagaagaggagtgctgtttctatactaaccagtcaggactagtacaagatgctgctggacgaataaatgaaaaagcttctggccgggtgcagtggctcacgcctgtaatcccagatctttgggaggctgaggcgggcggatcacgaggtcaggagatcgagaccatcttggctaacacggtgaaaccccgtctctactaaaaatagaaaaaattagccgggcgtggtggccggcagctgtactccccgctactccaggaggctgaggccggagaattgcgtgtggggtgaaccccggaggccgagctttccgtgagcagagatgatgcccctgcactcccacctgggcgacagagccagactccatctccaaaaaaaaaaaaaaaaaagctgctgaaatcaggcagcgcctttcagattcccggcccaggtgatttcgtaactcctgggcaccctggctactgcccttcctaggccctgccattaccctcttcctccatttagcacttggcccatgtctcttacatctccttacccagtttttacagggccgtgttagagccttcacccatggaacagtacaagacatgatgctactccgagaataccgacagctccaggaacagcagtccctactacccagcctctccccccaaccatcgcccctattcagcaagaagcagccagaggacaacggcgcccctcttctattacctattaaaaggctggaatgttaggaacaagttgcacccagaacccctccccctccccccccgcccccgacccccccccccccaccccaatgcagctgtcccttaccctgaatactctgcagctgcattcctggacccttatctaggcgctacagcaaggtcaccagacttgctttaaccctacgggcagcatgggggaggtcacgagaaacgtggataaacctaagttacaccctcttgtaaattcctatattgtaacctggtcacgagatgatatgtggtaaggttaaccaacaaacaaccccagggtctctctcccccatataaaaccctcattttgtaagctcagggctgcctcctttgactgtggtgaagcagcctggcaggttagtaaacttactctcctgannttgggtctctctctc

SEQ ID NO: 733391 - DNA, 885 bp, Homo sapiens
  misc_feature (869)..(870): n is a, c, g, or t
gctgcctcctctgactgtggtggagcagctcagcaggataataagcttactcgcctgaccttgggtctctctctcatcctttctcttggctaaccttcattttggtgccaaaacccaggaaggggataggctctggctgggcgtccttagaggattctctctctctctctcctatcatcccttacccagccaacctccccttcccgaacctgctaaagaccctaaggatctcccaaaattctcccattgttggccacctcatccaccatcaaagcctctgagagggtttttacagggccgtgttagagccttcacccatggaacagtacaagacatgatgctactccgagaataccgacagctccaggaacagcagtccctactacccagcctctccccccaaccatcgcccctattcagcaagaagcagccagaggacaacggcgcccctcttctattacctattaaaaggctggaatgttaggaacaagttgcacccagaacccctccccctccccccccgcccccgacccccccccccccaccccaatgcagctgtcccttaccctgaatactctgcagctgcattcctggacccttatctaggcgctacagcaaggtcaccagacttgctttaaccctacgggcagcatgggggaggtcacgagaaacgtggataaacctaagttacaccctcttgtaaattcctatattgtaacctggtcacgagatgatatgtggtaaggttaaccaacaaacaaccccagggtctctctcccccatataaaaccctcattttgtaagctcagggctgcctcctttgactgtggtgaagcagcctggcaggttagtaaacttactctcctgannttgggtctctctctc

SEQ ID NO: 733392 - DNA, 1248 bp, Homo sapiens
  misc_feature (1232)..(1233): n is a, c, g, or t
tttttaattattattatactttaagttttagggtacatgtgcacaatgtgcaggtttgttacatatgtaggaactattgttcttaatacccattttatttcccaatctgcccctgacatccggcacaaacttaaaaaggctgaagatggctctcaaaccccacaacaagacctccttaacctggctttcaaagtctttaataacagggacgagcaaaataaattagataaagcccaaagagatcgtgctaaataccagcttccagcagtggctatctgtcagtctagccatagtacccaagggcacaaaagacctgatagcagcaaacctcctgggccttgttttaagtgcggcaaagaaggccactggacgggggcatgtccccacccatgagtgccgaagagcccttgcctagtctgccagcagatgggcactggaagtctgactgtcctctcaacagatgggcagacaagcatgctcctcagagccaccatcccttcaacaagacaaaaagtgaagaatcacttgcactcccatagctccttggcctagccactgaagactgatgaggccagggcccctgggccccggctcccggcccccactgccatcactgcatcggagcccagggtaactctactagtagcagtttttacagggccgtgttagagccttcacccatggaacagtacaagacatgatgctactccgagaataccgacagctccaggaacagcagtccctactacccagcctctccccccaaccatcgcccctattcagcaagaagcagccagaggacaacggcgcccctcttctattacctattaaaaggctggaatgttaggaacaagttgcacccagaacccctccccctccccccccgcccccgacccccccccccccaccccaatgcagctgtcccttaccctgaatactctgcagctgcattcctggacccttatctaggcgctacagcaaggtcaccagacttgctttaaccctacgggcagcatgggggaggtcacgagaaacgtggataaacctaagttacaccctcttgtaaattcctatattgtaacctggtcacgagatgatatgtggtaaggttaaccaacaaacaaccccagggtctctctcccccatataaaaccctcattttgtaagctcagggctgcctcctttgactgtggtgaagcagcctggcaggttagtaaacttactctcctgannttgggtctctctctc

SEQ ID NO: 733393 - DNA, 1217 bp, Homo sapiens
  misc_feature (1201)..(1202): n is a, c, g, or t
tttttaattattattatactttaagttttagggtacatgtgcacaatgtgcaggtttgttacatatgtaggaactattgttcttaatacccattttatttcccaatctgcccctgacatccggcacaaacttaaaaaggctgaagatggctctcaaaccccacaacaagacctccttaacctggctttcaaagtctttaataacagggacgagcaaaataaattagataaagcccaaagagatcgtgctaaataccagcttccagcagtggctatctgtcagtctagccatagtacccaagggcacaaaagacctgatagcagcaaacctcctgggccttgttttaagtgcggcaaagaaggccactggacgggggcatgtccccacccatgagtgccgaagagcccttgcctagtctgccagcagatgggcactggaagtctgactgtcctctcaacagatgggcagacaagcatgctcctcagagccaccatcccttcaacaagacaaaaagtgaagaatcacttgcactcccatagctccttggcctagccactgaagactgatgaggccagggcccctgggccccggctcccggcccccactgccatcactgcatcggagcccagggtaactctactagtagcagtttttacagggccgtgttagagccttcacccatggaacagtacaagacatgatgctactccgagaataccgacagctccaggaacagcagtccctactacccagcctctccccccaaccatcgcccctattcagcaagaagcagccagaggacaacggcgcccctcttctattacctattaaaaggctggaatgttaggaacaagttgcacccagaacccctccccaccccaatgcagctgtcccttaccctgaatactctgcagctgcattcctggacccttatctaggcgctacagcaaggtcaccagacttgctttaaccctacgggcagcatgggggaggtcacgagaaacgtggataaacctaagttacaccctcttgtaaattcctatattgtaacctggtcacgagatgatatgtggtaaggttaaccaacaaacaaccccagggtctctctcccccatataaaaccctcattttgtaagctcagggctgcctcctttgactgtggtgaagcagcctggcaggttagtaaacttactctcctgannttgggtctctctctc

SEQ ID NO: 733394 - DNA, 1074 bp, Homo sapiens
  misc_feature (1058)..(1059): n is a, c, g, or t
gctgcctcctctgactgtggtggagcagctcagcaggataataagcttactcgcctgaccttgggtctctctctcatcctttctcttggctaaccttcattttggtgccaaaacccaggaaggggataggctctggctgggcgtccttagaggattctctctctctctctcctatcatcccttacccagccaacctccccttcccgaacctgctaaagaccctaaggatctcccaaaattctcccattgttggccacctcatccaccatcaaagcctctgagagggatgggcagacaagcatgctcctcagagccaccatcccttcaacaagacaaaaagtgaagaatcacttgcactcccatagctccttggcctagccactgaagactgatgaggccagggcccctgggccccggctcccggcccccactgccatcactgcatcggagcccagggtaactctactagtagcagtttttacagggccgtgttagagccttcacccatggaacagtacaagacatgatgctactccgagaataccgacagctccaggaacagcagtccctactacccagcctctccccccaaccatcgcccctattcagcaagaagcagccagaggacaacggcgcccctcttctattacctattaaaaggctggaatgttaggaacaagttgcacccagaacccctccccctccccccccgcccccgacccccccccccccaccccaatgcagctgtcccttaccctgaatactctgcagctgcattcctggacccttatctaggcgctacagcaaggtcaccagacttgctttaaccctacgggcagcatgggggaggtcacgagaaacgtggataaacctaagttacaccctcttgtaaattcctatattgtaacctggtcacgagatgatatgtggtaaggttaaccaacaaacaaccccagggtctctctcccccatataaaaccctcattttgtaagctcagggctgcctcctttgactgtggtgaagcagcctggcaggttagtaaacttactctcctgannttgggtctctctctc

SEQ ID NO: 733395 - DNA, 1043 bp, Homo sapiens
  misc_feature (1027)..(1028): n is a, c, g, or t
gctgcctcctctgactgtggtggagcagctcagcaggataataagcttactcgcctgaccttgggtctctctctcatcctttctcttggctaaccttcattttggtgccaaaacccaggaaggggataggctctggctgggcgtccttagaggattctctctctctctctcctatcatcccttacccagccaacctccccttcccgaacctgctaaagaccctaaggatctcccaaaattctcccattgttggccacctcatccaccatcaaagcctctgagagggatgggcagacaagcatgctcctcagagccaccatcccttcaacaagacaaaaagtgaagaatcacttgcactcccatagctccttggcctagccactgaagactgatgaggccagggcccctgggccccggctcccggcccccactgccatcactgcatcggagcccagggtaactctactagtagcagtttttacagggccgtgttagagccttcacccatggaacagtacaagacatgatgctactccgagaataccgacagctccaggaacagcagtccctactacccagcctctccccccaaccatcgcccctattcagcaagaagcagccagaggacaacggcgcccctcttctattacctattaaaaggctggaatgttaggaacaagttgcacccagaacccctccccaccccaatgcagctgtcccttaccctgaatactctgcagctgcattcctggacccttatctaggcgctacagcaaggtcaccagacttgctttaaccctacgggcagcatgggggaggtcacgagaaacgtggataaacctaagttacaccctcttgtaaattcctatattgtaacctggtcacgagatgatatgtggtaaggttaaccaacaaacaaccccagggtctctctcccccatataaaaccctcattttgtaagctcagggctgcctcctttgactgtggtgaagcagcctggcaggttagtaaacttactctcctgannttgggtctctctctc

SEQ ID NO: 733396 - DNA, 1500 bp, Homo sapiens
gctgcctcctctgactgtggtggagcagctcagcaggataataagcttactcgcctgaccttgggtctctctctcatcctttctcttggctaaccttcattttggtgccaaaacccaggaaggggataggctctggctgggcgtccttagaggattctctctctctctctcctatcatcccttacccagccaacctccccttcccgaacctgctaaagaccctaaggatctcccaaaattctcccattgttggccacctcatccaccatcaaagcctctgagagggatgggcagacaagcatgctcctcagagccaccatcccttcaacaagacaaaaagtgaagaatcacttgcactcccatagctccttggcctagccactgaagactgatgaggccagggcccctgggccccggctcccggcccccactgccatcactgcatcggagcccagggtaactctactagtagcaggtaagctgatctcttttttaattgatagtggggccacctactcagctttgcctgagttctcaggacccactcatccctctcaagtctcagttgtgggggttgacggactcatctcttgtccgcttgccaccagacctcttacttgttccctgtttgatgccattttctcacactctttccttatcatgcctcattgccccacccccattctaggctgagaccttttagccaaagtcaaagcttctatcaccttttcttgcccccttcaaccagagtcccctcctgctcctctccgctagtccggcccctgacccctttccccagtacccacttcctgcctctctcattaacccttccgtagctgctcaccatgaccccatcagaatccagttaaaagactcttccaaatttcccagcgttcctcaataccccatctctctaacccaccaaaagggcctacagcccatcgtaaacaagctctgctcatgcagtcttcttagaccaacacactctccatataacacccctatcctccctgttaaaaagtctgatggctcataccgactcgttcacaacctccaagccatcagtcaagctgtcctccctattcatcccatagtccataacccctatccacttctctctctcgtcgctaccaacaccaccctctacactgcaattgacctgaaggatgccttctttaccatttccctacaccctgattcccaaaacctatttgctttcacctggactgaccctgacaccctccagtcacaacaactcacatggactgtcctccctcagggcttcagggatagccctcatttctttggacaagctctagcccgaaacctcacttccttaaacctgtctcccagtcatcttcaatatgtggacgaccttcttctttgcagcccctctctaaaagactctcaaactcacacggccactgctctcttaaactttctcgctatcaaagggtatagggtctccccctccaaggcccaactctccatctccatgat

SEQ ID NO: 733397 - DNA, 847 bp, Homo sapiens
  misc_feature (805)..(805): n is a, c, g, or t
  misc_feature (833)..(833): n is a, c, g, or t
tttttaattattattatactttaagttttagggtacatgtgcacaatgtgcaggtttgttacatatgtaggaactattgttcttaatacccattttatttcccaatctgcccctgacatccggcacaaacttaaaaaggctgaagatggctctcaaaccccacaacaagacctccttaacctggctttcaaagtctttaataacagggacgagcaaaataaattagataaagcccaaagagatcgtgctaaataccagcttccagcagtggctatctgtcagtctagccatagtacccaagggcacaaaagacctgatagcagcaaacctcctgggccttgttttaagtgcggcaaagaaggccactggacgggggcatgtccccacccatgagtgccgaagagcccttgcctagtctgccagcagatgggcactggaagtctgactgtcctctcaacagatgggcagacaagcatgctcctcagagccaccatcccttcaacaagacaaaaagtgaagaatcacttgcactcccatagctccttggcctagccactgaagactgatgaggccagggcccctgggccccggctcccggcccccactgccatcactgcatcggagcccagggtaactctactagtagcaggtaagctgatctcttttttaattgatagtggggccacctactcagctttgcctgagttctcaggacccactcatccctctcaagtctcagttgtgggggttgacggactcatctcttgtccgcttgccaccagacctcttacttgttccctgtctnacgccatcactctggatttatcaggatnaaatgggaccggcc

SEQ ID NO: 733398 - DNA, 3007 bp, Homo sapiens
  misc_feature (1232)..(1233): n is a, c, g, or t
tttttaattattattatactttaagttttagggtacatgtgcacaatgtgcaggtttgttacatatgtaggaactattgttcttaatacccattttatttcccaatctgcccctgacatccggcacaaacttaaaaaggctgaagatggctctcaaaccccacaacaagacctccttaacctggctttcaaagtctttaataacagggacgagcaaaataaattagataaagcccaaagagatcgtgctaaataccagcttccagcagtggctatctgtcagtctagccatagtacccaagggcacaaaagacctgatagcagcaaacctcctgggccttgttttaagtgcggcaaagaaggccactggacgggggcatgtccccacccatgagtgccgaagagcccttgcctagtctgccagcagatgggcactggaagtctgactgtcctctcaacagatgggcagacaagcatgctcctcagagccaccatcccttcaacaagacaaaaagtgaagaatcacttgcactcccatagctccttggcctagccactgaagactgatgaggccagggcccctgggccccggctcccggcccccactgccatcactgcatcggagcccagggtaactctactagtagcagtttttacagggccgtgttagagccttcacccatggaacagtacaagacatgatgctactccgagaataccgacagctccaggaacagcagtccctactacccagcctctccccccaaccatcgcccctattcagcaagaagcagccagaggacaacggcgcccctcttctattacctattaaaaggctggaatgttaggaacaagttgcacccagaacccctccccctccccccccgcccccgacccccccccccccaccccaatgcagctgtcccttaccctgaatactctgcagctgcattcctggacccttatctaggcgctacagcaaggtcaccagacttgctttaaccctacgggcagcatgggggaggtcacgagaaacgtggataaacctaagttacaccctcttgtaaattcctatattgtaacctggtcacgagatgatatgtggtaaggttaaccaacaaacaaccccagggtctctctcccccatataaaaccctcattttgtaagctcagggctgcctcctttgactgtggtgaagcagcctggcaggttagtaaacttactctcctgannttgggtctctctctcgtcctttctctcggctaaccttacagcgccctcatccattctccaattataatgtgtttacacctttcctcctgcatgtctcacattttaccttgtcatcctcttacttgtgtatgtgtctatgcctcccagcatttgacagtacctgaaggtcaaagcctatctgctgtttacccttacaattctattcactcggcacgcactaggcacagaataaatgccattcatccctacttttacttcagggtacattttagagatctaagatttggtgtatctttcccattatccattcttattgcctcaaggctctcctcttataaatctagtggtatgcattactttgggggtaaggacaaatttatccagaacagagaagatttagttcagtctttagttttaaaataagcatttttaagtaatagcagagacaaaagtctgaaagccaacatagttttaatttaaaagaaatttgattttgctacagctttttggccaggagtaagtgaggatgctgtttcgaaagctggtcttgcatcttaagcagtacggtgtgggtcttaggggctggagtgtatcttgcaggaaacacagagtaggcaagaatgtgaggtggtgtaagactagtttgtctggttcaaaaagtaaaaaagaagactgaaaaaagtaggaaatctaacccaaagcaatcaatctttgagaagagcccagcacacttcccttccaattgatttgtcctacacccctccatgagcctaagcattagagcagaaatgactgagggtagcatccaagccactgggccaaggggcactggtacgatgaggataccgtgtcccacaattccagggtagtctgggaaaaacaaagcagagttcctgagaagaatgcagtagtggctgacagaacccagaaagggtgttgtagtgatatgtggccatgacatcagaagactaaaatgaggctatggatattccctagcaaatgtcttgggaacagaggccaaagccgaaagctcaagaattaatggaatgactacacctcaacgaaggttatagattagtgaggactgatgagtacaaaccagactcacacatccatcctcatcctcactccccacccccaggctacaatattacatatatgtcccctactcctgagggatggaaaagaggatgggtaggataagttcaaactgctttaatggctaacaaaattcacctttattcctttttatttttagttgacatgtaaaaattgtacatatttattggctacagagtgatattttgatacaagtataaagtgtgtaatgatcaaatcagagtaattagcacatcaatcacctcaaatagttatcacttatttgtactgggaacactcgaaatccttttctagctttgaaaaaatatacaataaattattgttaactgtattcaccacatagcactatagaacagtagaacagaatttattcctcctatattgctgtaattttgtatctgttaattaacctctccctagcctcccctccccctacccttcccaatctctcataaccacaattctactctctagatctatgagctcattttttaagtccctgcatttgagtgagaagatgaagtatttatctttctgcgcatgacttgctttgcttaacataatatcctccagattcatccacgttggtgcaaatggcaaggattccatactttattttatgggtgattattgttccattgtgtgtataccatat

SEQ ID NO: 733399 - DNA, 2976 bp, Homo sapiens
  misc_feature (1201)..(1202): n is a, c, g, or t
tttttaattattattatactttaagttttagggtacatgtgcacaatgtgcaggtttgttacatatgtaggaactattgttcttaatacccattttatttcccaatctgcccctgacatccggcacaaacttaaaaaggctgaagatggctctcaaaccccacaacaagacctccttaacctggctttcaaagtctttaataacagggacgagcaaaataaattagataaagcccaaagagatcgtgctaaataccagcttccagcagtggctatctgtcagtctagccatagtacccaagggcacaaaagacctgatagcagcaaacctcctgggccttgttttaagtgcggcaaagaaggccactggacgggggcatgtccccacccatgagtgccgaagagcccttgcctagtctgccagcagatgggcactggaagtctgactgtcctctcaacagatgggcagacaagcatgctcctcagagccaccatcccttcaacaagacaaaaagtgaagaatcacttgcactcccatagctccttggcctagccactgaagactgatgaggccagggcccctgggccccggctcccggcccccactgccatcactgcatcggagcccagggtaactctactagtagcagtttttacagggccgtgttagagccttcacccatggaacagtacaagacatgatgctactccgagaataccgacagctccaggaacagcagtccctactacccagcctctccccccaaccatcgcccctattcagcaagaagcagccagaggacaacggcgcccctcttctattacctattaaaaggctggaatgttaggaacaagttgcacccagaacccctccccaccccaatgcagctgtcccttaccctgaatactctgcagctgcattcctggacccttatctaggcgctacagcaaggtcaccagacttgctttaaccctacgggcagcatgggggaggtcacgagaaacgtggataaacctaagttacaccctcttgtaaattcctatattgtaacctggtcacgagatgatatgtggtaaggttaaccaacaaacaaccccagggtctctctcccccatataaaaccctcattttgtaagctcagggctgcctcctttgactgtggtgaagcagcctggcaggttagtaaacttactctcctgannttgggtctctctctcgtcctttctctcggctaaccttacagcgccctcatccattctccaattataatgtgtttacacctttcctcctgcatgtctcacattttaccttgtcatcctcttacttgtgtatgtgtctatgcctcccagcatttgacagtacctgaaggtcaaagcctatctgctgtttacccttacaattctattcactcggcacgcactaggcacagaataaatgccattcatccctacttttacttcagggtacattttagagatctaagatttggtgtatctttcccattatccattcttattgcctcaaggctctcctcttataaatctagtggtatgcattactttgggggtaaggacaaatttatccagaacagagaagatttagttcagtctttagttttaaaataagcatttttaagtaatagcagagacaaaagtctgaaagccaacatagttttaatttaaaagaaatttgattttgctacagctttttggccaggagtaagtgaggatgctgtttcgaaagctggtcttgcatcttaagcagtacggtgtgggtcttaggggctggagtgtatcttgcaggaaacacagagtaggcaagaatgtgaggtggtgtaagactagtttgtctggttcaaaaagtaaaaaagaagactgaaaaaagtaggaaatctaacccaaagcaatcaatctttgagaagagcccagcacacttcccttccaattgatttgtcctacacccctccatgagcctaagcattagagcagaaatgactgagggtagcatccaagccactgggccaaggggcactggtacgatgaggataccgtgtcccacaattccagggtagtctgggaaaaacaaagcagagttcctgagaagaatgcagtagtggctgacagaacccagaaagggtgttgtagtgatatgtggccatgacatcagaagactaaaatgaggctatggatattccctagcaaatgtcttgggaacagaggccaaagccgaaagctcaagaattaatggaatgactacacctcaacgaaggttatagattagtgaggactgatgagtacaaaccagactcacacatccatcctcatcctcactccccacccccaggctacaatattacatatatgtcccctactcctgagggatggaaaagaggatgggtaggataagttcaaactgctttaatggctaacaaaattcacctttattcctttttatttttagttgacatgtaaaaattgtacatatttattggctacagagtgatattttgatacaagtataaagtgtgtaatgatcaaatcagagtaattagcacatcaatcacctcaaatagttatcacttatttgtactgggaacactcgaaatccttttctagctttgaaaaaatatacaataaattattgttaactgtattcaccacatagcactatagaacagtagaacagaatttattcctcctatattgctgtaattttgtatctgttaattaacctctccctagcctcccctccccctacccttcccaatctctcataaccacaattctactctctagatctatgagctcattttttaagtccctgcatttgagtgagaagatgaagtatttatctttctgcgcatgacttgctttgcttaacataatatcctccagattcatccacgttggtgcaaatggcaaggattccatactttattttatgggtgattattgttccattgtgtgtataccatat

SEQ ID NO: 733400 - DNA, 3102 bp, Homo sapiens
  misc_feature (1327)..(1328): n is a, c, g, or t
ggagaatacctcccaacagtctccctcatgagctatctcctctgccaacaagccgaccaggccctcccaaaaccccacgaaggggtctccaatcccaaatagacttgctctccaattccaaaagactctttaagcagcagtgacacttcaaaaccatcgaggtttagatctcctcactgccgagaaaggcggcctgtgtatctttttagaagaggagtgctgtttctatactaaccagtcaggactagtacaagatgctgctggacgaataaatgaaaaagcttctggccgggtgcagtggctcacgcctgtaatcccagatctttgggaggctgaggcgggcggatcacgaggtcaggagatcgagaccatcttggctaacacggtgaaaccccgtctctactaaaaatagaaaaaattagccgggcgtggtggccggcagctgtactccccgctactccaggaggctgaggccggagaattgcgtgtggggtgaaccccggaggccgagctttccgtgagcagagatgatgcccctgcactcccacctgggcgacagagccagactccatctccaaaaaaaaaaaaaaaaaagctgctgaaatcaggcagcgcctttcagattcccggcccaggtgatttcgtaactcctgggcaccctggctactgcccttcctaggccctgccattaccctcttcctccatttagcacttggcccatgtctcttacatctccttacccagtttttacagggccgtgttagagccttcacccatggaacagtacaagacatgatgctactccgagaataccgacagctccaggaacagcagtccctactacccagcctctccccccaaccatcgcccctattcagcaagaagcagccagaggacaacggcgcccctcttctattacctattaaaaggctggaatgttaggaacaagttgcacccagaacccctccccctccccccccgcccccgacccccccccccccaccccaatgcagctgtcccttaccctgaatactctgcagctgcattcctggacccttatctaggcgctacagcaaggtcaccagacttgctttaaccctacgggcagcatgggggaggtcacgagaaacgtggataaacctaagttacaccctcttgtaaattcctatattgtaacctggtcacgagatgatatgtggtaaggttaaccaacaaacaaccccagggtctctctcccccatataaaaccctcattttgtaagctcagggctgcctcctttgactgtggtgaagcagcctggcaggttagtaaacttactctcctgannttgggtctctctctcgtcctttctctcggctaaccttacagcgccctcatccattctccaattataatgtgtttacacctttcctcctgcatgtctcacattttaccttgtcatcctcttacttgtgtatgtgtctatgcctcccagcatttgacagtacctgaaggtcaaagcctatctgctgtttacccttacaattctattcactcggcacgcactaggcacagaataaatgccattcatccctacttttacttcagggtacattttagagatctaagatttggtgtatctttcccattatccattcttattgcctcaaggctctcctcttataaatctagtggtatgcattactttgggggtaaggacaaatttatccagaacagagaagatttagttcagtctttagttttaaaataagcatttttaagtaatagcagagacaaaagtctgaaagccaacatagttttaatttaaaagaaatttgattttgctacagctttttggccaggagtaagtgaggatgctgtttcgaaagctggtcttgcatcttaagcagtacggtgtgggtcttaggggctggagtgtatcttgcaggaaacacagagtaggcaagaatgtgaggtggtgtaagactagtttgtctggttcaaaaagtaaaaaagaagactgaaaaaagtaggaaatctaacccaaagcaatcaatctttgagaagagcccagcacacttcccttccaattgatttgtcctacacccctccatgagcctaagcattagagcagaaatgactgagggtagcatccaagccactgggccaaggggcactggtacgatgaggataccgtgtcccacaattccagggtagtctgggaaaaacaaagcagagttcctgagaagaatgcagtagtggctgacagaacccagaaagggtgttgtagtgatatgtggccatgacatcagaagactaaaatgaggctatggatattccctagcaaatgtcttgggaacagaggccaaagccgaaagctcaagaattaatggaatgactacacctcaacgaaggttatagattagtgaggactgatgagtacaaaccagactcacacatccatcctcatcctcactccccacccccaggctacaatattacatatatgtcccctactcctgagggatggaaaagaggatgggtaggataagttcaaactgctttaatggctaacaaaattcacctttattcctttttatttttagttgacatgtaaaaattgtacatatttattggctacagagtgatattttgatacaagtataaagtgtgtaatgatcaaatcagagtaattagcacatcaatcacctcaaatagttatcacttatttgtactgggaacactcgaaatccttttctagctttgaaaaaatatacaataaattattgttaactgtattcaccacatagcactatagaacagtagaacagaatttattcctcctatattgctgtaattttgtatctgttaattaacctctccctagcctcccctccccctacccttcccaatctctcataaccacaattctactctctagatctatgagctcattttttaagtccctgcatttgagtgagaagatgaagtatttatctttctgcgcatgacttgctttgcttaacataatatcctccagattcatccacgttggtgcaaatggcaaggattccatactttattttatgggtgattattgttccattgtgtgtataccatat

SEQ ID NO: 733401 - DNA, 3071 bp, Homo sapiens
  misc_feature (1296)..(1297): n is a, c, g, or t
ggagaatacctcccaacagtctccctcatgagctatctcctctgccaacaagccgaccaggccctcccaaaaccccacgaaggggtctccaatcccaaatagacttgctctccaattccaaaagactctttaagcagcagtgacacttcaaaaccatcgaggtttagatctcctcactgccgagaaaggcggcctgtgtatctttttagaagaggagtgctgtttctatactaaccagtcaggactagtacaagatgctgctggacgaataaatgaaaaagcttctggccgggtgcagtggctcacgcctgtaatcccagatctttgggaggctgaggcgggcggatcacgaggtcaggagatcgagaccatcttggctaacacggtgaaaccccgtctctactaaaaatagaaaaaattagccgggcgtggtggccggcagctgtactccccgctactccaggaggctgaggccggagaattgcgtgtggggtgaaccccggaggccgagctttccgtgagcagagatgatgcccctgcactcccacctgggcgacagagccagactccatctccaaaaaaaaaaaaaaaaaagctgctgaaatcaggcagcgcctttcagattcccggcccaggtgatttcgtaactcctgggcaccctggctactgcccttcctaggccctgccattaccctcttcctccatttagcacttggcccatgtctcttacatctccttacccagtttttacagggccgtgttagagccttcacccatggaacagtacaagacatgatgctactccgagaataccgacagctccaggaacagcagtccctactacccagcctctccccccaaccatcgcccctattcagcaagaagcagccagaggacaacggcgcccctcttctattacctattaaaaggctggaatgttaggaacaagttgcacccagaacccctccccaccccaatgcagctgtcccttaccctgaatactctgcagctgcattcctggacccttatctaggcgctacagcaaggtcaccagacttgctttaaccctacgggcagcatgggggaggtcacgagaaacgtggataaacctaagttacaccctcttgtaaattcctatattgtaacctggtcacgagatgatatgtggtaaggttaaccaacaaacaaccccagggtctctctcccccatataaaaccctcattttgtaagctcagggctgcctcctttgactgtggtgaagcagcctggcaggttagtaaacttactctcctgannttgggtctctctctcgtcctttctctcggctaaccttacagcgccctcatccattctccaattataatgtgtttacacctttcctcctgcatgtctcacattttaccttgtcatcctcttacttgtgtatgtgtctatgcctcccagcatttgacagtacctgaaggtcaaagcctatctgctgtttacccttacaattctattcactcggcacgcactaggcacagaataaatgccattcatccctacttttacttcagggtacattttagagatctaagatttggtgtatctttcccattatccattcttattgcctcaaggctctcctcttataaatctagtggtatgcattactttgggggtaaggacaaatttatccagaacagagaagatttagttcagtctttagttttaaaataagcatttttaagtaatagcagagacaaaagtctgaaagccaacatagttttaatttaaaagaaatttgattttgctacagctttttggccaggagtaagtgaggatgctgtttcgaaagctggtcttgcatcttaagcagtacggtgtgggtcttaggggctggagtgtatcttgcaggaaacacagagtaggcaagaatgtgaggtggtgtaagactagtttgtctggttcaaaaagtaaaaaagaagactgaaaaaagtaggaaatctaacccaaagcaatcaatctttgagaagagcccagcacacttcccttccaattgatttgtcctacacccctccatgagcctaagcattagagcagaaatgactgagggtagcatccaagccactgggccaaggggcactggtacgatgaggataccgtgtcccacaattccagggtagtctgggaaaaacaaagcagagttcctgagaagaatgcagtagtggctgacagaacccagaaagggtgttgtagtgatatgtggccatgacatcagaagactaaaatgaggctatggatattccctagcaaatgtcttgggaacagaggccaaagccgaaagctcaagaattaatggaatgactacacctcaacgaaggttatagattagtgaggactgatgagtacaaaccagactcacacatccatcctcatcctcactccccacccccaggctacaatattacatatatgtcccctactcctgagggatggaaaagaggatgggtaggataagttcaaactgctttaatggctaacaaaattcacctttattcctttttatttttagttgacatgtaaaaattgtacatatttattggctacagagtgatattttgatacaagtataaagtgtgtaatgatcaaatcagagtaattagcacatcaatcacctcaaatagttatcacttatttgtactgggaacactcgaaatccttttctagctttgaaaaaatatacaataaattattgttaactgtattcaccacatagcactatagaacagtagaacagaatttattcctcctatattgctgtaattttgtatctgttaattaacctctccctagcctcccctccccctacccttcccaatctctcataaccacaattctactctctagatctatgagctcattttttaagtccctgcatttgagtgagaagatgaagtatttatctttctgcgcatgacttgctttgcttaacataatatcctccagattcatccacgttggtgcaaatggcaaggattccatactttattttatgggtgattattgttccattgtgtgtataccatat

SEQ ID NO: 733402 - DNA, 2833 bp, Homo sapiens
  misc_feature (1058)..(1059): n is a, c, g, or t
gctgcctcctctgactgtggtggagcagctcagcaggataataagcttactcgcctgaccttgggtctctctctcatcctttctcttggctaaccttcattttggtgccaaaacccaggaaggggataggctctggctgggcgtccttagaggattctctctctctctctcctatcatcccttacccagccaacctccccttcccgaacctgctaaagaccctaaggatctcccaaaattctcccattgttggccacctcatccaccatcaaagcctctgagagggatgggcagacaagcatgctcctcagagccaccatcccttcaacaagacaaaaagtgaagaatcacttgcactcccatagctccttggcctagccactgaagactgatgaggccagggcccctgggccccggctcccggcccccactgccatcactgcatcggagcccagggtaactctactagtagcagtttttacagggccgtgttagagccttcacccatggaacagtacaagacatgatgctactccgagaataccgacagctccaggaacagcagtccctactacccagcctctccccccaaccatcgcccctattcagcaagaagcagccagaggacaacggcgcccctcttctattacctattaaaaggctggaatgttaggaacaagttgcacccagaacccctccccctccccccccgcccccgacccccccccccccaccccaatgcagctgtcccttaccctgaatactctgcagctgcattcctggacccttatctaggcgctacagcaaggtcaccagacttgctttaaccctacgggcagcatgggggaggtcacgagaaacgtggataaacctaagttacaccctcttgtaaattcctatattgtaacctggtcacgagatgatatgtggtaaggttaaccaacaaacaaccccagggtctctctcccccatataaaaccctcattttgtaagctcagggctgcctcctttgactgtggtgaagcagcctggcaggttagtaaacttactctcctgannttgggtctctctctcgtcctttctctcggctaaccttacagcgccctcatccattctccaattataatgtgtttacacctttcctcctgcatgtctcacattttaccttgtcatcctcttacttgtgtatgtgtctatgcctcccagcatttgacagtacctgaaggtcaaagcctatctgctgtttacccttacaattctattcactcggcacgcactaggcacagaataaatgccattcatccctacttttacttcagggtacattttagagatctaagatttggtgtatctttcccattatccattcttattgcctcaaggctctcctcttataaatctagtggtatgcattactttgggggtaaggacaaatttatccagaacagagaagatttagttcagtctttagttttaaaataagcatttttaagtaatagcagagacaaaagtctgaaagccaacatagttttaatttaaaagaaatttgattttgctacagctttttggccaggagtaagtgaggatgctgtttcgaaagctggtcttgcatcttaagcagtacggtgtgggtcttaggggctggagtgtatcttgcaggaaacacagagtaggcaagaatgtgaggtggtgtaagactagtttgtctggttcaaaaagtaaaaaagaagactgaaaaaagtaggaaatctaacccaaagcaatcaatctttgagaagagcccagcacacttcccttccaattgatttgtcctacacccctccatgagcctaagcattagagcagaaatgactgagggtagcatccaagccactgggccaaggggcactggtacgatgaggataccgtgtcccacaattccagggtagtctgggaaaaacaaagcagagttcctgagaagaatgcagtagtggctgacagaacccagaaagggtgttgtagtgatatgtggccatgacatcagaagactaaaatgaggctatggatattccctagcaaatgtcttgggaacagaggccaaagccgaaagctcaagaattaatggaatgactacacctcaacgaaggttatagattagtgaggactgatgagtacaaaccagactcacacatccatcctcatcctcactccccacccccaggctacaatattacatatatgtcccctactcctgagggatggaaaagaggatgggtaggataagttcaaactgctttaatggctaacaaaattcacctttattcctttttatttttagttgacatgtaaaaattgtacatatttattggctacagagtgatattttgatacaagtataaagtgtgtaatgatcaaatcagagtaattagcacatcaatcacctcaaatagttatcacttatttgtactgggaacactcgaaatccttttctagctttgaaaaaatatacaataaattattgttaactgtattcaccacatagcactatagaacagtagaacagaatttattcctcctatattgctgtaattttgtatctgttaattaacctctccctagcctcccctccccctacccttcccaatctctcataaccacaattctactctctagatctatgagctcattttttaagtccctgcatttgagtgagaagatgaagtatttatctttctgcgcatgacttgctttgcttaacataatatcctccagattcatccacgttggtgcaaatggcaaggattccatactttattttatgggtgattattgttccattgtgtgtataccatat

SEQ ID NO: 733403 - DNA, 2802 bp, Homo sapiens
  misc_feature (1027)..(1028): n is a, c, g, or t
gctgcctcctctgactgtggtggagcagctcagcaggataataagcttactcgcctgaccttgggtctctctctcatcctttctcttggctaaccttcattttggtgccaaaacccaggaaggggataggctctggctgggcgtccttagaggattctctctctctctctcctatcatcccttacccagccaacctccccttcccgaacctgctaaagaccctaaggatctcccaaaattctcccattgttggccacctcatccaccatcaaagcctctgagagggatgggcagacaagcatgctcctcagagccaccatcccttcaacaagacaaaaagtgaagaatcacttgcactcccatagctccttggcctagccactgaagactgatgaggccagggcccctgggccccggctcccggcccccactgccatcactgcatcggagcccagggtaactctactagtagcagtttttacagggccgtgttagagccttcacccatggaacagtacaagacatgatgctactccgagaataccgacagctccaggaacagcagtccctactacccagcctctccccccaaccatcgcccctattcagcaagaagcagccagaggacaacggcgcccctcttctattacctattaaaaggctggaatgttaggaacaagttgcacccagaacccctccccaccccaatgcagctgtcccttaccctgaatactctgcagctgcattcctggacccttatctaggcgctacagcaaggtcaccagacttgctttaaccctacgggcagcatgggggaggtcacgagaaacgtggataaacctaagttacaccctcttgtaaattcctatattgtaacctggtcacgagatgatatgtggtaaggttaaccaacaaacaaccccagggtctctctcccccatataaaaccctcattttgtaagctcagggctgcctcctttgactgtggtgaagcagcctggcaggttagtaaacttactctcctgannttgggtctctctctcgtcctttctctcggctaaccttacagcgccctcatccattctccaattataatgtgtttacacctttcctcctgcatgtctcacattttaccttgtcatcctcttacttgtgtatgtgtctatgcctcccagcatttgacagtacctgaaggtcaaagcctatctgctgtttacccttacaattctattcactcggcacgcactaggcacagaataaatgccattcatccctacttttacttcagggtacattttagagatctaagatttggtgtatctttcccattatccattcttattgcctcaaggctctcctcttataaatctagtggtatgcattactttgggggtaaggacaaatttatccagaacagagaagatttagttcagtctttagttttaaaataagcatttttaagtaatagcagagacaaaagtctgaaagccaacatagttttaatttaaaagaaatttgattttgctacagctttttggccaggagtaagtgaggatgctgtttcgaaagctggtcttgcatcttaagcagtacggtgtgggtcttaggggctggagtgtatcttgcaggaaacacagagtaggcaagaatgtgaggtggtgtaagactagtttgtctggttcaaaaagtaaaaaagaagactgaaaaaagtaggaaatctaacccaaagcaatcaatctttgagaagagcccagcacacttcccttccaattgatttgtcctacacccctccatgagcctaagcattagagcagaaatgactgagggtagcatccaagccactgggccaaggggcactggtacgatgaggataccgtgtcccacaattccagggtagtctgggaaaaacaaagcagagttcctgagaagaatgcagtagtggctgacagaacccagaaagggtgttgtagtgatatgtggccatgacatcagaagactaaaatgaggctatggatattccctagcaaatgtcttgggaacagaggccaaagccgaaagctcaagaattaatggaatgactacacctcaacgaaggttatagattagtgaggactgatgagtacaaaccagactcacacatccatcctcatcctcactccccacccccaggctacaatattacatatatgtcccctactcctgagggatggaaaagaggatgggtaggataagttcaaactgctttaatggctaacaaaattcacctttattcctttttatttttagttgacatgtaaaaattgtacatatttattggctacagagtgatattttgatacaagtataaagtgtgtaatgatcaaatcagagtaattagcacatcaatcacctcaaatagttatcacttatttgtactgggaacactcgaaatccttttctagctttgaaaaaatatacaataaattattgttaactgtattcaccacatagcactatagaacagtagaacagaatttattcctcctatattgctgtaattttgtatctgttaattaacctctccctagcctcccctccccctacccttcccaatctctcataaccacaattctactctctagatctatgagctcattttttaagtccctgcatttgagtgagaagatgaagtatttatctttctgcgcatgacttgctttgcttaacataatatcctccagattcatccacgttggtgcaaatggcaaggattccatactttattttatgggtgattattgttccattgtgtgtataccatat

SEQ ID NO: 733404 - DNA, 2644 bp, Homo sapiens
  misc_feature (869)..(870): n is a, c, g, or t
gctgcctcctctgactgtggtggagcagctcagcaggataataagcttactcgcctgaccttgggtctctctctcatcctttctcttggctaaccttcattttggtgccaaaacccaggaaggggataggctctggctgggcgtccttagaggattctctctctctctctcctatcatcccttacccagccaacctccccttcccgaacctgctaaagaccctaaggatctcccaaaattctcccattgttggccacctcatccaccatcaaagcctctgagagggtttttacagggccgtgttagagccttcacccatggaacagtacaagacatgatgctactccgagaataccgacagctccaggaacagcagtccctactacccagcctctccccccaaccatcgcccctattcagcaagaagcagccagaggacaacggcgcccctcttctattacctattaaaaggctggaatgttaggaacaagttgcacccagaacccctccccctccccccccgcccccgacccccccccccccaccccaatgcagctgtcccttaccctgaatactctgcagctgcattcctggacccttatctaggcgctacagcaaggtcaccagacttgctttaaccctacgggcagcatgggggaggtcacgagaaacgtggataaacctaagttacaccctcttgtaaattcctatattgtaacctggtcacgagatgatatgtggtaaggttaaccaacaaacaaccccagggtctctctcccccatataaaaccctcattttgtaagctcagggctgcctcctttgactgtggtgaagcagcctggcaggttagtaaacttactctcctgannttgggtctctctctcgtcctttctctcggctaaccttacagcgccctcatccattctccaattataatgtgtttacacctttcctcctgcatgtctcacattttaccttgtcatcctcttacttgtgtatgtgtctatgcctcccagcatttgacagtacctgaaggtcaaagcctatctgctgtttacccttacaattctattcactcggcacgcactaggcacagaataaatgccattcatccctacttttacttcagggtacattttagagatctaagatttggtgtatctttcccattatccattcttattgcctcaaggctctcctcttataaatctagtggtatgcattactttgggggtaaggacaaatttatccagaacagagaagatttagttcagtctttagttttaaaataagcatttttaagtaatagcagagacaaaagtctgaaagccaacatagttttaatttaaaagaaatttgattttgctacagctttttggccaggagtaagtgaggatgctgtttcgaaagctggtcttgcatcttaagcagtacggtgtgggtcttaggggctggagtgtatcttgcaggaaacacagagtaggcaagaatgtgaggtggtgtaagactagtttgtctggttcaaaaagtaaaaaagaagactgaaaaaagtaggaaatctaacccaaagcaatcaatctttgagaagagcccagcacacttcccttccaattgatttgtcctacacccctccatgagcctaagcattagagcagaaatgactgagggtagcatccaagccactgggccaaggggcactggtacgatgaggataccgtgtcccacaattccagggtagtctgggaaaaacaaagcagagttcctgagaagaatgcagtagtggctgacagaacccagaaagggtgttgtagtgatatgtggccatgacatcagaagactaaaatgaggctatggatattccctagcaaatgtcttgggaacagaggccaaagccgaaagctcaagaattaatggaatgactacacctcaacgaaggttatagattagtgaggactgatgagtacaaaccagactcacacatccatcctcatcctcactccccacccccaggctacaatattacatatatgtcccctactcctgagggatggaaaagaggatgggtaggataagttcaaactgctttaatggctaacaaaattcacctttattcctttttatttttagttgacatgtaaaaattgtacatatttattggctacagagtgatattttgatacaagtataaagtgtgtaatgatcaaatcagagtaattagcacatcaatcacctcaaatagttatcacttatttgtactgggaacactcgaaatccttttctagctttgaaaaaatatacaataaattattgttaactgtattcaccacatagcactatagaacagtagaacagaatttattcctcctatattgctgtaattttgtatctgttaattaacctctccctagcctcccctccccctacccttcccaatctctcataaccacaattctactctctagatctatgagctcattttttaagtccctgcatttgagtgagaagatgaagtatttatctttctgcgcatgacttgctttgcttaacataatatcctccagattcatccacgttggtgcaaatggcaaggattccatactttattttatgggtgattattgttccattgtgtgtataccatat

SEQ ID NO: 733405 - DNA, 2613 bp, Homo sapiens
  misc_feature (838)..(839): n is a, c, g, or t
gctgcctcctctgactgtggtggagcagctcagcaggataataagcttactcgcctgaccttgggtctctctctcatcctttctcttggctaaccttcattttggtgccaaaacccaggaaggggataggctctggctgggcgtccttagaggattctctctctctctctcctatcatcccttacccagccaacctccccttcccgaacctgctaaagaccctaaggatctcccaaaattctcccattgttggccacctcatccaccatcaaagcctctgagagggtttttacagggccgtgttagagccttcacccatggaacagtacaagacatgatgctactccgagaataccgacagctccaggaacagcagtccctactacccagcctctccccccaaccatcgcccctattcagcaagaagcagccagaggacaacggcgcccctcttctattacctattaaaaggctggaatgttaggaacaagttgcacccagaacccctccccaccccaatgcagctgtcccttaccctgaatactctgcagctgcattcctggacccttatctaggcgctacagcaaggtcaccagacttgctttaaccctacgggcagcatgggggaggtcacgagaaacgtggataaacctaagttacaccctcttgtaaattcctatattgtaacctggtcacgagatgatatgtggtaaggttaaccaacaaacaaccccagggtctctctcccccatataaaaccctcattttgtaagctcagggctgcctcctttgactgtggtgaagcagcctggcaggttagtaaacttactctcctgannttgggtctctctctcgtcctttctctcggctaaccttacagcgccctcatccattctccaattataatgtgtttacacctttcctcctgcatgtctcacattttaccttgtcatcctcttacttgtgtatgtgtctatgcctcccagcatttgacagtacctgaaggtcaaagcctatctgctgtttacccttacaattctattcactcggcacgcactaggcacagaataaatgccattcatccctacttttacttcagggtacattttagagatctaagatttggtgtatctttcccattatccattcttattgcctcaaggctctcctcttataaatctagtggtatgcattactttgggggtaaggacaaatttatccagaacagagaagatttagttcagtctttagttttaaaataagcatttttaagtaatagcagagacaaaagtctgaaagccaacatagttttaatttaaaagaaatttgattttgctacagctttttggccaggagtaagtgaggatgctgtttcgaaagctggtcttgcatcttaagcagtacggtgtgggtcttaggggctggagtgtatcttgcaggaaacacagagtaggcaagaatgtgaggtggtgtaagactagtttgtctggttcaaaaagtaaaaaagaagactgaaaaaagtaggaaatctaacccaaagcaatcaatctttgagaagagcccagcacacttcccttccaattgatttgtcctacacccctccatgagcctaagcattagagcagaaatgactgagggtagcatccaagccactgggccaaggggcactggtacgatgaggataccgtgtcccacaattccagggtagtctgggaaaaacaaagcagagttcctgagaagaatgcagtagtggctgacagaacccagaaagggtgttgtagtgatatgtggccatgacatcagaagactaaaatgaggctatggatattccctagcaaatgtcttgggaacagaggccaaagccgaaagctcaagaattaatggaatgactacacctcaacgaaggttatagattagtgaggactgatgagtacaaaccagactcacacatccatcctcatcctcactccccacccccaggctacaatattacatatatgtcccctactcctgagggatggaaaagaggatgggtaggataagttcaaactgctttaatggctaacaaaattcacctttattcctttttatttttagttgacatgtaaaaattgtacatatttattggctacagagtgatattttgatacaagtataaagtgtgtaatgatcaaatcagagtaattagcacatcaatcacctcaaatagttatcacttatttgtactgggaacactcgaaatccttttctagctttgaaaaaatatacaataaattattgttaactgtattcaccacatagcactatagaacagtagaacagaatttattcctcctatattgctgtaattttgtatctgttaattaacctctccctagcctcccctccccctacccttcccaatctctcataaccacaattctactctctagatctatgagctcattttttaagtccctgcatttgagtgagaagatgaagtatttatctttctgcgcatgacttgctttgcttaacataatatcctccagattcatccacgttggtgcaaatggcaaggattccatactttattttatgggtgattattgttccattgtgtgtataccatat

SEQ ID NO: 733406 - DNA, 1119 bp, Homo sapiens
  misc_feature (1113)..(1113): n is a, c, g, or t
tttttaattattattatactttaagttttagggtacatgtgcacaatgtgcaggtttgttacatatgtaggaactattgttcttaatacccattttatttcccaatctgcccctgacatccggcacaaacttaaaaaggctgaagatggctctcaaaccccacaacaagacctccttaacctggctttcaaagtctttaataacagggacgagcaaaataaattagataaagcccaaagagatcgtgctaaataccagcttccagcagtggctatctgtcagtctagccatagtacccaagggcacaaaagacctgatagcagcaaacctcctgggccttgttttaagtgcggcaaagaaggccactggacgggggcatgtccccacccatgagtgccgaagagcccttgcctagtctgccagcagatgggcactggaagtctgactgtcctctcaacagatgggcagacaagcatgctcctcagagccaccatcccttcaacaagacaaaaagtgaagaatcacttgcactcccatagctccttggcctagccactgaagactgatgaggccagggcccctgggccccggctcccggcccccactgccatcactgcatcggagcccagggtaactctactagtagcaggtaagctgatctcttttttaattgatagtggggccacctactcagctttgcctgagttctcaggacccactcatccctctcaagtctcagttgtgggggttgacggactcatctcttgtccgcttgccaccagacctcttacttgttccctgtttgatgccattttctcacactctttccttatcatgcctcattgccccacccccattctaggctgagaccttttagccaaagtcaaagcttctatcaccttttcttgcccccttcaaccagagtcccctcctgctcctctccgctagtccggcccctgacccctttccccagtacccacttcctgcctctctcattaacccttccgtagctgctcaccatgaccccatcagaatccagttaaaagactcttccaaatttcccagcgttcctcaataccccaacagagagagctcgggatcctctagatcacncagcac

SEQ ID NO: 733407 - DNA, 958 bp, Homo sapiens
  misc_feature (952)..(952): n is a, c, g, or t
tttttaattattattatactttaagttttagggtacatgtgcacaatgtgcaggtttgttacatatgtaggaactattgttcttaatacccattttatttcccaatctgcccctgacatccggcacaaacttaaaaaggctgaagatggctctcaaaccccacaacaagacctccttaacctggctttcaaagtctttaataacagggacgagcaaaataaattagataaagcccaaagagatcgtgctaaataccagcttccagcagtggctatctgtcagtctagccatagtacccaagggcacaaaagacctgatagcagcaaacctcctgggccttgttttaagtgcggcaaagaaggccactggacgggggcatgtccccacccatgagtgccgaagagcccttgcctagtctgccagcagatgggcactggaagtctgactgtcctctcaacagatgggcagacaagcatgctcctcagagccaccatcccttcaacaagacaaaaagtgaagaatcacttgcactcccatagctccttggcctagccactgaagactgatgaggccagggcccctgggccccggctcccggcccccactgccatcactgcatcggagcccagggtaactctactagtagcaggtaagctgatctcttttttaattgatagtggggccacctactcagctttgcctgagttctcaggacccactcatccctctcaagtctcagttgtgggggttgacggactcatctcttgtccgcttgccaccagacctcttacttgttccctgtttgatgccattttctcacactctttccttatcatgcctcattgccccacccccattctaggctgagaccttttagccaaagtcaaagcttctatcaccttttcttgcccccttcaaccaacagagagagctcgggatcctctagatcacncagcac

SEQ ID NO: 733408 - DNA, 945 bp, Homo sapiens
  misc_feature (939)..(939): n is a, c, g, or t
gctgcctcctctgactgtggtggagcagctcagcaggataataagcttactcgcctgaccttgggtctctctctcatcctttctcttggctaaccttcattttggtgccaaaacccaggaaggggataggctctggctgggcgtccttagaggattctctctctctctctcctatcatcccttacccagccaacctccccttcccgaacctgctaaagaccctaaggatctcccaaaattctcccattgttggccacctcatccaccatcaaagcctctgagagggatgggcagacaagcatgctcctcagagccaccatcccttcaacaagacaaaaagtgaagaatcacttgcactcccatagctccttggcctagccactgaagactgatgaggccagggcccctgggccccggctcccggcccccactgccatcactgcatcggagcccagggtaactctactagtagcaggtaagctgatctcttttttaattgatagtggggccacctactcagctttgcctgagttctcaggacccactcatccctctcaagtctcagttgtgggggttgacggactcatctcttgtccgcttgccaccagacctcttacttgttccctgtttgatgccattttctcacactctttccttatcatgcctcattgccccacccccattctaggctgagaccttttagccaaagtcaaagcttctatcaccttttcttgcccccttcaaccagagtcccctcctgctcctctccgctagtccggcccctgacccctttccccagtacccacttcctgcctctctcattaacccttccgtagctgctcaccatgaccccatcagaatccagttaaaagactcttccaaatttcccagcgttcctcaataccccaacagagagagctcgggatcctctagatcacncagcac

SEQ ID NO: 733409 - DNA, 673 bp, Homo sapiens
  misc_feature (631)..(631): n is a, c, g, or t
  misc_feature (659)..(659): n is a, c, g, or t
gctgcctcctctgactgtggtggagcagctcagcaggataataagcttactcgcctgaccttgggtctctctctcatcctttctcttggctaaccttcattttggtgccaaaacccaggaaggggataggctctggctgggcgtccttagaggattctctctctctctctcctatcatcccttacccagccaacctccccttcccgaacctgctaaagaccctaaggatctcccaaaattctcccattgttggccacctcatccaccatcaaagcctctgagagggatgggcagacaagcatgctcctcagagccaccatcccttcaacaagacaaaaagtgaagaatcacttgcactcccatagctccttggcctagccactgaagactgatgaggccagggcccctgggccccggctcccggcccccactgccatcactgcatcggagcccagggtaactctactagtagcaggtaagctgatctcttttttaattgatagtggggccacctactcagctttgcctgagttctcaggacccactcatccctctcaagtctcagttgtgggggttgacggactcatctcttgtccgcttgccaccagacctcttacttgttccctgtctnacgccatcactctggatttatcaggatnaaatgggaccggcc

SEQ ID NO: 733410 - DNA, 784 bp, Homo sapiens
  misc_feature (778)..(778): n is a, c, g, or t
gctgcctcctctgactgtggtggagcagctcagcaggataataagcttactcgcctgaccttgggtctctctctcatcctttctcttggctaaccttcattttggtgccaaaacccaggaaggggataggctctggctgggcgtccttagaggattctctctctctctctcctatcatcccttacccagccaacctccccttcccgaacctgctaaagaccctaaggatctcccaaaattctcccattgttggccacctcatccaccatcaaagcctctgagagggatgggcagacaagcatgctcctcagagccaccatcccttcaacaagacaaaaagtgaagaatcacttgcactcccatagctccttggcctagccactgaagactgatgaggccagggcccctgggccccggctcccggcccccactgccatcactgcatcggagcccagggtaactctactagtagcaggtaagctgatctcttttttaattgatagtggggccacctactcagctttgcctgagttctcaggacccactcatccctctcaagtctcagttgtgggggttgacggactcatctcttgtccgcttgccaccagacctcttacttgttccctgtttgatgccattttctcacactctttccttatcatgcctcattgccccacccccattctaggctgagaccttttagccaaagtcaaagcttctatcaccttttcttgcccccttcaaccaacagagagagctcgggatcctctagatcacncagcac

SEQ ID NO: 733411 - DNA, 531 bp, Homo sapiens
ctttgactgtgggagaaaagtcaccagtcacaaccaagatgctgccaaagtgcccacccagttccatggtcttggtaatatttgtggttagtatgacctacatatcgtcacagctgctttcagtggccgcgtagaaaagcaagcaagcagaaaggaaccttcctggctgcggagaagctgtggagtaggctggctgcaagcaaggcctttggagcagatggagctggttgcggctctagctgtgggactttgagcaagtcattggatttctctgatcctgtttcctcattcgtaaaatgggcatgaaaagagggagttaagtgaaatgtctgtctcatgctcagggctaacagcacacaacaaatgctcaattcatggtaaatggtaatattcttgttagtagagggcacaaacacttgtatatcagctcaggagtatgtcagtttcacattcattgacatttactgtttctactggttaaaaaaattaatgcatacttgtaaaaaagtttaaagttcagaagagaaaaaa

SEQ ID NO: 733412 - DNA, 458 bp, Homo sapiens; identical to SEQ ID NO: 420

SEQ ID NO: 733413 - DNA, 387 bp, Homo sapiens
agagctagcaccatgagcttcaataccctgtagactatcttatcgaaacccgtcatttacaaacgcagaaaaatgaggcccagagaagaagtggtccaaggacacacagctcacctggagcagagtcaggaccgtccccctctcacaaatcccaggaatctttccactactacactaagctgcttcaacctttgtgtgagtgccacagtcacctgagatgatggcaggaatgaatcagtgttggaaaccctatacaaagtgaatggagagcaacagaagagtcggcaacagaagggtccccagggcagtgtgctggtgcctgaaaaatcttaccactcaggaaagcagaagaatttttttcagcagaaggttcacctggagaattct

SEQ ID NO: 733414 - DNA, 660 bp, Homo sapiens
agaattctaccccaagggcaggagttgtgttcagcaggtgcttggtagatgtgtgttggatgttgagtggatgcgagaatcccttgcgtacaactgtctggtttctacaatctgacattgaatgcctgtcagcctcactgctctaagatggtcttaaatgcctcatttgagtacagtattctttcttatttttaagtgaatttgcagtgtgtgctttcatcaagacgttatgatgagtaatttcaaagcagcttcacaattgaagttagccttaatgtacccttttgatcagtgtcctgcctacctgaaagtactacatgtaccagtaggtacataatttttaattgatttaggtttaacttttaaaaacacgtgtaaattgctttttaaaaacttctgattttagataattatagattcatatgcagttgcaagaaataatagagacaccctttatacccttaacccagtcctctacccaaaccctcccatttggtaacatcttgaatgactagaccctatcacaaccggaaaaatgacactgatagttctacactcagttgtgtgtgtgtgtggttgttttttgaaagtttaatacatttaaaggatgattaaagtatttgaactcatgaaattctttaatatttgaggttttaaaaa

SEQ ID NO: 733415 - DNA, 265 bp, Homo sapiens; identical to SEQ ID NO: 453533

SEQ ID NO: 733416 - DNA, 756 bp, Homo sapiens
gttgcagattttttggactggagagagagatagtaatttaaaaaaaaaaagaaaagaaaactttcaaaatgttcttattgaaacctggcacccatttttcttaataggagcatccttagatgggtgagtataagaggaatgggagcttttatattgtttgttttcacatcattagcagcttaccttcttgtgaagataattaaatgccgtgctcctacggaagcactcatacataatgcagcaaggagagcgggagtcccactagcttcccaccagtttccccagttcagaagttatacacttgatattttccgctgttgacaagttttctggtttgcccacacggagttatctgtagaattatctgtattatgtttctaattaagtattgagaccctgaaattacattttgatttgttctttattgagccagaaggatctagtcagaacttctgagtgatggcagcagagactgtaaagccatttccagcattgtgcagaagtacaagctttagggtgtatctattcatctattcctagtacataaaatttagccttacaaaaagatgacattgttttatgtattttttaatgtgtgcctttaaaaagatttaaaaagtagagataatttaagggtgtttataaattatggggtgctgtctggagaaggacaaatcaataaatgcttattgaacacctattgatgttgatgacgtttgttatcttgtggggtggcagcatgctggtgtgttttgt

SEQ ID NO: 733417 - DNA, 948 bp, Homo sapiens
ttttatgtgtatataaatcttgtcttttattttttaagacaaccctgaagttttctgtggaaaccagaaagggcaagaaattggtcttaggttgctcaaggaaactggtactcacttgtaccctgcggctatacattatatacaggaaaaggaggagggatccaaggagggcgtggagctcctgtgcgtggtccattaattcacattttgctctcttcggttcacatcctgcgcggactccacccaaggcaaccgagcgagggggtgggtgggactcacagcctaccaaataacagtcccagaaaccgaaacgaaatcgaggtggaattctgaaaacacggctcaccagaaagaggggtggagaaggagcgcgagaggagacccttcttttggcagaagaggtatccctggccctcgttgcttcctgggctcccccccatcccctcaatcgcaaacagttccctcctttcctacgcatggaagaaggaagacacacacagagcaaggccactcatccttggaacgtgggcggagaacacacaagtattcctcagagaatttcaaaagaaatcggggaaaagcaacctgggagaggaggaggaaaggaaactgactgccaagtgggggacccgcgagacggtggaaaggaactaagcagatagcccctgggtgcctgcgccccaggaaagaagggctacctgttgaatggaactgttcctgcggaggcggagagggaagaaggcgagtcaccccagagagcggagccgttgtccctagagcagcctcgctggggctggtggcgagggatctcagccccagtgcctgcggagccccaccctgagaagccttggctgcagatacggtgatgagagacaccgacagaaacaagggagaggcgcacgactggagccggtctggcctgtcccgcggttagtcactcacatctga

SEQ ID NO: 733418 - DNA, 588 bp, Homo sapiens
attgtgcttacatccttaaatcgatccttacatccctgtgataattggcggagtttcagttgatctacttacaaagcccttggttgggatttttcatttccactcccattgtcttaagaatacaaaagaaatagggagctatcctaaagaaaattagcaatcagatgtggagccaaattatacagaaaaaaaaaattgtttagactagttaggaagtacactgtcaaggataaacttaataaagggctaatcagttgtatacattttgaaggaagaaagagaaacactggtgtggaagagaacatcctgggtggataagattatacttgcaaagggaagaatgcgaaagtcattctcaacagtccataagtggctcatctttttttttttgagactgagtcttgctctgtgtcccaggctggagtggcacaatctcggctcagtacaatctccacctcccaggtttaagcagctacttgggaggccaaggcagagaattgcttgaatctgggaggtggaggttgcagtgagccgagatcgtgccactgcactccagcctggatgacagaatgagattccatctcaaaa

SEQ ID NO: 733419 - DNA, 559 bp, Homo sapiens
ctaaagagccaagtctgggtgctgtcgtgagaaggaaacatgggtatggaagaggcacaacttgccgtctcaaggccctggtccaaaagtggcccatatcactcctgctcccagcccttagcagggacataggcacatggccataccccactgccagctgcaaagcaggctgggaacaaaatccttacaggcatttatgtgaccagcaatagctctgtgctatggagaaaagagaaaaggaattttgctgggacagctttcggtctctgctaaatttattgattgattttcaaattttttttagatatgaggtcttgctttgttgcccaggtaggtcttgaactcctgggctcaagcgattcccccaccttggcctcccaaagtgggattacaggcatgagctaccatgcccagctgctactaaatttattacccgtaaaataaaaataaaaataaatttaaaaaggaagttgagttttgattcgatgtcttcagagggcatttccttttggaattaatcatacagaagatgtatactctgaagcaatttgaagattta

SEQ ID NO: 733420 - DNA, 760 bp, Homo sapiens; identical to SEQ ID NO: 4991
  misc_feature (752)..(752): n is a, c, g, or t
  misc_feature (754)..(754): n is a, c, g, or t
  misc_feature (756)..(758): n is a, c, g, or t
  misc_feature (760)..(760): n is a, c, g, or t

SEQ ID NO: 733421 - DNA, 1044 bp, Homo sapiens; identical to SEQ ID NO: 4993
  misc_feature (1036)..(1036): n is a, c, g, or t
  misc_feature (1038)..(1038): n is a, c, g, or t
  misc_feature (1040)..(1042): n is a, c, g, or t
  misc_feature (1044)..(1044): n is a, c, g, or t

SEQ ID NO: 733422 - DNA, 607 bp, Homo sapiens
tgcatgatctaaggtagtggaaatggttgtggacaaactataaatgactaaactggatgattatctctcttggtctagtcattactgtggtgctagggttactttttacaatcttgttctaattttttttaacttcttgcatttcatcccagatcctggttcctatcctagttattaaggtaaaatagagaaccagaatagtttatcaggtatctgcattccttcaatatgaattataatggtacagatatggggataaaaggaatctttttctgctattaagtttatcagaaaagccccaatagttaaatatttgttttcagtagagggtataataagggaaaattatataacattatatgccaaataggaaactgatcttggttggaaataaagttgtaggaagaaaagctagccaattagtggctgagtagaggggactgcctgtcggtggggcttcatatcatcaacaagaagtgtgctagccttcttggctcctcatttcttttcttcctggaatccccagtactgcttttagccttctgtaaccactgccttcttggaggacctgcctcaggctatgatagcttgttacgtgacttagagc

SEQ ID NO: 733423 - DNA, 666 bp, Homo sapiens; identical to SEQ ID NO: 5046
  misc_feature (661)..(661): n is a, c, g, or t
  misc_feature (663)..(666): n is a, c, g, or t

SEQ ID NO: 733424 - DNA, 590 bp, Homo sapiens
cgagaaggggaagaattttatttatctgccactaatccccatgtgtctcatacccaaatctaggattttcctcttcccacctggagtatccggcgtgcatggtttatccacaattaaagcagactgcaggctgctcccctcaccagaaagccgctcccttaagcagccatagattacatgccctggctctgcctgccagagaaagccggtggatttgattttgttagcaagagctgactgagaccctagcagctgcattctactttacatattaaagagtggaaatacaaataggacagtccttttgccactgcaagagcagggggggttaggtgggtagaaaggcaggattttacttgtggaaatcagtgcctgccttccatccacaaaaaccagatgtcaatatggaggaggcacatgtcagcggcgcctgggaagcctgagttccagctttccctccccacaaccctgctctgtaactgtgggcagagcatgtctgctccaagagcctcagtttacacccctgaaaaatggagttaatgccttacagggattttatgagccacagtaagagattatgtgtgaaagaa

SEQ ID NO: 733425 - DNA, 821 bp, Homo sapiens
aaactacattttgcaaagtcattgaactctgagctcagttgcagtactcgggaagccatgcaggatgaagatggatacatcaccttaaatattaaaactcggaaaccagctctcgtctccgttggctctgcatcctcctcctggtggcgtgtgatggctttgattctgctgatcctgtgcgtggggatggttgtcgggctggtggctctggggatttggtctgtcatgcagcgcaattacctacaagatgagaatgaaaatcgcacaggaactctgcaacaattagcaaagcgcttctgtcaatatgtggtaaaacaatcagaactaaagggcactttcaaaggtcataaatgcagcccctgtgacacaaactggagatattatggagatagctgctatgggttcttcaggcacaacttaacatgggaagagagtaagcagtactgcactgacatgaatgctactctcctgaagattgacaaccggaacattgtggagtacatcaaagccaggactcatttaattcgttgggtcggattatctcgccagaagtcgaatgaggtctggaagtgggaggatggctcggttatctcagaaaatatgtttgagtttttggaagatggaaaaggaaatatgaattgtgcttattttcataatgggaaaatgcaccctaccttctgtgagaacaaacattatttaatgtgtgagaggaaggctggcatgaccaaggtggaccaactaccttaatgcaaagaggtggacaggataacacagataagggctttattgtacaataaaagatatgtatgaatgcataaaaa

SEQ ID NO: 733426 - DNA, 1080 bp, Homo sapiens
aaactacattttgcaaagtcattgaactctgagctcagttgcagtactcgggaagccatgcaggatgaagatggatacatcaccttaaatattaaaactcggaaaccagctctcgtctccgttggctctgcatcctcctcctggtggcgtgtgatggctttgattctgctgatcctgtgcgtggggatggttgtcgggctggtggctctggggatttggtctgtcatgcagcgcaattacctacaagatgagaatgaaaatcgcacaggaactctgcaacaattagcaaagcgcttctgtcaatatgtggtaaaacaatcagaactaaagggcactttcaaaggtcataaatgcagcccctgtgacacaaactggagatattatggagatagctgctatgggttcttcaggcacaacttaacatgggaagagagtaagcagtactgcactgacatgaatgctactctcctgaagattgacaaccggaacattgtggagtacatcaaagccaggactcatttaattcgttgggtcggattatctcgccagaagtcgaatgaggtctggaagtgggaggatggctcggttatctcagaaaatatgtttgagtttttggaagatggaaaaggaaatatgaattgtgcttattttcataatgggaaaatgcaccctaccttctgtgagaacaaacattatttaatgtgtgagaggaaggctggcatgaccaaggtggaccaactaccttaatgcaaagaggtggacaggataacacagataagggctttattgtacaataaaagatatgtatgaatgcataaaaagctgaaaattgcttatttctccctttcttctcactggagttatttttaatattatctttcctatcagaattacctagtcccttctttgaatatacagaagccatcacgtgagtttatcatttgcttcccaattgttctattttcctttaattttctttcttcttgtccttcatttctaattacctgaacatggtatgatttactgcatcttcagatatacacatataacatcaaaatcaggccaatataggttagggct

SEQ ID NO: 733427 - DNA, 322 bp, Homo sapiens
cctattttcctcagtctctatttggtgcatcaaactactatacgcagagtctgattactgattgtttgctcagttttcaaaggaatttattctaactttcccttcacaggtttgagtttttggaagatggaaaaggaaatatgaattgtgcttattttcataatgggaaaatgcaccctaccttctgtgagaacaaacattatttaatgtgtgagaggaaggctggcatgaccaaggtggaccaactaccttaatgcaaagaggtggacaggataacacagataagggctttattgtacaataaaagatatgtatgaatgca

SEQ ID NO: 733428 - DNA, 3649 bp, Homo sapiens
agggaggtggggagcggcaagccccgcctcagcccctctggcaggctcccgccagcgtcgctgcggctccggcccgggagcgagcgcccggagctcggaaagatgcggcgcccgcggcggcctgggggtctcgggggatccgggggtctccggctgctcctctgcctcctgctgctgagcagccgcccggggggctgcagcgccgttagtgcccacggctgtctatttgaccgcaggctctgctctcacctggaagtctgtattcaggatggcttgtttgggcagtgccaggtgggagtggggcaggcccggccccttttgcaagtcacctccccagttctccaacgcttacaaggtgtgctccgacaactcatgtcccaaggattgtcctggcacgatgacctcacccagtatgtgatctctcaggagatggagcgcatccccaggcttcgccccccagagccccgtccaagggacaggtctggcttggcacccaagagacctggtcctgctggagagctgcttttacaggacatccccactggctccgcccctgctgcccagcatcggcttccacaaccaccagtgggcaaaggtggagctggggccagctcctctctgtcccctctgcaggctgagctgctcccgcctctcttggagcacctgctgctgcccccacagcctccccacccttcactgagttacgaacctgccttgctgcagccctacctgttccaccagtttggctcccgtgatggctccagggtctcagagggctccccagggatggtcagtgtcggccccctgcccaaggctgaagcccctgccctcttcagcagaactgcctccaagggcatatttggggaccaccctggccactcctacggggaccttccagggccttcacctgcccagctttttcaagactctgggctgctctatctggcccaggagttgccagcacccagcagggccagggtgccaaggctgccagagcaagggagcagcagccgggcagaggactccccagagggctatgagaaggaaggactaggggatcgtggagagaagcctgcttccccagctgtgcagccagatgcggctctgcagaggctggccgctgtgctggcgggctatggggtagagctgcgtcagctgacccctgagcagctctccacactcctgaccctgctgcagctactgcccaagggtgcaggaagaaatccgggaggggttgtaaatgttggagctgatatcaagaaaacaatggaggggccggtggagggcagagacacagcagagcttccagcccgcacatcccccatgcctggacaccccactgccagccctacctccagtgaagtccagcaggtgccaagccctgtctcctctgagcctcccaaagctgccagaccccctgtgacacctgtcctgctagagaagaaaagcccactgggccagagccagcccacggtggcaggacagccctcagcccgcccagcagcagaggaatatggctacatcgtcactgatcagaagcccctgagcctggctgcaggagtgaagctgctggagatcctggctgagcatgtgcacatgtcctcaggcagcttcatcaacatcagtgtggtgggaccagccctcaccttccgcatccggcacaatgagcagaacctgtctttggctgatgtgacccaacaagcagggctggtgaagtctgaactggaagcacagacagggctccaaatcttgcagacaggagtgggacagagggaggaggcagctgcagtccttccccaaactgcgcacagcacctcacccatgcgctcagtgctgctcactctggtggccctggcaggtgtggctgggctgctggtggctctggctgtggctctgtgtgtgcggcagcatgcgcggcagcaagacaaggagcgcctggcagccctggggcctgagggggcccatggtgacactacctttgagtaccaggacctgtgccgccagcacatggccacgaagtccttgttcaaccgggcagagggtccaccggagccttcacgggtgagcagtgtgtcctcccagttcagcgacgcagcccaggccagccccagctcccacagcagcaccccgtcctggtgcgaggagccggcccaagccaacatggacatctccacgggacacatgattctggcatacatggaggatcacctgcggaaccgggaccgccttgccaaggagtggcaggccctctgtgcctaccaagcagagccaaacacctgtgccaccgcgcagggggagggcaacatcaaaaagaaccggcatcctgacttcctgccctatgaccatgcccgcataaaactgaaggtggagagcagcccttctcggagcgattacatcaacgccagccccattattgagcatgaccctcggatgccagcctacatagccacgcagggcccgctgtcccataccatcgcagacttctggcagatggtgtgggagagcggctgcaccgtcatcgtcatgctgaccccgctggtggaggatggtgtcaagcagtgtgaccgctactggccagatgagggtgcctccctctaccacgtatatgaggtgaacctggtgtcggagcacatctggtgcgaggactttctggtgcggagcttctacctgaagaacgtgcagacccaggagacgcgcacgctcacgcagttccacttcctcagctggccggcagagggcacaccggcctccacgcggcccctgctggacttccgcaggaaggtgaacaagtgctaccggggccgctcctgccccatcatcgtgcactgcagtgatggtgcggggaggaccggcacctacatcctcatcgacatggtcctgaaccgcatggcaaaaggagtgaaggagattgacatcgctgccaccctggagcatgtccgtgaccagcggcctggccttgtccgctctaaggaccagtttgaatttgccctgacagccgtggcggaggaagtgaatgccatcctcaaggccctgccccagtgagaccctggggccccttggcgggcagcccagcctctgtccctctttgcctgtgtgagcatctctgtgtacccactcctcactgccccaccagccacctcttgggcatgctcagcccttcctagaagagtcaggaagggaaagccagaaggggcacgcctgcccagcctcgcatgccagagcctggggcatcccagagcccagggcatcccatgggggtgctgcagccaggaggagaggaaaggacatgggtagcaattctacccagagccttctcctgcctacattccctggcctggctctcctgtagctctcctggggtctgggagttccctgaacatctgtgtgtgtccccctatgctccagtatggaagaatggggtggagggtcgccacacccggctccccctgcttctcagccccgggcctgcctctgactcacacttgggcgctctgccctccctggcctcacgcccagcctcctcccaccaccctcccaccatgcgctgctcaacctctctccttctggcgcaagagaacatttctagaaaaaactacttttgtaccagtgtgaataaagttagtgtgttgtctgtgcagctgcaaaaaaa

SEQ ID NO: 733429 - DNA, 461 bp, Homo sapiens
ggctgtctatttgaccgcaggctctgctctcacctggaagtctgtattcaggatggcttgtttgggcagtgccaggtgggagtggggcaggcccggccccttttgcaagtcacctccccagttctccaacgcttacaaggtgtgctccgacaactcatgtcccaagagtaagaggtggaaccctagagatgggctattcacatttggactctctggagaagcccagaggagccttctaagaagaagtcactggaaaaggccagcttccatcttcttaggaccagttcctctcactggcattgtctgagtgctacagagccaagaactctggaatcctcagccaggataatattccactcacccaattcctcattcaacaagtatttattgagtacttactatgtagcaggcatagttttaggtatttggaatgtatcgggaataaaacaaagatctctgct

SEQ ID NO: 733430 - DNA, 3562 bp, Homo sapiens
agggaggtggggagcggcaagccccgcctcagcccctctggcaggctcccgccagcgtcgctgcggctccggcccgggagcgagcgcccggagctcggaaagatgcggcgcccgcggcggcctgggggtctcgggggatccgggggtctccggctgctcctctgcctcctgctgctgagcagccgcccggggggctgcagcgccgttagtgcccacggctgtctatttgaccgcaggctctgctctcacctggaagtctgtattcaggatggcttgtttgggcagtgccaggtgggagtggggcaggcccggccccttttgcaagtcacctccccagttctccaacgcttacaaggtgtgctccgacaactcatgtcccaaggattgtcctggcacgatgacctcacccagtatgtgatctctcaggagatggagcgcatccccaggcttcgccccccagagccccgtccaagggacaggtctggcttggcacccaagagacctggtcctgctggagagctgcttttacaggacatccccactggctccgcccctgctgcccagcatcggcttccacaaccaccagtgggcaaaggtggagctggggccagctcctctctgtcccctctgcaggctgagctgctcccgcctctcttggagcacctgctgctgcccccacagcctccccacccttcactgagttacgaacctgccttgctgcagccctacctgttccaccagtttggctcccgtgatggctccagggtctcagagggctccccagggatggtcagtgtcggccccctgcccaaggctgaagcccctgccctcttcagcagaactgcctccaagggcatatttggggaccaccctggccactcctacggggaccttccagggccttcacctgcccagctttttcaagactctgggctgctctatctggcccaggagttgccagcacccagcagggccagggtgccaaggctgccagagcaagggagcagcagccgggcagaggactccccagagggctatgagaaggaaggactaggggatcgtggagagaagcctgcttccccagctgtgcagccagatgcggctctgcagaggctggccgctgtgctggcgggctatggggtagagctgcgtcagctgacccctgagcagctctccacactcctgaccctgctgcagctactgcccaagggtgcaggaagaaatccgggaggggttgtaaatgttggagctgatatcaagaaaacaatggaggggccggtggagggcagagacacagcagagcttccagcccgcacatcccccatgcctggacaccccactgccagccctacctccagtgaagtccagcaggtgccaagccctgtctcctctgagcctcccaaagctgccagaccccctgtgacacctgtcctgctagagaagaaaagcccactgggccagagccagcccacggtggcaggacagccctcagcccgcccagcagcagaggaatatggctacatcgtcactgatcagaatgtggtgggaccagccctcaccttccgcatccggcacaatgagcagaacctgtctttggctgatgtgacccaacaagcagggctggtgaagtctgaactggaagcacagacagggctccaaatcttgcagacaggagtgggacagagggaggaggcagctgcagtccttccccaaactgcgcacagcacctcacccatgcgctcagtgctgctcactctggtggccctggcaggtgtggctgggctgctggtggctctggctgtggctctgtgtgtgcggcagcatgcgcggcagcaagacaaggagcgcctggcagccctggggcctgagggggcccatggtgacactacctttgagtaccaggacctgtgccgccagcacatggccacgaagtccttgttcaaccgggcagagggtccaccggagccttcacgggtgagcagtgtgtcctcccagttcagcgacgcagcccaggccagccccagctcccacagcagcaccccgtcctggtgcgaggagccggcccaagccaacatggacatctccacgggacacatgattctggcatacatggaggatcacctgcggaaccgggaccgccttgccaaggagtggcaggccctctgtgcctaccaagcagagccaaacacctgtgccaccgcgcagggggagggcaacatcaaaaagaaccggcatcctgacttcctgccctatgaccatgcccgcataaaactgaaggtggagagcagcccttctcggagcgattacatcaacgccagccccattattgagcatgaccctcggatgccagcctacatagccacgcagggcccgctgtcccataccatcgcagacttctggcagatggtgtgggagagcggctgcaccgtcatcgtcatgctgaccccgctggtggaggatggtgtcaagcagtgtgaccgctactggccagatgagggtgcctccctctaccacgtatatgaggtgaacctggtgtcggagcacatctggtgcgaggactttctggtgcggagcttctacctgaagaacgtgcagacccaggagacgcgcacgctcacgcagttccacttcctcagctggccggcagagggcacaccggcctccacgcggcccctgctggacttccgcaggaaggtgaacaagtgctaccggggccgctcctgccccatcatcgtgcactgcagtgatggtgcggggaggaccggcacctacatcctcatcgacatggtcctgaaccgcatggcaaaaggagtgaaggagattgacatcgctgccaccctggagcatgtccgtgaccagcggcctggccttgtccgctctaaggaccagtttgaatttgccctgacagccgtggcggaggaagtgaatgccatcctcaaggccctgccccagtgagaccctggggccccttggcgggcagcccagcctctgtccctctttgcctgtgtgagcatctctgtgtacccactcctcactgccccaccagccacctcttgggcatgctcagcccttcctagaagagtcaggaagggaaagccagaaggggcacgcctgcccagcctcgcatgccagagcctggggcatcccagagcccagggcatcccatgggggtgctgcagccaggaggagaggaaaggacatgggtagcaattctacccagagccttctcctgcctacattccctggcctggctctcctgtagctctcctggggtctgggagttccctgaacatctgtgtgtgtccccctatgctccagtatggaagaatggggtggagggtcgccacacccggctccccctgcttctcagccccgggcctgcctctgactcacacttgggcgctctgccctccctggcctcacgcccagcctcctcccaccaccctcccaccatgcgctgctcaacctctctccttctggcgcaagagaacatttctagaaaaaactacttttgtaccagtgtgaataaagttagtgtgttgtctgtgcagctgcaaaaaaa

SEQ ID NO: 733431 - DNA, 1884 bp, Homo sapiens
agggaggtggggagcggcaagccccgcctcagcccctctggcaggctcccgccagcgtcgctgcggctccggcccgggagcgagcgcccggagctcggaaagatgcggcgcccgcggcggcctgggggtctcgggggatccgggggtctccggctgctcctctgcctcctgctgctgagcagccgcccggggggctgcagcgccgttagtgcccacggctgtctatttgaccgcaggctctgctctcacctggaagtctgtattcaggatggcttgtttgggcagtgccaggtgggagtggggcaggcccggccccttttgcaagtcacctccccagttctccaacgcttacaaggtgtgctccgacaactcatgtcccaaggattgtcctggcacgatgacctcacccagtatgtgatctctcaggagatggagcgcatccccaggcttcgccccccagagccccgtccaagggacaggtctggcttggcacccaagagacctggtcctgctggagagctgcttttacaggacatccccactggctccgcccctgctgcccagcatcggcttccacaaccaccagtgggcaaaggtggagctggggccagctcctctctgtcccctctgcaggctgagctgctcccgcctctcttggagcacctgctgctgcccccacagcctccccacccttcactgagttacgaacctgccttgctgcagccctacctgttccaccagtttggctcccgtgatggctccagggtctcagagggctccccagggatggtcagtgtcggccccctgcccaaggctgaagcccctgccctcttcagcagaactgcctccaagggcatatttggggaccaccctggccactcctacggggaccttccagggccttcacctgcccagctttttcaagactctgggctgctctatctggcccaggagttgccagcacccagcagggccagggtgccaaggctgccagagcaagggagcagcagccgggcagaggactccccagagggctatgagaaggaaggactaggggatcgtggagagaagcctgcttccccagctgtgcagccagatgcggctctgcagaggctggccgctgtgctggcgggctatggggtagagctgcgtcagctgacccctgagcagctctccacactcctgaccctgctgcagctactgcccaagggtgcaggaagaaatccgggaggggttgtaaatgttggagctgatatcaagaaaacaatggaggggccggtggagggcagagacacagcagagcttccagcccgcacatcccccatgcctggacaccccactgccagccctacctccagtgaagtccagcaggtgccaagccctgtctcctctgagcctcccaaagctgccagaccccctgtgacacctgtcctgctagagaagaaaagcccactgggccagagccagcccacggtggcaggacagccctcagcccgcccagcagcagaggaatatggctacatcgtcactgatcagaatgtggtgggaccagccctcaccttccgcatccggcacaatgagcagaacctgtctttggctgatgtgacccaacaagcagggctggtgaagtctgaactggaagcacagacagggctccaaatcttgcagacaggagtgggacaggacctgtgccgccagcacatggccacgaagtccttgttcaaccgggcagagggtccaccggagccttcacgggtgagcagtgtgtcctcccagttcagcgacgcagcccaggccagccccagctcccacagcagcaccccgtcctggtgcgaggagccggcccaagccaacatggacatctccacgggacacatgattctg

SEQ ID NO: 733432 - DNA, 1888 bp, Homo sapiens; identical to SEQ ID NO: 8972

SEQ ID NO: 733433 - DNA, 603 bp, Homo sapiens; identical to SEQ ID NO: 8957
  misc_feature (534)..(534): n is a, c, g, or t
  misc_feature (539)..(539): n is a, c, g, or t
  misc_feature (547)..(547): n is a, c, g, or t
  misc_feature (549)..(549): n is a, c, g, or t

SEQ ID NO: 733434 - DNA, 1299 bp, Homo sapiens; identical to SEQ ID NO: 10513

SEQ ID NO: 733435 - DNA, 1320 bp, Homo sapiens; identical to SEQ ID NO: 728836

SEQ ID NO: 733436 - DNA, 427 bp, Homo sapiens
ttgtctagtaattttgactccctccttatttagtagtgacaggatcctaagattaacaagagttttaaatttgtaaaacaatctgaagattgagggagctggctaggtgcattaaaatgtgtacttttcctagacctgatagggttacagcaacatgctcacgtagattgggacagagcctccttctgtttccctgtctagaatcccttgtaggctgtttgtggttgttgcaaaaacaatattgcccaaccatttcaagaacatcactgtaaactcttctggggcagttagtgaaaatgatgaatgaggtttctatggagtacccagcatcatgcttctctggattcttcttattccccagttgtgctcttctgagtgctaaggactttcatggaaaggagttttctgcttaatatgtttcaaagag

SEQ ID NO: 733437 - DNA, 657 bp, Homo sapiens
gacacaaagaaactttgtcaaaattggctgatatttgtacattttaatatatgtattttttcctgaagagctgtaaataataattgggaggggaacagggagcaggtagaggtatagaagagccaggaatagcagaatactggtaattattgaagattaataatgtttacatggtgacttgttgtagaattctgttcattttacttaagtttgaaattttctgtaataaaaatttgtaagaggttccaggggaataagcacagggagaaatgtttggatattgaacttggcattatatcatttgattgtcaactttaaaaataaaaggtaaaataaatataaagctttttaacttttttcccaaaaataattaagtaggggaaaggggggtattgaaaactggctgagagatttagagaactagaaataaaccacttgcctaaaacaaacgtaatagaaatagctaaattcaaaataattaatacggaattaattgcagcagttttcaaactgttaaatagcccagaaaaaaatggatagaggtttgtctcctaattgatttgaatccatagtttgggattttgtctacatctgattcttttaaaatgctttcttttttaaatttgctttccatatgaggattgatacaattgattc

SEQ ID NO: 733438 - DNA, 1009 bp, Homo sapiens; identical to SEQ ID NO: 214571

SEQ ID NO: 733439 - DNA, 633 bp, Homo sapiens
tgaaggcatgcagaaagcagtctggagcccagaagggacacaccagcacagtctggtaggctacagcagcaagtctctaaagaaaggctgagaacacccagaacaggagagttcaggtccaggatggccagcctgttccggtcctatctgccagcaatctggctgctgctgagccaactccttagagaaagcctagcagcagagctgaggggatgtggtccccgatttggaaaacacttgctgtcatattgccccatgcctgagaagacattcaccaccaccccaggagggtggctgctggaatctggacgtcccaaagaaatggtgtcaacctccaacaacaaagatggacaagccttaggtacgacatcagaattcattcctaatttgtcaccagagctgaagaaaccactgtctgaagggcagccatcattgaagaaaataatactttcccgcaaaaagagaagtggacgtcacagatttgatccattctgttgtgaagtaatttgtgacgatggaacttcagttaaattatgtacatagtagagtaatcatggactggacatctcatccattctcatatgtattctcaatgacaaattcactgatgcccaattaaatgattgctgttta

SEQ ID NO: 733440 - DNA, 434 bp, Homo sapiens; identical to SEQ ID NO: 214573
  misc_feature (352)..(352): n is a, c, g, or t
  misc_feature (421)..(421): n is a, c, g, or t
  misc_feature (426)..(426): n is a, c, g, or t

SEQ ID NO: 733441 - DNA, 443 bp, Homo sapiens
tggaagtgaaagtagcactttgaaaaagtattaagtaagttgcaaaccattctctataacctaaatgtcaccaaccaccagtcaggaagtttgtcctggtctatttcacttcctcacactggaggagaggtattggggtccccacaaagtattggaaaggcagcatgacttagaatgatgctcttaggactgagaaacaggagaccttggtatgagacttactttgcctccagtgagcaggggaaggtcacttcaccatctttatctaaaaaataaaggctttgggctctgatccacagagatgggtgagtcctaatgctctgtgactctatgcatctggtatccttttcctgtccagggctagaaatatattttgtcttttccagtcataagaaaagtgggaggagcctgggcaacataacaaaaccccatctctacaaaaa

SEQ ID NO: 733442 - DNA, 1718 bp, Homo sapiens
tgctgagtacctactgtatgtgagtcactgtgcaggcactagaaatataaagcaaaaaaaacagattctacccaccgggagctcctagtccagtggtgaagaggtgtattaaccctcaaggccctaagaaaatccccaatagggctctgcacaagccgggctctgataggaggtgccagtgcttttcttcttccagtttcagagccccagcgatcccagggatgaaggagagcccatttgcaaccctcttctgtctccctaagcattcaacaaacacttagtgaccatctgtcttgtgcaaaaagcttggggagtgataaaaacaaatcaaattcacattttaatttagggagtttaggagatacatcctagtgtggatttcacatggtcaatgatttgctttccttgaatttgccctctgcaaccaacacctgttcgtgctatgagactgaagtcctcctagaccgccccattcatctgagtagttagggctctggatgaaggagcaaatggacaaaataagccccctcttgctcaggacctgactaacatttcagaactgcggtcacccattttatacaaaccaaagcacttctgacagacctctgaatttgcattaaaaagagcacgtctacagctcctaacaatcaaaaacaactatgaacactgcttgcttcagtgatacaaacagacattttcttgttacatgtgtggtgatctgagaatggtgactttggacccagtttgactggttagcgtttaaataaaacttaacagactaggcaactaaaggaactcagtaaaagatcaaaagcaatgctcaaagggagtgcctgggtaaccatgatgtaattgcagattgacacatctttgggtttttcattattgtttctaaaaactagatattattgctttattattatgttgatgatgattattgaaagcacgatagcaatgtttaagtggtgagaatgactctaagcctcttttgttgctgtgactgacagaactaaagggagtttgctctcacattcacaataccaactctgccatcttatggaaaatattggaagtacctagggcatttcattatatttcaaaggcacaggttgctggtaagagggacagaaagacaagaacatagtaccttctatttctactacatgtttttaatctttaacatttttaccagcagaaatcattttttttttaaatctctcaatcttcaaataattcttagattgcttgccagcaaagatgtctcttgatcttgacactggaattcaatgtaaaaatcttgaatgatattttgtactgatatgaatttctactgtcccataacactgtgtagtgacttcactgtatattaacttcttttctacagatgtttgacttatgagatgaattaattgaaaaagtcaaagcctatcaggagctatcttatatgatgttggtagcctgtgaaaaaataaatgtcttttttcttatacaaactgataacaagacttgctttcacaattactatttacatttttgtgcatataatgcctgtatattatactcatatttgaaagtgatcagaaagtgttatttaacagaaactacatacattttttatgtctctctggaccctttgattctaagtaaatttacagtaagttagcagtaatagactattcttttcaactatgaataaaatgtacactgaagtacaagat

SEQ ID NO: 733443 - DNA, 396 bp, Homo sapiens
gcatcccaaggcacttgcccagagctgcagagttgtgtgtgccatacctgcggctcaaagggaaggccttctatcccctgagtttctatcagctgaaaatggcaactgctgtctcagtaaaagctctgtcttgactgcagaggctccaaaagcattcacagttgagggggagaaagacagaaagaagaagccaaagataacctgatccctgcctgtctgttggcacctgtcatcctctggcttctgctcccaaaagcaagtctggatgactgagttttgtggacatgggcactcccggagacagcagtggccaccatgggacccagagttttgcccaagtacttgaatgtttttgttgaggcaaccatgttttccccaagtaggtaggccagcgct

SEQ ID NO: 733444 - DNA, 782 bp, Homo sapiens
ttcaatcatgccatttaattttttaaatacgcaagtgtagttttataatttgtgtctgataattctaatatctgaagtcttagtaggtctgtttcagttgtcctgtaattatgcatgtttttgcccatgttgctttgtttccttgtatgcttggttatctttcttactgcccttgcaaaattatttggagagtcctgggaggcttaaatgaagataacttttaggaataatttgcatttgcttttgccgaggatcttgggatcatttcaaccaaaatcttagcttgaaattccgcaatcaatcaaggtgatgagaacctggtcagtaaatcctaatgagggccaggctgtggccaaagatttttagacagatgtttccctcctttgccatttctcttttctttcctcctctgctcctcttagtgtccagacaaccttcatggaagtccttggggtgggtgggaaatgaggacggcaggtttcattctaggtatagccctttgaggtctaacttaatgcagagagagttttctggtctatgtgccaccttacatgggatcttgagccttgatttctaaaccccttgcctttgatgtttcagaattgaagcttaaatttgccaacaggcaaatgtcctcaaggcaaattggcttaggtgttcgatattcttcttaccagaaaggtaaacttgggttttttacttcacccaggatttggcatgacagttccccattatttggtccgttaggggtaaggatgcgtttaacaattgcgttgtttcgg

SEQ ID NO: 733445 - DNA, 3215 bp, Homo sapiens; identical to SEQ ID NO: 23786

SEQ ID NO: 733446 - DNA, 1331 bp, Homo sapiens
  misc_feature (2)..(2): n is a, c, g, or t
anataaaagaaaagaagaggaaaagataactctgttataccaattactaggtatgtgaaagagaaaacaaccaacagtgtataagggcgacagaatcaaggctgggatatggaaggaggggaggaagagaggaagagagaacagaaaatatttttccaagttgtggttcttgatccaagatctgaaaatataaggtttaacttgccaaagtagggcaatggcttgccaatgggacaacggctgctttgtaaaaccatttgctctgagttcagataagtaaaaactatttctcctattttccttgactctctcatgcatgatctcgggttctctgtattttccagttttggatgtcaccacctatatcagttagagtccacctgctatagtaaacaaccgacacaattacagtgatttaaataagtaaactctatttctgtatgtaataatagtcctgttagttccagttatcaggcagctttgacccaggaagacattcacaaaatcagacaattttccttctgggttcctactattcaatagtttgtgcccttgtgtattcagtcaaaaataaactgcttccacatcttcattccaacccatgggagggggaaaaagactcacccatacaaaaaagcttaacttgaatcatccagaagtagcatccaatatctccactcacacacattgttccaaacatgaggtacatatgcacacctagccagaggaaagccagggacatacaggttttagctggatggtcaaatgtttagataaagatatatttatagggaataaaggaaatgaatttagggagaaaagcactacctgtctgatttctgatttcttcaagttaccttctgttcaagttggctttggctatgcagtcagtggtttgctttcattatgcatttcctgaccttagtcctatccctggttccatttttatcatcccattactatctttcatcctctcatgtatgcctttttctttattttctgattccactcccacctctcaacccaaaattttgctgtaacctctttcagcagtatattttggtacctggtacagtcaacgtgctgagtgttagggttccattaaaggaaaaatatacattttacataatttcataaagaaagatttcttacagttaagtaaattaaacaggatatcatgtacataatgcatttgatttagaagttgagttttatgatgtttagaaactgtaacaataaggataaaagataattctagaaaaattcatacattcaaaaaatactattgtaataaaagtataaaatttctataataaagagaaagtaatgca

SEQ ID NO: 733447 - DNA, 265 bp, Homo sapiens
tctaaaacttagtatagagaagcatggtggtgccacaatatgcgtatgcttagctaacaggagaaagagctctctgggtccctcattctgtccttctgtcctaaactaaaatgcagaaaaccctatcccgcacagtactaattttatgcagcttaatatcattattgatagtaatattacctttttcttttcagctcagtgtaaacaaggcacctactcatacagtggacttgagacttgtgaatcgtgtccactgggcacttat

SEQ ID NO: 733448 - DNA, 5156 bp, Homo sapiens; identical to SEQ ID NO: 426302
  misc_feature (4213)..(4213): n is a, c, g, or t

SEQ ID NO: 733449 - DNA, 2372 bp, Homo sapiens; identical to SEQ ID NO: 426303

SEQ ID NO: 733450 - DNA, 3242 bp, Homo sapiens; identical to SEQ ID NO: 426305

SEQ ID NO: 733451 - DNA, 2480 bp, Homo sapiens
agagaaaactcaacaaaagttgtatttctcatcactgatggatattccaatgggggagaccctagaccaattgcagcgtcactgcgagattcaggagtggagatcttcacttttggcatatggcaagggaacattcgagagctgaatgacatggcttccaccccaaaggaggagcactgttacctgctacacagttttgaagaatttgaggctttagctcgccgggcattgcatgaagatctaccttctgggagttttattcaagatgatatggtccactgctcatatctttgtgatgaaggcaaggactgctgtgaccgaatgggaagctgcaaatgtgggacacacacaggccattttgagtgcatctgtgaaaaggggtattacgggaaaggtctgcagtatgaatgcacagcttgcccatcggggacatacaaacctgaaggctcaccaggaggaatcagcagttgcattccatgtcctgatgaaaatcacacctctccacctggaagcacatcccctgaagactgtgtctgcagagagggatacagggcatctggccagacctgtgaacttgtccactgccctgccctgaagcctcccgaaaatggttactttatccaaaacacttgcaacaaccacttcaatgcagcctgtggggtccgatgtcaccctggatttgatcttgtgggaagcagcatcatcttatgtctacccaatggtttgtggtccggttcagagagctactgcagagtaagaacatgtcctcatctccgccagccgaaacatggccacatcagctgttctacaagggaaatgttatataagacaacatgtttggttgcctgtgatgaagggtacagactagaaggcagtgataagcttacttgtcaaggaaacagccagtgggatgggccagaaccccggtgtgtggagcgccactgttccacctttcagatgcccaaagatgtcatcatatccccccacaactgtggcaagcagccagccaaatttgggacgatctgctatgtaagttgccgccaagggttcattttatctggagtcaaagaaatgctgagatgtaccacttctggaaaatggaatgtcggagttcaggcagctgtgtgtaaagacgtggaggctcctcaaatcaactgtcctaaggacatagaggctaagactctggaacagcaagattctgccaatgttacctggcagattccaacagctaaagacaactctggtgaaaaggtgtcagtccacgttcatccagctttcaccccaccttaccttttcccaattggagatgttgctatcgtatacacggcaactgacctatccggcaaccaggccagctgcattttccatatcaaggttattgatgcagaaccacctgtcatagactggtgcagatctccacctcccgtccaggtctcggagaaggtacatgccgcaagctgggatgagcctcagttctcagacaactcaggggctgaattggtcattaccagaagtcatacacaaggagaccttttccctcaaggggagactatagtacagtatacagccactgacccctcaggcaataacaggacatgtgatatccatattgtcataaaaggttctccctgtgaaattccattcacacctgtaaatggggattttatatgcactccagataatactggagtcaactgtacattaacttgcttggagggctatgatttcacagaagggtctactgacaagtattattgtgcttatgaagatggcgtctggaaaccaacatataccactgaatggccagactgtgccaaaaaacgttttgcaaaccacgggttcaagtcctttgagatgttctacaaagcagctcgttgtgatgacacagatctgatgaagaagttttctgaagcatttgagacgaccctgggaaaaatggtcccatcattttgtagtgatgcagaggacattgactgcagactggaggagaacctgaccaaaaaatattgcctagaatataattatgactatgaaaatggctttgcaattggaccaggtggctggggtgcagctaataggctggattactcttacgatgacttcctggacactgtgcaagaaacagccacaagcatcggcaatgccaagtcctcacggattaaaagaagtgccccattatctgactataaaattaagttaatttttaacatcacagctagtgtgccattacccgatgaaagaaatgatacccttgaatgggaaaatcagcaacgactccttcagacattggaaactatcacaaataaactgaaaaggactctcaacaaagaccccatgtattcctttcagcttgcatcagaaatacttatagccgacagcaattcattagaaacaaaaaaggcttcccccttctgcagaccaggctcagtgctgagagggcgtatgtgtggtaagactgttccctgtgatcaaaaatattt

SEQ ID NO: 733452 - DNA, 1457 bp, Homo sapiens
gcctgcattgtgaaacagaagtcaatgaatgccagtcaaacccatgcttaaataatgcagtctgtgaagaccaggttgggggattcttgtgcaaatgcccacctggatttttgggtacccgatgtggaaagaacgtcgatgagtgtctcagtcagccatgcaaaaatggagctacctgtaaagacggtgccaatagcttcagatgcctgtgtgcagctggcttcacaggatcacactgtgaattgaacatcaatgaatgtcagtctaatccatgtagaaatcaggccacctgtgtggatgaattaaattcatacagttgtaaatgtcagccaggattttcaggcaaaaggtgtgaaacagaacagtctacaggctttaacctggattttgaagtttctggcatctatggatatgtcatgctagatggcatgctcccatctctccatgctctaacctgtaccttctggatgaaatcctctgacgacatgaactatggaacaccaatctcctatgcagttgataacggcagcgacaataccttgctcctgactgattataacggctgggttctttatgtgaatggcagggaaaagataacaaactgtccctcggtgaatgatggcagatggcatcatattgcaatcacttggacaagtgccaatggcatctggaaagtctatatcgatgggaaattatctgacggtggtgctggcctctctgttggtttgcccatacctggtggtggtgcgttagttctggggcaagagcaagacaaaaaaggagagggattcagcccagctgagtcttttgtgggctccataagccagctcaacctctgggactatgtcctgtctccacagcaggtgaagtcactggctacctcctgcccagaggaactcagtaaaggaaacgtgttagcatggcctgatttcttgtcaggaattgtggggaaagtgaagatcgattctaagagcatattttgttctgattgcccacgcttaggagggtcagtgcctcatctgagaactgcatctgaagatttaaagccaggttccaaagtcaatctgttctgtgatccaggcttccagctggtcgggaaccctgtgcagtactgtctgaatcaaggacagtggacacaaccacttcctcactgtgaacgcattagctgtggggtgccacctcctttggagaatggcttccattcagccgatgacttctatgctggcagcacagtaacctaccagtgcaacaatggctactatctattgggtgactcaaggatgttctgtacagataatgggagctggaacggcgtttcaccatcctgccttgatgtcgatgagtgtgcagttggatcagattgtagtgagcatgcttcttgcctgaacgtagatggatcctacatatgttcatgtgtcccaccgtacacaggagatgggaaaaactgtgcaggtaac

SEQ ID NO: 733453 - DNA, 809 bp, Homo sapiens; identical to SEQ ID NO: 426307

SEQ ID NO: 733454 - DNA, 599 bp, Homo sapiens; identical to SEQ ID NO: 426308

SEQ ID NO: 733455 - DNA, 326 bp, Homo sapiens; identical to SEQ ID NO: 426309

SEQ ID NO: 733456 - DNA, 422 bp, Homo sapiens; identical to SEQ ID NO: 426310

SEQ ID NO: 733457 - DNA, 520 bp, Homo sapiens
atttcggcactaggggctagacctacagcatggacctatggcataggatttgggctttcccattcaaaggagatgtcacatcccaaatgactcatcttcttcagtacttcaaattcataatcatttcatgtcagtaaaaccaaccaagaattcccctgtgtcagtctcctgtcttctattcctgggagcttttagctctggtgttttttttgtttgtttttttttcctctttaaaacatctctaggctgggattacaggcgtgagctactgcgcctggccttcagtggcattctagaatgttctattgaagttactatgtcagtgcttggatttcttactgtcttccccattagaacgtagtatgtagtgaagaattaaagccaaacataaacatttctagttttgtttttgtttttttccaactttaattatataggctagctggaagagtgagttaatttaacttgttaatttctgaagtgagattgcaacaacccatgaaatgctcggggtttttct

SEQ ID NO: 733458 - DNA, 831 bp, Homo sapiens
gtagggacagggtctcattatgttgcccaggctggtctgaaactcctggcctcaagtgatccttctgcctcagcctcccaaagtgcggacattataggcatgagccacgggaccaggacagaaaacaattttaaaatgacaacctccctgtgaaataaaacttgactggcacctgggtttgtatgactgtaaggattaaaaatggtcaagacaccctataaatagattaaggttccaacctaagtagaaacaatctggaaaacagaagtgtgtaagtttggacctcaattctgaaaatatactttttaaaaaacccgattttccaactcccaaacagattttagaaaccttaagagtatttttatgctggcttccaaaggttaaaacaaaatacactcatttcacctaggaatactgtcaaaggcattataaatgccttaatattacctatatatttttttacaaaccattaagcagtaaccttcctaaaataaaagtatttccccccctataggttaaggtctccctaagtatcccttatagatcatcatttaagctgactattcattgagtgacataaactgaaagctgctagagtagaatgacatgagaaaggaaacacagctgtagatggaatggaagggacacctgtggagctccatcccatggatctcagtccaaatccaaacttcacagctgaggcccaggggaagggaagacaggttttccttactgaaaagacttcactttttcagtcacacaaacattttagaccacaatagatttaatagcataaatatattttatgaaggtaacccaatcgatcataaa

SEQ ID NO: 733459 - DNA, 1540 bp, Homo sapiens; identical to SEQ ID NO: 31524

SEQ ID NO: 733460 - DNA, 1517 bp, Homo sapiens; identical to SEQ ID NO: 31525

SEQ ID NO: 733461 - DNA, 458 bp, Homo sapiens
  misc_feature (351)..(351): n is a, c, g, or t
  misc_feature (392)..(392): n is a, c, g, or t
  misc_feature (409)..(409): n is a, c, g, or t
  misc_feature (437)..(437): n is a, c, g, or t
  misc_feature (449)..(449): n is a, c, g, or t
ggaaccttagtgtgacatacacacagacacacagacgtgcacacacacacacacacacacaaaatttgtcataggttcccagttaataaatctattattgtttaatgtctttctttgtctctttgcagttttgacttaaagtactttatgtaagatatgacagtttttgacttaagatgtagcttttgtaatactattttgacctcttctgctctcatttggttaatatttgcatgcaatgtctaaatctatcttgccaccttcagtatgtttttaatcattaggatgtcagctgacccttgtaggaaagggcaaattgggatcttggggtttttaattaattttaaaatnaaatttctttattggaaagtatgtcctcttggatggggaangttttctggaaaccaanggggacttaccaattttttttgttgttnccatttggatcntggcatctt

SEQ ID NO: 733462 - DNA, 725 bp, Homo sapiens
agcggagcgggcgagcaagggagcgagcaggacaggagcctgatcccacagcagctgctccagcccgcgatgaggaaaagtccaggtctgtctgactgtctttgggcctggatcctccttctgagcacactgactggaagaagctatggacagccgtcattacaagatgaacttaaagacaataccactgtcttcaccaggattttggacagactcctagatggttatgacaatcgcctgagaccaggattgggagagcgtgtaaccgaagtgaagactgatatcttcgtcaccagtttcggacccgtttcagaccatgatatggaatatacaatagatgtatttttccgtcaaagctggaaggatgaaaggttaaaatttaaaggacctatgacagtcctccggttaaataacctaatggcaagtaaaatctggactccggacacatttttccacaatggaacagaagtcagtggcccacaacatgaccatgcccaacaaactcctgcggatcacagaggatggcaccttgctgtacaccatgaggctgacagtgagagctgaatgtccgatgcatttggaggacttccctatggatgcccatgcttgccccactaaaatttgggaagttatgcttatacatgagcagaagttgttacatgaatggaccagagaagcagtagctcagggtgtagcacaagatggatccgtctaaacagtatgac

SEQ ID NO: 733463 - DNA, 757 bp, Homo sapiens
ctcccgctggctccagtctctccacgattctctctcccagacttttccccgggcttaagagatcctgtgtccagagggggccttagctgctccagcccgcgatgaggaaaagtccaggtctgtctgactgtctttgggcctggatcctccttctgagcacactgactggaagaagctatggacagccgtcattacaagatgaacttaaagacaataccactgtcttcaccaggattttggacagactcctagatggttatgacaatcgcctgagaccaggattgggagagcgtgtaaccgaagtgaagactgatatcttcgtcaccagtttcggacccgtttcagaccatgatatggaatatacaatagatgtatttttccgtcaaagctggaaggatgaaaggttaaaatttaaaggacctatgacagtcctccggttaaataacctaatggcaagtaaaatctggactccggacacatttttccacaatggaacagaagtcagtggcccacaacatgaccatgcccaacaaactcctgcggatcacagaggatggcaccttgctgtacaccatgaggctgacagtgagagctgaatgtccgatgcatttggaggacttccctatggatgcccatgcttgccccactaaaatttgggaagttatgcttatacatgagcagaagttgttacatgaatggaccagagaagcagtagctcagggtgtagcacaagatggatccgtctaaacagtatgac

SEQ ID NO: 733464 - DNA, 814 bp, Homo sapiens
ggaaggcacgctcttgtcctggctgcaaaattgcctgtttttccctttccagtggacgctggtgaaatgccctcttgtgtaggggtctctcccattctgaacacgaaaactcaacttagtctttgatatggatggcatgggagctgctccagcccgcgatgaggaaaagtccaggtctgtctgactgtctttgggcctggatcctccttctgagcacactgactggaagaagctatggacagccgtcattacaagatgaacttaaagacaataccactgtcttcaccaggattttggacagactcctagatggttatgacaatcgcctgagaccaggattgggagagcgtgtaaccgaagtgaagactgatatcttcgtcaccagtttcggacccgtttcagaccatgatatggaatatacaatagatgtatttttccgtcaaagctggaaggatgaaaggttaaaatttaaaggacctatgacagtcctccggttaaataacctaatggcaagtaaaatctggactccggacacatttttccacaatggaacagaagtcagtggcccacaacatgaccatgcccaacaaactcctgcggatcacagaggatggcaccttgctgtacaccatgaggctgacagtgagagctgaatgtccgatgcatttggaggacttccctatggatgcccatgcttgccccactaaaatttgggaagttatgcttatacatgagcagaagttgttacatgaatggaccagagaagcagtagctcagggtgtagcacaagatggatccgtctaaacagtatgac

SEQ ID NO: 733465 - DNA, 1555 bp, Homo sapiens; identical to SEQ ID NO: 29525
  misc_feature (1551)..(1551): n is a, c, g, or t

SEQ ID NO: 733466 - DNA, 607 bp, Homo sapiens
  misc_feature (603)..(603): n is a, c, g, or t
ttcctggtcctacagagggtttagcacagaggagaagctgggcggggtgtttgttgctgtccttgcggctcttaaggatcgggggtggatggaagacttctgctgctcccgccccactcagcccctctgtctgcccgcagctcagagcccgactgtggccgagacactgcatcctgccttctccggagtccagcagtacacagccatgtaccccaccgcggccatcacgcccatcgcgcacagcgtcccccagccgccgcccctcctgcagcagcagcagcgagaaggagtttggagacacggagctgacgcagatgttcctacccttcggcaatatcatttcctccaaggtgtttatggatcgagctaccaaccagagcaagtgtttcggcttcgtgagctttgataacccggccagcgcccaggcagccatccaggccatgaacggcttccagatcggcatgaagaggctcaaagtccagctgaagcggcccaaagacccgtgaagggggtttctcccctgtcctccatcccccgtttctgttcattcacagctgcgtccccgagcactggaaacaggcctagcacataatagatgctcanacta

SEQ ID NO: 733467 - DNA, 308 bp, Homo sapiens; identical to SEQ ID NO: 29528

SEQ ID NO: 733468 - DNA, 621 bp, Homo sapiens
  misc_feature (52)..(52): n is a, c, g, or t
  misc_feature (70)..(70): n is a, c, g, or t
  misc_feature (126)..(126): n is a, c, g, or t
  misc_feature (188)..(188): n is a, c, g, or t
cggcacgagcacagaatgctggagagatgcgtcctggtgaacgtggggcagnccctcccacgacccccancagactgccttaggttttgtcagaccccactccctttccttccccctctgcctccnacccactctgggggtccacatcaagatagctgggcccagtgtggaagcccagcgtgtctgtnctagcagaaaggacacaagcctggtgttctggagacctcggctcaagtctttgccctgctgccgacgcattgtgtcaccttgggcaaggacttcgcatctccaggcctcagtttccccattagttaacatgacagcataacactagagagcagagggcccatttcagctctgttgttctgggattcaggctggccggtgctgtgtcctggagctttatttggggagtttcacccagaatggtgggagaaacctcccaggtgccaggtaccccgcatcgtgacccttcacttggtgtcttaggaagtcaagctgagggatgctgagtcctcccctggtggcccctgcagccccagccctgcttttcatccccagcgctgaaacatggaaggagccccctccttctcacctcggtctcctacccctgaatggaaa

SEQ ID NO: 733469 - DNA, 832 bp, Homo sapiens
taatttttaaaggcaatttagtatacatgatgagctagctttgaaatacagatttaaatgtttaaaaattaatttgagggcaagatttggtaccaaagtttcaaaaattttatttcactgcttataaaatactttatcagaacacttattttaaaaaataacatcttatttgaaaaactccaaatttgatggggatagttacaccatcatacaattttaaaggtagaattagctttctaatactttaaaatattttctgaaatgaacatttcacttggtttaggaccgtgtctgtaagtaaaagacaccaatgctaatagatatgacttacaaaaatgccacatatcgaaattgattgaggattgaaatatatatactttggcattgagaagagaggaagagaaaaaaataaaaaaagtgtgacattgtaatatttattgtatttaataaatcttgaagaaagaactcttgagcaatgaaccagtgacaggatataaaagcctgttttatttgatgacatcattaactgagttttctcatctatacattcatacatcgagaaggaactgtccttaaaaaccagtgtttctttttttttttaagttctagcgtacatgtgcagaatgtgcaggtttgttatataggtatacacgtgccatggtggtttgctgcacccatcaacctgtcatctacattaggtatttctcctaatgctatccctccccagtgatatttgttaatatgcttttttaaaaaagtgtctgccttgaaactggtaattaaaaaatatctcctagggcatttaattatttttcccaataaacaactcata

SEQ ID NO: 733470 - DNA, 458 bp, Homo sapiens
  misc_feature (13)..(13): n is a, c, g, or t
cacaagcctctgntggcttcttctcaacctgtatcttctgagatgtatagggatccatttggaaatccttttgcctaaattctgaacttggtctgcagaccatccagaggaataaaaaggttggccttagtagtcaaaaacaaagctgatagccagacacgtcctgatttctgccccttgttcccagctttgacgtattatctgttgccttatttctcattgcctcttctacttgtaaaatgcttttcactttctgtctaggttaaagctaaactgaatctatggctttaaataaattaagatcctaaactctctagcttaagtgtaaatgaagtacagtagtttccctactgaaccctgcctcttgtgtccctggaaccttctagaacacctgccttctaccctctggttgggagatgcagccaccacatcccttcatatcatactgttttgaataa

SEQ ID NO: 733471 - DNA, 849 bp, Homo sapiens
cctcagaaaccaaccctggcatatatggtccgatgatcttccagaaggatgccaagaccactcaatggcaaagcacagtttcttcaacaaatggtgatgggaaaattgtataactacatgcaaaacaatgaagttggactcttaccttacaccacgttaaaatcaattcaaagtgaattataaacctaaatgtaaaactagaactatcaaactcctagggaaaacaaatttggaaaatgctttatgacgatgaatttgtcaataatttttaggatatgacattaaaagctcaggcagtaaaagcaaaaatatatcaaacctaaaaacttctgtacctcaaaggtcacaaccaacagggtaaaaggcaaactgtaaaattaaaaaaaataccagtttagtgtcccttatttgaaatgcttgggatgtgtttcagattttgtaatatttgcattattcttactggttgaggatctcaaattcaaacacctgagtctgagatgctccaataagcatttcctttgagtgtcatgttggcacttcaaaaagtttcagactttggaggcatttgggatttcagatttttgggatcagagacattcaaccctatagttgcacatcatgtatctcataagaagtgaacattcagaatgcgtaaagaactcctacagagagactaccagaagcagagaggagcaaacacattttcacactagggaacctgctatctctcctggattccaattagggcagagtaagtgctagttctctgccaaccaggattaggccctgcagctgcagtgaaaataatcacagaagaaaactaagaaataaaaaatggagaaagtgaga

SEQ ID NO: 733472 - DNA, 2667 bp, Homo sapiens
gctcccggggccacgggatgacgcctcctccgcccggacgtgccgcccccagcgcaccgcgcgcccgcgtccctggcccgccggctcggttggggcttccgctgcggctgcggctgctgctgctgctctgggcggccgccgcctccgcccagggccacctaaggagcggaccccgcatcttcgccgtctggaaaggccatgtagggcaggaccgggtggactttggccagactgagccgcacacggtgcttttccacgagccaggcagctcctctgtgtgggtgggaggacgtggcaaggtctacctctttgacttccccgagggcaagaacgcatctgtgcgcacggtgaatatcggctccacaaaggggtcctgtctggataagcgggactgcgagaactacatcactctcctggagaggcggagtgaggggctgctggcctgtggcaccaacgcccggcaccccagctgctggaacctggtgaatggcactgtggtgccacttggcgagatgagaggctacgcccccttcagcccggacgagaactccctggttctgtttgaaggggacgaggtgtattccaccatccggaagcaggaatacaatgggaagatccctcggttccgccgcatccggggcgagagtgagctgtacaccagtgatactgtcatgcagaacccacagttcatcaaagccaccatcgtgcaccaagaccaggctatccgacgacaggatccgagcttcttccgagaggacaatcctgacaagaatcctgaggctcctctcaatgtgtcccgtgtggcccagttgtgcaggggggaccagggtggggaaagttcactgtcagtctccaagtggaacacttttctgaaagccatgctggtatgcagtgatgctgccaccaacaagaacttcaacaggctgcaagacgtcttcctgctccctgaccccagcggccagtggagggacaccagggtctatggtgttttctccaacccctggaactactcagccgtctgtgtgtattccctcggtgacattgacaaggtcttccgtacctcctcactcaagggctaccactcaagccttcccaacccgcggcctggcaagtgcctcccagaccagcagccgatacccacagagaccttccaggtggctgaccgtcacccagaggtggcgcagagggtggagcccatggggcctctgaagacgccattgttccactctaaataccactaccagaaagtggccgtccaccgcatgcaagccagccacggggagacctttcatgtgctttacctaactacagacaggggcactatccacaaggtggtggaaccgggggagcaggagcacagcttcgccttcaacatcatggagatccagcccttccgccgcgcggctgccatccagaccatgtcgctggatgctgagcggaggaagctgtatgtgagctcccagtgggaggtgagccaggtgcccctggacctgtgtgaggtctatggcgggggctgccacggttgcctcatgtcccgagacccctactgcggctgggaccaaggccgctgcatctccatctacagctccgaacggtcagtgctgcaatccattaatccagccgagccacacaaggagtgtcccaaccccaaaccagacaaggccccactgcagaaggtttccctggccccaaactctcgctactacctgagctgccccatggaatcccgccacgccacctactcatggcgccacaaggagaacgtggagcagagctgcgaacctggtcaccagagccccaactgcatcctgttcatcgagaacctcacggcgcagcagtacggccactacttctgcgaggcccaggagggctcctacttccgcgaggctcagcactggcagctgctgcccgaggacggcatcatggccgagcacctgctgggtcatgcctgtgccctggccgcctccctctggctgggggtgctgcccacactcactcttggcttgctggtccactagggcctcccgaggctgggcatgcctcaggcttctgcagcccagggcactagaacgtctcacactcagagccggctggcccgggagctccttgcctgccacttcttccaggggacagaataacccagtggaggatgccaggcctggagacgtccagccgcaggcggctgctgggccccaggtggcgcacggatggtgaggggctgagaatgagggcaccgactgtgaagctggggcatcgatgacccaagactttatcttctggaaaatatttttcagactcctcaaacttgactaaatgcagcgatgctcccagcccaagagcccatgggtcggggagtgggtttggataggagagctgggactccatctcgaccctggggctgaggcctgagtccttctggactcttggtacccacattgcctccttcccctccctctctcatggctgggtggctggtgttcctgaagacccagggctaccctctgtccagccctgtcctctgcagctccctctctggtcctgggtcccacaggacagccgccttgcatgtttattgaaggatgtttgctttccggacggaaggacggaaaaagctctatttttatgttaggcttatttcatgtatagctacttccgactgcatctgta

SEQ ID NO: 733473 - DNA, 2323 bp, Homo sapiens
ttctgctggtcgattctagaggtatccctgtcgtcggataagcgggactgcgagaactacatcactctcctggagaggcggagtgaggggctgctggcctgtggcaccaacgcccggcaccccagctgctggaacctggtgaatggcactgtggtgccacttggcgagatgagaggctacgcccccttcagcccggacgagaactccctggttctgtttgaaggggacgaggtgtattccaccatccggaagcaggaatacaatgggaagatccctcggttccgccgcatccggggcgagagtgagctgtacaccagtgatactgtcatgcagaacccacagttcatcaaagccaccatcgtgcaccaagaccaggctatccgacgacaggatccgagcttcttccgagaggacaatcctgacaagaatcctgaggctcctctcaatgtgtcccgtgtggcccagttgtgcaggggggaccagggtggggaaagttcactgtcagtctccaagtggaacacttttctgaaagccatgctggtatgcagtgatgctgccaccaacaagaacttcaacaggctgcaagacgtcttcctgctccctgaccccagcggccagtggagggacaccagggtctatggtgttttctccaacccctggaactactcagccgtctgtgtgtattccctcggtgacattgacaaggtcttccgtacctcctcactcaagggctaccactcaagccttcccaacccgcggcctggcaagtgcctcccagaccagcagccgatacccacagagaccttccaggtggctgaccgtcacccagaggtggcgcagagggtggagcccatggggcctctgaagacgccattgttccactctaaataccactaccagaaagtggccgtccaccgcatgcaagccagccacggggagacctttcatgtgctttacctaactacagacaggggcactatccacaaggtggtggaaccgggggagcaggagcacagcttcgccttcaacatcatggagatccagcccttccgccgcgcggctgccatccagaccatgtcgctggatgctgagcggaggaagctgtatgtgagctcccagtgggaggtgagccaggtgcccctggacctgtgtgaggtctatggcgggggctgccacggttgcctcatgtcccgagacccctactgcggctgggaccaaggccgctgcatctccatctacagctccgaacggtcagtgctgcaatccattaatccagccgagccacacaaggagtgtcccaaccccaaaccagacaaggccccactgcagaaggtttccctggccccaaactctcgctactacctgagctgccccatggaatcccgccacgccacctactcatggcgccacaaggagaacgtggagcagagctgcgaacctggtcaccagagccccaactgcatcctgttcatcgagaacctcacggcgcagcagtacggccactacttctgcgaggcccaggagggctcctacttccgcgaggctcagcactggcagctgctgcccgaggacggcatcatggccgagcacctgctgggtcatgcctgtgccctggccgcctccctctggctgggggtgctgcccacactcactcttggcttgctggtccactagggcctcccgaggctgggcatgcctcaggcttctgcagcccagggcactagaacgtctcacactcagagccggctggcccgggagctccttgcctgccacttcttccaggggacagaataacccagtggaggatgccaggcctggagacgtccagccgcaggcggctgctgggccccaggtggcgcacggatggtgaggggctgagaatgagggcaccgactgtgaagctggggcatcgatgacccaagactttatcttctggaaaatatttttcagactcctcaaacttgactaaatgcagcgatgctcccagcccaagagcccatgggtcggggagtgggtttggataggagagctgggactccatctcgaccctggggctgaggcctgagtccttctggactcttggtacccacattgcctccttcccctccctctctcatggctgggtggctggtgttcctgaagacccagggctaccctctgtccagccctgtcctctgcagctccctctctggtcctgggtcccacaggacagccgccttgcatgtttattgaaggatgtttgctttccggacggaaggacggaaaaagctctatttttatgttaggcttatttcatgtatagctacttccgactgcatctgta

SEQ ID NO: 733474 - DNA, 1110 bp, Homo sapiens
ttctgctggtcgattctagaggtatccctgtcgtcggataagcgggactgcgagaactacatcactctcctggagaggcggagtgaggggctgctggcctgtggcaccaacgcccggcaccccagctgctggaacctggtgaatggcactgtggtgccacttggcgagatgagaggctacgcccccttcagcccggacgagaactccctggttctgtttgaaggggacgaggtgtattccaccatccggaagcaggaatacaatgggaagatccctcggttccgccgcatccggggcgagagtgagctgtacaccagtgatactgtcatgcagaacccacagttcatcaaagccaccatcgtgcaccaagaccaggctatccgacgacaggatccgagcttcttccgagaggacaatcctgacaagaatcctgaggctcctctcaatgtgtcccgtgtggcccagttgtgcaggggggaccagggtggggaaagttcactgtcagtctccaagtggaacacttttctgaaagccatgctggtatgcagtgatgctgccaccaacaagaacttcaacaggctgcaagacgtcttcctgctccctgaccccagcggccagtggagggacaccagggtctatggtgttttctccaacccctggaactactcagccgtctgtgtgtattccctccctggacttctcatcttcacaagatggggatcatgggggtttcttaccccacctatgtccccctcttccccaccctgtccctgtagaaaaccagtgaagcaggtacggagctgaggactgggccccaggaggtggggacaggggtctgaatgccgagtccctgaattcacccaggaccatccaaggggccaccgcagcattggccccatcaccacgtcctcacccaactctccctgatgaatagaatatacacactgtgctaggtgtatatatacatatatatatatataaatatatatataatatataaaatatagatatggaaatgactgttctgctgttaagataatgtatactcttttattttcttcctttcatggttaagattttttttttaagaaaagttaaatatccaaaaaa

SEQ ID NO: 733475 - DNA, 1621 bp, Homo sapiens
ttctgctggtcgattctagaggtatccctgtcgtcggataagcgggactgcgagaactacatcactctcctggagaggcggagtgaggggctgctggcctgtggcaccaacgcccggcaccccagctgctggaacctggtgaatggcactgtggtgccacttggcgagatgagaggctacgcccccttcagcccggacgagaactccctggttctgtttgaaggggacgaggtgtattccaccatccggaagcaggaatacaatgggaagatccctcggttccgccgcatccggggcgagagtgagctgtacaccagtgatactgtcatgcagaacccacagttcatcaaagccaccatcgtgcaccaagaccaggctatccgacgacaggatccgagcttcttccgagaggacaatcctgacaagaatcctgaggctcctctcaatgtgtcccgtgtggcccagttgtgcaggggggaccagggtggggaaagttcactgtcagtctccaagtggaacacttttctgaaagccatgctggtatgcagtgatgctgccaccaacaagaacttcaacaggctgcaagacgtcttcctgctccctgaccccagcggccagtggagggacaccagggtctatggtgttttctccaacccctggaactactcagccgtctgtgtgtattccctcggtgacattgacaaggtcttccgtacctcctcactcaagggctaccactcaagccttcccaacccgcggcctggcaagtgcctcccagaccagcagccgatacccacagagaccttccaggtggctgaccgtcacccagaggtggcgcagagggtggagcccatggggcctctgaagacgccattgttccactctaaataccactaccagaaagtggccgtccaccgcatgcaagccagccacggggagacctttcatgtgctttacctaactacagacaggggcactatccacaaggtggtggaaccgggggagcaggagcacagcttcgccttcaacatcatggagatccagcccttccgccgcgcggctgccatccagaccatgtcgctggatgctgagcggaggaagctgtatgtgagctcccagtgggaggtgagccaggtgcccctggacctgtgtgaggtctatggcgggggctgccacggttgcctcatgtcccgagacccctactgcggctgggaccaaggccgctgcatctccatctacagctccgaacggtcagtgctgcaatccattaatccagccgagccacacaaggagtgtcccaaccccaaaccaggtacctgatctggccctgctggcggctgtggcccaatgagtggggtactgccctgccctgattgtcctggtctgagggagacatggccttgtcctgtgggccccaggtacatggggcaggatacagtcctgcagagggagccctcttggtgggatgagcgagacgggagaaaaaaggaggacgctgagggctgggttccccacgttcattcagaagccttgtcctgggatcccagtccgtggggaggacacatcctcccctgggagctctttgtccctcctcacggctgcttccccactgcctccccag

SEQ ID NO: 733476 - DNA, 1454 bp, Homo sapiens
gctcccggggccacgggatgacgcctcctccgcccggacgtgccgcccccagcgcaccgcgcgcccgcgtccctggcccgccggctcggttggggcttccgctgcggctgcggctgctgctgctgctctgggcggccgccgcctccgcccagggccacctaaggagcggaccccgcatcttcgccgtctggaaaggccatgtagggcaggaccgggtggactttggccagactgagccgcacacggtgcttttccacgagccaggcagctcctctgtgtgggtgggaggacgtggcaaggtctacctctttgacttccccgagggcaagaacgcatctgtgcgcacggtgaatatcggctccacaaaggggtcctgtctggataagcgggactgcgagaactacatcactctcctggagaggcggagtgaggggctgctggcctgtggcaccaacgcccggcaccccagctgctggaacctggtgaatggcactgtggtgccacttggcgagatgagaggctacgcccccttcagcccggacgagaactccctggttctgtttgaaggggacgaggtgtattccaccatccggaagcaggaatacaatgggaagatccctcggttccgccgcatccggggcgagagtgagctgtacaccagtgatactgtcatgcagaacccacagttcatcaaagccaccatcgtgcaccaagaccaggctatccgacgacaggatccgagcttcttccgagaggacaatcctgacaagaatcctgaggctcctctcaatgtgtcccgtgtggcccagttgtgcaggggggaccagggtggggaaagttcactgtcagtctccaagtggaacacttttctgaaagccatgctggtatgcagtgatgctgccaccaacaagaacttcaacaggctgcaagacgtcttcctgctccctgaccccagcggccagtggagggacaccagggtctatggtgttttctccaacccctggaactactcagccgtctgtgtgtattccctccctggacttctcatcttcacaagatggggatcatgggggtttcttaccccacctatgtccccctcttccccaccctgtccctgtagaaaaccagtgaagcaggtacggagctgaggactgggccccaggaggtggggacaggggtctgaatgccgagtccctgaattcacccaggaccatccaaggggccaccgcagcattggccccatcaccacgtcctcacccaactctccctgatgaatagaatatacacactgtgctaggtgtatatatacatatatatatatataaatatatatataatatataaaatatagatatggaaatgactgttctgctgttaagataatgtatactcttttattttcttcctttcatggttaagattttttttttaagaaaagttaaatatccaaaaaa

SEQ ID NO: 733477 - DNA, 1965 bp, Homo sapiens
gctcccggggccacgggatgacgcctcctccgcccggacgtgccgcccccagcgcaccgcgcgcccgcgtccctggcccgccggctcggttggggcttccgctgcggctgcggctgctgctgctgctctgggcggccgccgcctccgcccagggccacctaaggagcggaccccgcatcttcgccgtctggaaaggccatgtagggcaggaccgggtggactttggccagactgagccgcacacggtgcttttccacgagccaggcagctcctctgtgtgggtgggaggacgtggcaaggtctacctctttgacttccccgagggcaagaacgcatctgtgcgcacggtgaatatcggctccacaaaggggtcctgtctggataagcgggactgcgagaactacatcactctcctggagaggcggagtgaggggctgctggcctgtggcaccaacgcccggcaccccagctgctggaacctggtgaatggcactgtggtgccacttggcgagatgagaggctacgcccccttcagcccggacgagaactccctggttctgtttgaaggggacgaggtgtattccaccatccggaagcaggaatacaatgggaagatccctcggttccgccgcatccggggcgagagtgagctgtacaccagtgatactgtcatgcagaacccacagttcatcaaagccaccatcgtgcaccaagaccaggctatccgacgacaggatccgagcttcttccgagaggacaatcctgacaagaatcctgaggctcctctcaatgtgtcccgtgtggcccagttgtgcaggggggaccagggtggggaaagttcactgtcagtctccaagtggaacacttttctgaaagccatgctggtatgcagtgatgctgccaccaacaagaacttcaacaggctgcaagacgtcttcctgctccctgaccccagcggccagtggagggacaccagggtctatggtgttttctccaacccctggaactactcagccgtctgtgtgtattccctcggtgacattgacaaggtcttccgtacctcctcactcaagggctaccactcaagccttcccaacccgcggcctggcaagtgcctcccagaccagcagccgatacccacagagaccttccaggtggctgaccgtcacccagaggtggcgcagagggtggagcccatggggcctctgaagacgccattgttccactctaaataccactaccagaaagtggccgtccaccgcatgcaagccagccacggggagacctttcatgtgctttacctaactacagacaggggcactatccacaaggtggtggaaccgggggagcaggagcacagcttcgccttcaacatcatggagatccagcccttccgccgcgcggctgccatccagaccatgtcgctggatgctgagcggaggaagctgtatgtgagctcccagtgggaggtgagccaggtgcccctggacctgtgtgaggtctatggcgggggctgccacggttgcctcatgtcccgagacccctactgcggctgggaccaaggccgctgcatctccatctacagctccgaacggtcagtgctgcaatccattaatccagccgagccacacaaggagtgtcccaaccccaaaccaggtacctgatctggccctgctggcggctgtggcccaatgagtggggtactgccctgccctgattgtcctggtctgagggagacatggccttgtcctgtgggccccaggtacatggggcaggatacagtcctgcagagggagccctcttggtgggatgagcgagacgggagaaaaaaggaggacgctgagggctgggttccccacgttcattcagaagccttgtcctgggatcccagtccgtggggaggacacatcctcccctgggagctctttgtccctcctcacggctgcttccccactgcctccccag

SEQ ID NO: 733478 - DNA, 724 bp, Homo sapiens
gctcccggggccacgggatgacgcctcctccgcccggacgtgccgcccccagcgcaccgcgcgcccgcgtccctggcccgccggctcggttggggcttccgctgcggctgcggctgctgctgctgctctgggcggccgccgcctccgcccagggccacctaaggagcggaccccgcatcttcgccgtctggaaaggccatgtagggcaggaccgggtggactttggccagactgagccgcacacggtgcttttccacgagccaggcagctcctctgtgtgggtgggaggacgtggcaaggtctacctctttgacttccccgagggcaagaacgcatctgtgcgcacggtgaatatcggctccacaaaggggtcctgtctggataagcgggactgcgagaactacatcactctcctggagaggcggagtgaggggctgctggcctgtggcaccaacgcccggcaccccagctgctggaacctggtgaatggcactgtggtgccacttggcgagatgagaggctacgcccccttcagcccggacgagaactccctggttctgtttgaaggggacgaggtgtattccaccatccggaagcaggaatacaatgggaagatccctcggttccgccgcatccggggcgagagtgagctgtacaccagtgatactgtcatgcagaacccacagttcatcaaaccaccatcgccaggctttcccaggtcact

SEQ ID NO: 733479 - DNA, 773 bp, Homo sapiens
aaactaagataaaaataaacagataggagagctgaattccatttcaagtcctcatgtatatgcttacaaagttccaaattaagcttgggactggttcttacatggcaggtaatccaaaccttttctatttactgaagattttcagctctcttacagaaatacacaggctaccattaaaattgtagggataaattttaaattgaatttgaaaataagagcagtaatccagggaggaaatggctaaggagaatgaaatagaagacacaaaaacaagcaatgggcaaccagaagggaatcacttaattatggtatatatatttttccagttgtaaagctttgggttcaggggttcatcagatcctcttaagatagaatcagaattgtaattgtgcctgaagaatggtagtggagtttaaaaaaataaggaccttaagacagtgttacctggtgtgtagaaaggacacagttttgaaagaaattgtttttgctttgcaaatttccccccccgcttggaaaactgtattcaaggccacctatatatggcaattaaggccctgactttgtagttatttcgtgtgtttttatttgattgaaactgatgaaagaaacaagatgcccgtactttttaaacagtatttttaaaataaaacattctgaggaaattgagggatcaggagagaggagcacagactaatagaagggctatgcaaaaactagacatgtaatgatacattcttgtttgattacttctcttcgtttctgtattgtgattt

SEQ ID NO: 733480 - DNA, 868 bp, Homo sapiens
  misc_feature (656)..(656): n is a, c, g, or t
agacaagaagatcttgcactcttgcccaggctggagtgcagtggtgcgatcacagttcactgcatcctcgaactcctgggctcaagggattctcctgcctcagcatcccgagtagctgggactacaggcatgcaccaccacacctggctaattttttaaattaatttttttgtaaagaccagggctcaccatcttgcccgggctggtcttgaactccagggttcaagcaatcctcctgcctcagcctcccaaaatgttggtattacatatgtgagccactgtgcctggcctccgttaaattttctaattggttgttgctgattaaaaagacggctaatgatcttttatgttgattcttgattaactaaaattatttctgatagtttttcaccagcttctcttaagagtttctaaaaatacaaatagctgttaataacagtttggtttcctcctttctcatatgtatttatttatttacttttttttttttttttttgagacaaggtctcactctgttgcccaggctgggagtgcagtgggcatgattgtggctcactggcagccttgacctccccaggctcaagcaatcctcccacctcagccttctgagtagctgggactacaggtgcccgccaccatgcccaactactttgtanttttttgtagagatgggttttcgccatgttggccaggctggtctcgaactcctggcctcaagtaatctgcctgcctcagcctcccacagtgttgggattacaggcgtgagccaccgcacctgggctcctttcccatatttatacccttaaatttttttctggccttactgcatagctagatctctaagacaataaatattagctatgataac

SEQ ID NO: 733481 - DNA, 737 bp, Homo sapiens
ttaatctgactgcacttaagaatcatctgaagtgtttgtattggttagtcttatttttaatactgatgtcctggtctctctcccctcaaaaaaactctgctgctgggaccaagcacatagatgctttttaaaaagctcccgaaaatgactctaatatgcagccaggattgaaaataactaccctacacagcatttttcctgattctgagcactcagcttttcattgattttccctagggcaagtccttcatcttattctgggtccttgtgttttctttctgaacctacaatttctccataggtcccatggttttcaaaatttctcattttccattttctgtccttttatattacctacttgaaaaccacagtcatctttcaaaacaaaacactgcctgtttcttaggtctttattgtgggcttgttattcctcaatacaaatttacataaaataataacaattaagacatgggccttggtgtcagaattattttatatctttcttattaactctgcagcttaccagctctggataagttaaaggacagctatagtcttactacatagaatcattataaggaattggtggagtgatccttataaagtgtttgcatggtacctagcacagagaaagtgcttgaagttgttaactgttatggttacaaaatatgtaaataatttttattgtccaattttctctcttcatatacactaaattgttctaattcttgaaccac

SEQ ID NO: 733482 - DNA, 4220 bp, Homo sapiens
ctgatggatttgcattcaggttccagccctgcgtttcctatattgactccttatacacgacctggcgctccagtttaggaggagacgttgttttgtaatcaaccacgaacgatgaaaccttccatagctgagatgcttcacagaggaaggatgttgtggataattcttctaagcacaattgctctaggatggactaccccgattcccctaatagaggactcagaggaaatagatgagccctgttttgatccatgctactgtgaagttaaagaaagcctctttcatatacattgtgacagtaaaggatttacaaatattagtcagattaccgagttctggtcaagaccttttaaactgtatctgcagaggaattctatgaggaaattatataccaacagttttcttcatttgaataatgctgtgtctattaatcttgggaacaatgcattgcaggacattcagactggagctttcaatggtcttaagattttaaagagactatatctacatgaaaacaaactagatgtcttcagaaatgacaccttccttggcttggaaagtctagaatatctgcaggcagattacaatgtcattaaacgtattgagagtggggcatttcggaacctaagtaaattgagggttctgattttaaatgataatctcatccccatgcttccaaccaatttatttaaggctgtctctttaacccatttggacctacgtggaaataggttaaaggttcttttttaccgaggaatgctagatcacattggcagaagcctgatggagctccagctggaagaaaacccttggaactgtacatgtgaaattgtacaactgaagagttggctggaacgcattccttatactgccctggtgggagacattacctgtgagacccctttccacttccatggaaaggacctacgagaaatcaggaagacagaactctgtcccttgttgtctgactctgaggtagaggctagtttgggaattccacattcgtcatcaagtaaggagaatgcatggccaactaagccttcctcaatgctatcctctgttcattttactgcttcttctgtcgaatacaagtcctcaaataaacagcctaagcccaccaaacagcctcgaacaccaaggccaccctccacctcccaagctttatatcctggtccaaaccagcctcccattgctccttatcagaccagaccaccaatccccattatatgccccactgggtgtacctgtaatttgcacatcaatgaccttggcttgactgtcaactgcaaagagcgaggatttaataacatttctgaacttcttccaaggcccttgaatgccaagaaactgtatctgagtagcaatctgattcagaaaatataccgttctgatttttggaatttttcttccttggatctcttgcatctggggaacaatcgtatttcctatgtccaagatggggcctttatcaacttgcccaacttaaagagcctcttccttaatggcaacgatatagagaagctgacaccaggcatgttccgaggcctacagagtttgcactacttgtactttgagttcaatgtcatccgggaaatccagcctgcagccttcagcctcatgcccaacttgaagctgctattcctcaataataacttactgaggactctgccaacagacgcctttgctggcacatccctggcccggctcaacctgaggaagaactacttcctctatcttcccgtggctggtgtcctggaacacttgaatgccattgtccagatagacctcaatgagaatccttgggactgcacctgtgacctggtcccctttaaacagtggatcgaaaccatcagctcagtcagtgtggttggtgatgtgctttgcaggagccctgagaacctcacgcaccgtgatgtgcgcactattgagctggaagttctttgcccagagatgctgcacgttgcaccagctggagaatccccagcccagcctggagattctcaccttattggggcaccaaccagtgcatcaccttatgagttttctcctcctgggggccctgtgccactttctgtgttaattctcagcctgctggttctgtttttctcagcagtctttgttgctgcaggcctctttgcctacgtgctccgaaggcgtcgaaagaagctgcccttcagaagcaagcggcaggaaggtgtggaccttactggcatccaaatgcaatgccacaggctgtttgaggatggtggaggtggtggtggcggaagtgggggtggtggtcgaccaactctttcctctccagagaaggcccctcccgtgggtcatgtgtatgagtacatcccccacccggttacccaaatgtgcaacaaccccatctacaagcctcgtgaggaggaggaggtggctgtttcatcagcccaagaagcagggagtgcagaacgtgggggtccagggacacaaccaccgggaatgggtgaggctctcctaggaagtgagcagtttgctgagacacccaaggagaaccatagtaactaccggaccttgctggaaaaagagaaggagtgggccctagcagtgtccagctcccagcttaacaccatagtgacggtgaatcaccatcaccctcaccacccagcagttggtggggtttcaggagtagttgggggaactgggggagacttggcagggttccgccaccatgagaaaaatggtggggtggtgctgtttcctcctgggggaggctgtggtagtggcagtatgctactagatcgagagaggccacagcctgccccctgcacagtgggatttgtggactgtctctatggaacagtgcccaaattaaaggaactgcacgtgcaccctcctggcatgcaatacccagacttacagcaggatgccaggctcaaagaaacccttctcttctcggctggaaagggcttcacagaccaccaaacccaaaaaagtgattacctcgagttaagggccaaacttcaaaccaagccggattacctcgaagtcctggagaagacaacatacaggttctaacagagagaagaaaatatattagtgctttttttttttcaaaagaaaaggaaaataaaagaaatatatcccttgctccctttacacttgtcccagtaactccatcctcacgatctttcctaccctgaacaaaactaaaaccgcatgataactagagaatacagatgtatgctctcccctctcagatgcgatttggaggaagggccatactcagatcattaatcaatgaaagtgccttcgcagacttttgccagcaaatgttatcattatttttttatactgaaacttgagactttgactgtgccatgtataagatatactggggatcattgtatggatcctaattaagtaaaattcaatgtgtctttttattttcagtaactattttttttatagttgtagttttgatttaaagggggggaaacaagttgacatttgtcatttgtggctttctttcttatcatcatggcacagattctgtacatgtattaacaatgcagtttgctgcatgcctggaaactgcaagatggggagggagggggcgggtcttgctcgaatgttctcactcactatcttgtctctcatacacatatccatctgcagaccatggtccctaaacctgcagtttcttcctgctggtgcaggtacacacacacacacacacacacacacacacacacacacacactccataccatttccattcaactcaatctgcttagttcgggtttgatccatttttctcctctccatagttctaccacccttcactgctagtgtacagctcacagcatctctcctaccaccctgggaaaagtcacattctaggctggattctactgaagtagaggcctggtggtttaacagccgaagacacacgcctagggatgagcaccctctttgtgacacttcatcctgatgccaagattttttggagaacatctgcactttcttatatatatatataatattaaaaaaagcaactgggtatatatcactaacagctttgtaggaagcacttttaatgttttctctctcacacacaaagattcaaaagaaatgtgcatatatttattctgtaatttcagtgattataaattgtaaaggtaatgtttaatcattgtatagtgattatgcctctggtatagctttcctaataaaaagtttttgaaaaacat

SEQ ID NO: 733483 - DNA, 4769 bp, Homo sapiens
ttttgtaatcaaccacgaacgatgaaaccttccatagctgagatgcttcacagaggaaggatgttgtggataattcttctaagcacaattgctctaggatggactaccccgattcccctaatagaggactcagaggaaatagatgagccctgttttgatccatgctactgtgaagttaaagaaagcctctttcatatacattgtgacagtaaaggatttacaaatattagtcagattaccgagttctggtcaagaccttttaaactgtatctgcagaggaattctatgaggaaattatataccaacagttttcttcatttgaataatgctgtgtctattaatcttgggaacaatgcattgcaggacattcagactggagctttcaatggtcttaagattttaaagagactatatctacatgaaaacaaactagatgtcttcagaaatgacaccttccttggcttggaaagtctagaatatctgcaggcagattacaatgtcattaaacgtattgagagtggggcatttcggaacctaagtaaattgagggttctgattttaaatgataatctcatccccatgcttccaaccaatttatttaaggctgtctctttaacccatttggacctacgtggaaataggttaaaggttcttttttaccgaggaatgctagatcacattggcagaagcctgatggagctccagctggaagaaaacccttggaactgtacatgtgaaattgtacaactgaagagttggctggaacgcattccttatactgccctggtgggagacattacctgtgagacccctttccacttccatggaaaggacctacgagaaatcaggaagacagaactctgtcccttgttgtctgactctgaggtagaggctagtttgggaattccacattcgtcatcaagtaaggagaatgcatggccaactaagccttcctcaatgctatcctctgttcattttactgcttcttctgtcgaatacaagtcctcaaataaacagcctaagcccaccaaacagcctcgaacaccaaggccaccctccacctcccaagctttatatcctggtccaaaccagcctcccattgctccttatcagaccagaccaccaatccccattatatgccccactgggtgtacctgtaatttgcacatcaatgaccttggcttgactgtcaactgcaaagagcgaggatttaataacatttctgaacttcttccaaggcccttgaatgccaagaaactgtatctgagtagcaatctgattcagaaaatataccgttctgatttttggaatttttcttccttggatctcttgcatctggggaacaatcgtatttcctatgtccaagatggggcctttatcaacttgcccaacttaaagagcctcttccttaatggcaacgatatagagaagctgacaccaggcatgttccgaggcctacagagtttgcactacttgtactttgagttcaatgtcatccgggaaatccagcctgcagccttcagcctcatgcccaacttgaagctgctattcctcaataataacttactgaggactctgccaacagacgcctttgctggcacatccctggcccggctcaacctgaggaagaactacttcctctatcttcccgtggctggtgtcctggaacacttgaatgccattgtccagatagacctcaatgagaatccttgggactgcacctgtgacctggtcccctttaaacagtggatcgaaaccatcagctcagtcagtgtggttggtgatgtgctttgcaggagccctgagaacctcacgcaccgtgatgtgcgcactattgagctggaagttctttgcccagagatgctgcacgttgcaccagctggagaatccccagcccagcctggagattctcaccttattggggcaccaaccagtgcatcaccttatgagttttctcctcctgggggccctgtgccactttctgtgttaattctcagcctgctggttctgtttttctcagcagtctttgttgctgcaggcctctttgcctacgtgctccgaaggcgtcgaaagaagctgcccttcagaagcaagcggcaggaaggtgtggaccttactggcatccaaatgcaatgccacaggctgtttgaggatggtggaggtggtggtggcggaagtgggggtggtggtcgaccaactctttcctctccagagaaggcccctcccgtgggtcatgtgtatgagtacatcccccacccggttacccaaatgtgcaacaaccccatctacaagcctcgtgaggaggaggaggtggctgtttcatcagcccaagaagcagggagtgcagaacgtgggggtccagggacacaaccaccgggaatgggtgaggctctcctaggaagtgagcagtttgctgagacacccaaggagaaccatagtaactaccggaccttgctggaaaaagagaaggagtgggccctagcagtgtccagctcccagcttaacaccatagtgacggtgaatcaccatcaccctcaccacccagcagttggtggggtttcaggagtagttgggggaactgggggagacttggcagggttccgccaccatgagaaaaatggtggggtggtgctgtttcctcctgggggaggctgtggtagtggcagtatgctactagatcgagagaggccacagcctgccccctgcacagtgggatttgtggactgtctctatggaacagtgcccaaattaaaggaactgcacgtgcaccctcctggcatgcaatacccagacttacagcaggatgccaggctcaaagaaacccttctcttctcggctggaaagggcttcacagaccaccaaacccaaaaaagtgattacctcgagttaagggccaaacttcaaaccaagccggattacctcgaagtcctggagaagacaacatacaggttctaacagagagaagaaaatatattagtgctttttttttttcaaaagaaaaggaaaataaaagaaatatatcccttgctccctttacacttgtcccagtaactccatcctcacgatctttcctaccctgaacaaaactaaaaccgcatgataactagagaatacagatgtatgctctcccctctcagatgcgatttggaggaagggccatactcagatcattaatcaatgaaagtgccttcgcagacttttgccagcaaatgttatcattatttttttatactgaaacttgagactttgactgtgccatgtataagatatactggggatcattgtatggatcctaattaagtaaaattcaatgtgtctttttattttcagtaactattttttttatagttgtagttttgatttaaagggggggaaacaagttgacatttgtcatttgtggctttctttcttatcatcatggcacagattctgtacatgtattaacaatgcagtttgctgcatgcctggaaactgcaagatggggagggagggggcgggtcttgctcgaatgttctcactcactatcttgtctctcatacacatatccatctgcagaccatggtccctaaacctgcagtttcttcctgctggtgcaggtacacacacacacacacacacacacacacacacacacacacactccataccatttccattcaactcaatctgcttagttcgggtttgatccatttttctcctctccatagttctaccacccttcactgctagtgtacagctcacagcatctctcctaccaccctgggaaaagtcacattctaggctggattctactgaagtagaggcctggtggtttaacagccgaagacacacgcctagggatgagcaccctctttgtgacacttcatcctgatgccaagattttttggagaacatctgcactttcttatatatatatataatattaaaaaaagcaactgggtatatatcactaacagctttgtaggaagcacttttaatgttttctctctcacacacaaagattcaaaagaaatgtgcatatatttattctgtaatttcagtgattataaattgtaaaggtaatgtttaatcattgtatagtgattatgcctctggtatagctttcctaataaaaagtttttgaaaaacataatacattatatatagaggatacaaagcttgaaccttaaactccagctatgccatgcctttcgtgcttccattttagaaatgatttcttttacttgttacacagaaagtaatttattaacgggtttgatgcactgtgatgttgataaatcttatatcccaccatctctagtccaaaccaggatacaattgagacttaaaatgtgacttacggtttacttttttttccttgaattatgaatttcagtcttagtaaccagtgatgcactgtttcccaggcaagatgcaagggggagaaaataaagtaactagatcgctaagaagtacaggattaattaggagaagataatctaggatccatacatcttaagataataaatgagataaagaaattggaaagtaaaattgctattgtttttaaaatatgtagtccaattacatgcacaccctcacacacccacacgcttccacacacacccacacaacccaataaatatcaaaggccgtggagccaatttagatggccagaatcctgtgaaagctgtcacttatatttggttaccattttccaaccacttacagcaactggccccaataacgcttgaactaagtcagaggatgctgaatgagtttttcgtcat

SEQ ID NO: 733484 - DNA, 450 bp, Homo sapiens
ggattatttcaatatttttgtaataaaaaatatagggtatacacataggcatcatcacattttttatagaccctggaatcgtttaaaatactttaagcatcataattacttgggatgtcagaaactggtcccacaaattccatcagcctgcctcagcagattgaaaacatttgtctcttgcaagatcaccctactttgcaagttggtgcccccaggaaccctggcccaggggtgctatcagaatatcaggtgaagagagaatcagcttaaatagaaagggcttgtcaagactggccaatgtttcccaggaaatcaaagatgtaaatgattactttcatccatccattataacaaacctgaccacagtggaagctgtcttaaacttccttccctggttttatattaacccaactgatagattaagtattagtcaaaccactaaaaaaaaaa

SEQ ID NO: 733485 - DNA, 379 bp, Homo sapiens
attcacctgtgcaagctctcagctcacttgtctacctctgcagctcaactttccaggctgctctttgttagtaaatgatttggggctgcttttcatgaaataaaaagtgtgactgaggattcctcaaacccttgctatctccctaagtgatttctttttaacttctatatcaaagagactggagatttttttatgagaactgcatattgcctctttggtttggtttgttttaaaggcaggttatctgtggaaaccttatttatatattaatttgtttctcttactggagctgaaaaactttttaaggagggatactgtactattcaaatacctttctaaagtcccctaactcccagctttaaacacagctggtttccca

SEQ ID NO: 733486 - DNA, 910 bp, Homo sapiens
  misc_feature (75)..(75): n is a, c, g, or t
  misc_feature (109)..(110): n is a, c, g, or t
  misc_feature (427)..(427): n is a, c, g, or t
  misc_feature (638)..(638): n is a, c, g, or t
  misc_feature (902)..(902): n is a, c, g, or t
agatacagaccctgtgtgcttcccctatactggctgtggaggaatgacaataacttgttagcagggagattgcanacgtgcatgtgcaaaagctttgaaaaagaaaaannaagatgcccaaagtacgctttgccagtagaatccggaaaattcggaagaagcaattttaaacattcttaatatgtcatcttgtttgtctttatggcttatttgcctttatggttgtatctgaagaataatatgacagcatgaggaaacaaatcattggtgatttattcaccagtttttattaatacaagtcactttttcaaaaatttggatttttttatatataactagctgctattcaaatgtgagtctaccatttttaatttatggttcaactgtttgtgagaactgaattcttgcaatgcataagatataaaangcaaatataactcactcatttcttggggtcgtattcctgatttcagaagaggatcataactgaaacaacataagacaatataatcatgtgcttttaacatatttgagaataaaaaggactagcaaataaaactcattttgcatttaaaagttggattatattttagtcccaagaagacaaagtcgcagattaacaacactttaaaaatatnactcccattttattgtgttagattgcagtacaatgaatgaataaggggatttatttaaaagatcttaactttcttgactgatttaaaaagctaatcaatttattaaagccagaaatgttctcctctgggaaagcaatttctatctatttatctaccaatccccactcacatgtatatgtttgtgtttacatagagatagatggttttaagggttttcctattgttaaattatttcctaagacattgtgggttggagaccactanacttataa

SEQ ID NO: 733487 - DNA, 838 bp, Homo sapiens
  misc_feature (75)..(75): n is a, c, g, or t
  misc_feature (109)..(110): n is a, c, g, or t
  misc_feature (427)..(427): n is a, c, g, or t
  misc_feature (638)..(638): n is a, c, g, or t
  misc_feature (771)..(771): n is a, c, g, or t
  misc_feature (798)..(798): n is a, c, g, or t
  misc_feature (822)..(822): n is a, c, g, or t
agatacagaccctgtgtgcttcccctatactggctgtggaggaatgacaataacttgttagcagggagattgcanacgtgcatgtgcaaaagctttgaaaaagaaaaannaagatgcccaaagtacgctttgccagtagaatccggaaaattcggaagaagcaattttaaacattcttaatatgtcatcttgtttgtctttatggcttatttgcctttatggttgtatctgaagaataatatgacagcatgaggaaacaaatcattggtgatttattcaccagtttttattaatacaagtcactttttcaaaaatttggatttttttatatataactagctgctattcaaatgtgagtctaccatttttaatttatggttcaactgtttgtgagaactgaattcttgcaatgcataagatataaaangcaaatataactcactcatttcttggggtcgtattcctgatttcagaagaggatcataactgaaacaacataagacaatataatcatgtgcttttaacatatttgagaataaaaaggactagcaaataaaactcattttgcatttaaaagttggattatattttagtcccaagaagacaaagtcgcagattaacaacactttaaaaatatnactcccattttattgtgttagattgcagtacaatgaatgaataaggggatttatttaaaagatcttaactttcttgactgatttaaaaagctaatcaatttattaaagccagaaatgttctcctctggggggnaggccatttcctatcccttttatcctnccccctccccccacttcactgggntttgggttgggggttt

SEQ ID NO: 733488 - DNA, 910 bp, Homo sapiens
  misc_feature (75)..(75): n is a, c, g, or t
  misc_feature (109)..(110): n is a, c, g, or t
  misc_feature (427)..(427): n is a, c, g, or t
  misc_feature (535)..(536): n is a, c, g, or t
  misc_feature (538)..(540): n is a, c, g, or t
  misc_feature (542)..(542): n is a, c, g, or t
  misc_feature (545)..(545): n is a, c, g, or t
  misc_feature (551)..(552): n is a, c, g, or t
  misc_feature (555)..(556): n is a, c, g, or t
  misc_feature (558)..(558): n is a, c, g, or t
  misc_feature (574)..(574): n is a, c, g, or t
  misc_feature (576)..(576): n is a, c, g, or t
  misc_feature (587)..(587): n is a, c, g, or t
  misc_feature (602)..(602): n is a, c, g, or t
  misc_feature (608)..(608): n is a, c, g, or t
  misc_feature (615)..(615): n is a, c, g, or t
  misc_feature (619)..(619): n is a, c, g, or t
  misc_feature (624)..(625): n is a, c, g, or t
  misc_feature (642)..(644): n is a, c, g, or t
  misc_feature (649)..(649): n is a, c, g, or t
  misc_feature (902)..(902): n is a, c, g, or t
agatacagaccctgtgtgcttcccctatactggctgtggaggaatgacaataacttgttagcagggagattgcanacgtgcatgtgcaaaagctttgaaaaagaaaaannaagatgcccaaagtacgctttgccagtagaatccggaaaattcggaagaagcaattttaaacattcttaatatgtcatcttgtttgtctttatggcttatttgcctttatggttgtatctgaagaataatatgacagcatgaggaaacaaatcattggtgatttattcaccagtttttattaatacaagtcactttttcaaaaatttggatttttttatatataactagctgctattcaaatgtgagtctaccatttttaatttatggttcaactgtttgtgagaactgaattcttgcaatgcataagatataaaangcaaatataactcactcatttcttggggtcgtattcctgatttcagaagaggatcataactgaaacaacataagacaatataatcatgtgcttttaacatatttgacnncnnnanccncccccnnccnncncccccctccccccccncncccccaccccncccccccccccacancccccnccccccnaccnccacnncgggggggggggggcgnnnggggnattgtgttagattgcagtacaatgaatgaataaggggatttatttaaaagatcttaactttcttgactgatttaaaaagctaatcaatttattaaagccagaaatgttctcctctgggaaagcaatttctatctatttatctaccaatccccactcacatgtatatgtttgtgtttacatagagatagatggttttaagggttttcctattgttaaattatttcctaagacattgtgggttggagaccactanacttataa

SEQ ID NO: 733489 - DNA, 716 bp, Homo sapiens
attttttttagaggcaggatcttgctgtccaattttttttaaaaagctaaaattgccaactttagaatcttgaccaaaaaaaattaattttaggagcatctatttatgcagtgttcaaaagtactgaattagaaaccaggaagttttagttccttctactacctgtgtgatcttggggaaattatttaacctctcagtcctaattttccccttctgtataatgggagttctggatcacaatatgtctgggctctcattacccaaacatctgagattccatttttgccatgtgtcatcgagtcgctccccaacagatgtttgtgatgtttttgtggctgtcaccatggtgggattctttcagaatgagactcctggaaattcactgagtcagcagccttcacaccatctacccttaaatatccaaccccagcaatttatacaacgctgtcatatttttaaaaaaacaaaagtaagccatcctcaaataaggaaccccttggtagatattaaccttaaaaagggttttcattctcaaacaagatgctttgttctccaacaagatgttcatctcatcacttgcacttttgttttaatgtatggattcagattagactgagaaaaatggatggtattttcttaaaattgtgccaccttagagcccccccccttttttttttcttccttcactggataaataaaatatgtgaacaagtgga

SEQ ID NO: 733490 - DNA, 588 bp, Homo sapiens
  misc_feature (339)..(339): n is a, c, g, or t
  misc_feature (357)..(357): n is a, c, g, or t
  misc_feature (367)..(367): n is a, c, g, or t
  misc_feature (369)..(369): n is a, c, g, or t
  misc_feature (374)..(374): n is a, c, g, or t
  misc_feature (422)..(422): n is a, c, g, or t
  misc_feature (450)..(450): n is a, c, g, or t
  misc_feature (477)..(477): n is a, c, g, or t
tccatggtagccaatcaagcttccaaataaattaaattccatttcattaaagggaaaatccccgagccactgagtcttggcttgtcactgaagttaaatctgaacccaggtgtcaacagctgctctaactccccactctggcactgaggagtattcccctcatctacctctctaagctatgcacccctccccacgtcttccagctggggatgggggagtcatagaaaagcccccatctccatctgggatagggaccttccatcagccttaaccctgggaaatgcctgctgcccccagtgactcttggtttcgtctcccacatacagaagcagggtggangggaagggtgggtctcanttagcagggntncccanggcaagtcagcctcctccctccatgcctctctggtcagtgtgccttanggtggcctctcactcccaccactctggngcccttgggggaggactggggaggggnccgtgggagagccctgacgctggaaccttgtatacacaaataaaggaccagtcctcaacagacttctggagccgcctgcctggagttctaaaacttagggcagggctggaa

SEQ ID NO: 733491 - DNA, 773 bp, Homo sapiens
gcattccgtgctatgattcaggcctaattaagtgattgcgtctgggcacggctataaaccactagctgcttcaactggtaatccagtcagtaggcaactgcaggggctcgccactgactgaaggcagtggaaggttggcagaaggaggctgttcaaggctgtttttgccttcactatggcaaaaatcattttgaggcacctcatagagattccagtgcgttaccaggaagagtttgaagctcgaggtctagaagactgcaggctggatcatgctttatatgcactgcctgggccaaccatcgtggacctgaggaaaaccagggcagcgcagtctcctccagtggactcagcggcagagacgccaccccgagaaggcaaatcccactttcagatcctgctggacgtggtccagttcctccctgaagacatcatcattcagaccttcgaaggctggctactgataaaagcacaacacggaaccagaatggatgagcacggttttatctcaagaagcttcacccgacagtacaaactaccagatggcgtggaaatcaaagatttgtctgcagtcctctgtcatgatggaattttggtggtggaagtaaaggatccagttgggactaagtgacatcgtatcggttcctgttcagatgacatggggaagatgatggttcagccactggtactacgagaatgtttgtattacccacatttgaaatgatttgctatgatttttatgaagattaaaaatatatacacagttaaaaaaaaaa

SEQ ID NO: 733492 - DNA, 482 bp, Homo sapiens
gcaactgcatattgaaatttgttaaagcactcatctttatggaaattaatcattatcctaaagaagtgtttctctcccatcatccggatttctggttgtggcccagcaattaacaaaaacagcttcaactgttcgaattttatgaaccaatgtaactctggcctcaatcatattcctctgggatttctaaacagcagttaagctacaaaaagcaaacaaaaccacacatattgatggagtctgcattccaccacatatccacccttgagaagtatgtcaaaagactgcagactatagatttttttttaatataggattataaatcagctagtgaaagacctcagagcagttgtaagtagatctgccatctagaactcatattctaaagggaagtgatttctcagaacagtgatgttctggaatatgtattatttattttaacacttttttaataaaatctttattataaaccaaaaaaaaaa

SEQ ID NO: 733493 - DNA, 1161 bp, Homo sapiens
  misc_feature (443)..(443): n is a, c, g, or t
acccgcagcctgtgatttcctgggtgacaccccgaagcgtttcatcaccaccaagtccaatggaagagccaccgtgttgggtgatggcaccttggaaatccgctttgcccaggatcaagacagcgggatgtatgtttgcatcgctagcaatgctgctgggaatgataccttcacagcctccttaactgtgaaaggattcgcttcagatcgttttctttatgcgaacaggacccctatgtacatgaccgactccaatgacaccatttccaatggcaccaatgccaatactttttccctggaccttaaaacaatactggtgtctacagctatggggctgcttcacattcctggggagtggttttattttgttttccttctccctttttgtgtggagccgagggaaagggcaagcacaaaaacagcattgaccttgaagtatgtgncccagaaaaaacaatggtgctgttgtggaaggggaggtagctggaccccaggaggttcaacatgaaaatgatttgaaggcccacccctcacattactgtctctttgtcaatgtgggtaatcagtaagacagtatggcacagtaaattactagattaagaggcagccatgtgcagctgcccctgtatcaaaagcagggtctatggaagcaggaggacttccaatggagactctccatcgaaaggcaggcaggcaggcatgtgtcagagcccttcacacagtgggatactaagtgtttgcgttgcaaatattggcgttctggggatctcagtaatgaacctgaatatttggctcacactcacggacaattattcagcattttctaccactgcaaaaaaacaaaagaaaaaataaaaaagaacaacctacagtgtaggatttacatattaaaaagacacatttgtctaaaacatactctacagaaaaatttgtatctatgattatcatttgttaaagccttgcatcataccatattgttggttcagtaccacaaagagatcaatatattcttttcttccttttttgaaacatatatgctgtacatgttttaaagcaatatgaatgagaggttgtgcttttagttactcaccactatagatccaagtgtgatttcaccttccgttacctacagatgaccctgagactagatccctggagtta

SEQ ID NO: 733494 - DNA, 466 bp, Homo sapiens
ccatgagaatggaggccattcatagcagaactacgagacaagaggagcctaggtccctgagctgcagaactgcatactaacctgatgagaagactaatgctcagtgaggtgaactccttcagggccacaggctgtaaagatctaaacaccatctgatccagtttcaatatgactgcctggatgaagaaggatttgagactaagtttattcctccaaagcaaaccaactgagaatgcagtttctgaggaccttggctcatttcaaaatctggaaatatatttgaacacctctcccagaagtgggtaagaagttagaataatggaaaggcttggctccaagttcagttgaatgtcaaaaagcccaagtttggctgaatggactttgtgtcgtgaaatctcagctccctctctcttcttccaggccaaatacctactggatgaaactgataaaattaaacaaagagaga

SEQ ID NO: 733495 - DNA, 499 bp, Homo sapiens
atgagaagactaatgctcagtgaggtgaactccttcagggccacaggctgtaaagatctaaacaccatctgatccagtttcaatatgactgcctggatgaagaaggatttgagactaagtttattcctccaaagcaaaccaactgagaatgcagttttcaatgcaacccatcatcaaagggaaggagttgatgaaaagaaatgaaattgaaacgtgcacctggggagaagtgattgaaggttcttcatttaagggattggctccttttctcttattatactgtgaaatctgaaaacatctcttgaaattctggtcactgtcttctggacatcccaaggcgcaccatctccacagttcctccctcctagattatcccatccagtgtggcatccagtgtggcaaatggaaagactcttccagtgggcaactgaaaaggacaccaaagaaagcagatacagcccatgatcaaagaagcacataacttcagtttggaacatga

SEQ ID NO: 733496 - DNA, 1574 bp, Homo sapiens
  misc_feature (1241)..(1242): n is a, c, g, or t
  misc_feature (1244)..(1244): n is a, c, g, or t
  misc_feature (1252)..(1252): n is a, c, g, or t
  misc_feature (1285)..(1285): n is a, c, g, or t
  misc_feature (1290)..(1290): n is a, c, g, or t
  misc_feature (1458)..(1458): n is a, c, g, or t
  misc_feature (1479)..(1479): n is a, c, g, or t
  misc_feature (1483)..(1483): n is a, c, g, or t
  misc_feature (1487)..(1487): n is a, c, g, or t
  misc_feature (1561)..(1561): n is a, c, g, or t
acgtcagcgccccggtccccgccgcagccgctgcatcctccgtgcccggcctgagctggagtcccccgcgccccccgcgttccgcccggccatggctgcggtggcgctgatgccaccgccgctgctgctgctgctgctgttggcgtcgccgcccgccgcctccgcgccgtccgcccgcgatcccttcgccccccagctcggggacacgcagaactgccagctgcggtgccgcgaccgcgacctcggcccgcagccctcgcaggcggggctggagggcgcctccgagtctccctatgacagagccgttctgatcagcgcttgcgagcgtggctgccgcctcttctccatctgccgatttgtggccagaagctccaagcccaatgccacccaaactgagtgtgaagcagcctgcgtggaagcctatgtgaaggaggcagagcagcaggcctgtagccacggctgctggagccagcccgcggagcctgagccggagcagaagagaaaggtcctggaggctccaagtggggccctctccctcttggacttgttttccaccctctgcaatgacctcgtcaactcagcccagggatttgtctcctccacctggacatactacttgcagactgacaatgggaaagtggtggtgtttcagactcagcccatagtggagagcctcggcttccaggggggccgtctgcagcgcgtggaggtgacctggcgaggctcccaccctgaagccctggaggtgcacgtggaccctgtaggccccctggacaaggtgaggaaggccaagatccgagtcaagaccagcagcaaggccaaggtggagtctgaagagccacaggacaatgacttcctcagttgcatgtcccggcgctcgggtctgcctcgctggatcctggcctgctgcctcttcctctccgtgctggtgatgctgtggctgagctgctccaccctggtgaccgcgcctggccagcacctcaagttccagcctctgaccctggagcagcacaagggcttcatgatggagcccgattggcccctgtacccgccgccgtcccacgcctgtgaggacagcctaccaccctacaagctgaagctggacctgaccaagctgtaggcctccactggccccatcactgccaactgcagggggcccctcgggcctcacttgccctgagcccaggagtccaagggcagggtgggtccagccttgagcccctccacccccaaatccttcnncncctcccantcccaccccttgccccacggagtcctggggacncagtnccccagctgggaagagggcgggatcgggcactggttcctccttgtccccgctttcttgggggcttgctactttttgtcttctattgtgtggctttctgagtatttgaaccccagtcctgtgtcaccttcctttttccttctctgtcccctctctgcgggggggcgctnaggctgagggggagctgcgtncttngctnagggcttcccccccccccccccccccccctcccagagacccaccccctcagagacagcccctgccatctccatncccctacaaagcg

SEQ ID NO: 733497 - DNA, 952 bp, Homo sapiens
acgtcagcgccccggtccccgccgcagccgctgcatcctccgtgcccggcctgagctggagtcccccgcgccccccgcgttccgcccggccatggctgcggtggcgctgatgccaccgccgctgctgctgctgctgctgttggcgtcgccgcccgccgcctccgcgccgtccgcccgcgatcccttcgccccccagctcggggacacgcagaactgccagctgcggtgccgcgaccgcgacctcggcccgcagccctcgcaggcggggctggagggcgcctccgagtctccctatgacagagccgttctgatcagcgcttgcgagcgtggctgccgcctcttctccatctgccgatttgtggccagaagctccaagcccaatgccacccaaactgagtgtgaagcagcctgcgtggaagcctatgtgaaggaggcagagcagcaggcctgtagccacggctgctggagccagcccgcggagcctgagccggagcagaagagaaaggtcctggaggctccaagtggggccctctccctcttggacttgttttccaccctctgcaatgacctcgtcaactcagcccagggatttgtctcctccacctggacatactacttgcagactgacaatgggaaagtggtggtgtttcagactcagcccatagtggagagcctcggcttccaggggggccgtctgcagcgcgtggaggtgacctggcgaggctcccaccctgaagccctggaggtgcacgtgggtaaggtgcaacctagaccagtgttccttccatgggtggccccactgccacaaggagtcggcctggcaaacagaccttctaggatcgggatctccatctctcaagtcctgggttccatggctcatcccccaggtctccatggtctatttcccagggttccatggtccacctcccagggttccatggtccacttctca

SEQ ID NO: 733498 - DNA, 1093 bp, Homo sapiens
acgtcagcgccccggtccccgccgcagccgctgcatcctccgtgcccggcctgagctggagtcccccgcgccccccgcgttccgcccggccatggctgcggtggcgctgatgccaccgccgctgctgctgctgctgctgttggcgtcgccgcccgccgcctccgcgccgtccgcccgcgatcccttcgccccccagctcggggacacgcagaactgccagctgcggtgccgcgaccgcgacctcggcccgcagccctcgcaggcggggctggagggcgcctccgagtctccctatgacagagccgttctgatcagcgcttgcgagcgtggctgccgcctcttctccatctgccgatttgtggccagaagctccaagcccaatgccacccaaactgagtgtgaagcagcctgcgtggaagcctatgtgaaggaggcagagcagcaggcctgtagccacggctgctggagccagcccgcggagcctgagccggagcagaagagaaaggtcctggaggctccaagtggggccctctccctcttggacttgttttccaccctctgcaatgacctcgtcaactcagcccagggatttgtctcctccacctggacatactacttgcagactgacaatgggaaagtggtggtgtttcagactcagcccatagtggagagcctcggcttccaggggggccgtctgcagcgcgtggaggtgacctggcgaggctcccaccctgaagccctggaggtgcacgtggaccctgtaggccccctggacaaggtgaggaaggccaagatccgagtcaagaccagcagcaaggccaaggtggagtctgaagagccacaggacaatgacttcctcagttgcatgtcccggtgggtggcaggaccttgggggtgggaggggggtgggactggaggtacgggtctccctggtcccggcctgggcagctgagtggtgcctgccgggcggggcaggcgctcgggtctgcctcgctggatcctggcctgctgcctcttcctctccgtgctggtgatgctgtggctgagctgctccaccctggtgaccgcgcctggccagcacctcaagttccag

SEQ ID NO: 733499 - DNA, 941 bp, Homo sapiens
acgtcagcgccccggtccccgccgcagccgctgcatcctccgtgcccggcctgagctggagtcccccgcgccccccgcgttccgcccggccatggctgcggtggcgctgatgccaccgccgctgctgctgctgctgctgttggcgtcgccgcccgccgcctccgcgccgtccgcccgcgatcccttcgccccccagctcggggacacgcagaactgccagctgcggtgccgcgaccgcgacctcggcccgcagccctcgcaggcggggctggagggcgcctccgagtctccctatgacagagccgttctgatcagcgcttgcgagcgtggctgccgcctcttctccatctgccgatttgtggccagaagctccaagcccaatgccacccaaactgagtgtgaagcagcctgcgtggaagcctatgtgaaggaggcagagcagcaggcctgtagccacggctgctggagccagcccgcggagcctgagccggagcagaagagaaaggtcctggaggctccaagtggggccctctccctcttggacttgttttccaccctctgcaatgacctcgtcaactcagcccagggatttgtctcctccacctggacatactacttgcagactgacaatgggaaagtggtggtgtttcagactcagcccatagtggagagcctcggcttccaggggggccgtctgcagcgcgtggaggtgacctggcgaggctcccaccctgaagccctggaggtgcacgtggaccctgtaggccccctggacaaggtgaggaaggccaagatccgagtcaagaccagcagcaaggccaaggcgctcgggtctgcctcgctggatcctggcctgctgcctcttcctctccgtgctggtgatgctgtggctgagctgctccaccctggtgaccgcgcctggccagcacctcaagttccag

SEQ ID NO: 733500 - DNA, 963 bp, Homo sapiens; identical to SEQ ID NO: 15008

SEQ ID NO: 733501 - DNA, 685 bp, Homo sapiens
ccaggttccaagaggagacacctggagacgcaggcaggaaccatgcagacctctgtgacctagccacggaagtcatatagtatcaccactgccatacctcttggtcaaagcagccctgagctcacccatgaagagggatatagacctccacttctagacgggagaagtacccaggaattttaggggccacctccagatagttgccaaacccctcccacccacacttcactgtcactttggagatggagtgaacgtgccaccttcctgcttgctgtctccataaaggctgtgcacaccctgcttgaagaaagcttgggcgatgcgttttattttcaagtagaatgtggcaaagaccacttactttctctccagccacctccagatgcgcttgcaagctgtgcctgccattcttccagactctcctgtccagtgtgactcactttgccaacaacggaggcccagagtgcttctgtctccctccccactgcgcagggaaacagaacccagaccagcttctggatcagccctgtgcctgggatttctcactgaaacaaggtctcctggtgtcatttcctcccaatgctgtcctgggtgacactttccatttgagctgcttttttatataggccctagcaactaggggccgtgtcggaataacttcagacgagtcctttcactgttctta

SEQ ID NO: 733502 - DNA, 642 bp, Homo sapiens; identical to SEQ ID NO: 728848
  misc_feature (547)..(547): n is a, c, g, or t
  misc_feature (550)..(550): n is a, c, g, or t
  misc_feature (583)..(583): n is a, c, g, or t
  misc_feature (623)..(623): n is a, c, g, or t

SEQ ID NO: 733503 - DNA, 377 bp, Homo sapiens
gtttatcacccagcgcctatcacggctgaatcggtgtcccagctccacttttattctccctgcagagcgaggggagctgcatcagtggcttccagggcatgaacctccccaccgaatctggagagctttggatcctgggtgatgtcttcatccgccagtactttaccgtcttcgacagggcaaacaaccaggtcggcctggcccccgtggcttaagcctaagtctcttcagccacctcccaggaagatctggcctctgtcctgtgcccactttagatgtatctaattctcctgactgttcttcccaggggagtgtggaggtcttggccctgttccctgtcctaccaataacgtagaataaaaacataacccactgaa

SEQ ID NO: 733504 - DNA, 702 bp, Homo sapiens
gtttatcacccagcgcctatcacggctgaatcggtgtcccagctccacttttattctccctgcagagcgaggggagctgcatcagtggcttccagggcatgaacctccccaccgaatctggagagctttggatcctgggtgatgtcttcatccgccagtactttaccgtcttcgacagggcaaacaaccaggtcggcctggcccccgtggcttaagcctaagtctcttcagccacctcccaggaagatctggcctctgtcctgtgcccactttagatgtatctaattctcctgactgttcttcccaggggagtgtggaggtcttggccctgttccctgtcctaccaataacgtagaataaaaacataacccactgaaacaggttttgtggagctgcttctctttgctggtctttttccttcacattactggggttagaacgccagggcagggatgaaaatgaccacatccatttggatggcacccaacatagtgaccccagcagctgacacttcatgatggagccaagaagacagagaggcttcgggggttgtgctggaagcatcataaaaagacctgggggtcaaaatactgggctaattgtcttctcatagaagggacacagagctgagatcgtgccattgtactccagcctgggcgacacagagagactccagctcagaaagaaaaaaataggtcactg

SEQ ID NO: 733505 - DNA, 610 bp, Homo sapiens
ctcgagttggtacctgccagtaccctcgacggtaaggcagatcaccgtgtacagcatcaccatgaacggagaggccatcgcctgcgctgagggctgccaggccattgttgacaccggcacctctctgctgaccggcccaaccagccccattgccaacatccagagcgacatcggagccagcgagaactcagatggcgacatggtggtcagctgctcagccatcagcagcctgcccgacatcgtcttcaccatcaatggagtccagtaccccgtgccacccagtgcctacatcctgcagagcgaggggagctgcatcagtggcttccagggcatgaacctccccaccgaatctggagagctttggatcctgggtgatgtcttcatccgccagtactttaccgtcttcgacagggcaaacaaccaggtcggcctggcccccgtggcttaagcctaagtctcttcagccacctcccaggaagatctggcctctgtcctgtgcccactttagatgtatctaattctcctgactgttcttcccaggggagtgtggaggtcttggccctgttccctgtcctaccaataacgtagaataaaaacataacccactgaa

SEQ ID NO: 733506 - DNA, 469 bp, Homo sapiens
  misc_feature (457)..(457): n is a, c, g, or t
acatatacgactcgagttggtaccctctctccacactggaagtctgaactgggtgcctgttaccgtcgagggttactggcagatcaccgtggacagcatcaccatgaacggagaggccatcgcctgcgctgagggctgccaggccattgttgacaccggcacctctctgctgaccggcccaaccagccccattgccaacatccagagcgacatcggagccagcgagaactcagatggcgacatggtggtcagctgctcagccatcagcagcctgcccgacatcgtcttcaccatcaatggagtccagtaccccgtgccacccagtgcctacatcctgcagagcgaggggagctgcatcagtggcttccagggcatgaacctccccaccgaatctggagagctttggatcctgggtgatgtcttcatccgccaggtggagagagggtaccaactcgantcgtatatgtaa

SEQ ID NO: 733507 - DNA, 652 bp, Homo sapiens
acatatacgactcgagttggtaccctctctccacactggaagtctgaactgggtgcctgttaccgtcgagggttactggcagatcaccgtggacagcatcaccatgaacggagaggccatcgcctgcgctgagggctgccaggccattgttgacaccggcacctctctgctgaccggcccaaccagccccattgccaacatccagagcgacatcggagccagcgagaactcagatggcgacatggtggtcagctgctcagccatcagcagcctgcccgacatcgtcttcaccatcaatggagtccagtaccccgtgccacccagtgcctacatcctgcagagcgaggggagctgcatcagtggcttccagggcatgaacctccccaccgaatctggagagctttggatcctgggtgatgtcttcatccgccagtactttaccgtcttcgacagggcaaacaaccaggtcggcctggcccccgtggcttaagcctaagtctcttcagccacctcccaggaagatctggcctctgtcctgtgcccactttagatgtatctaattctcctgactgttcttcccaggggagtgtggaggtcttggccctgttccctgtcctaccaataacgtagaataaaaacataacccactgaa

SEQ ID NO: 733508 - DNA, 977 bp, Homo sapiens
acatatacgactcgagttggtaccctctctccacactggaagtctgaactgggtgcctgttaccgtcgagggttactggcagatcaccgtggacagcatcaccatgaacggagaggccatcgcctgcgctgagggctgccaggccattgttgacaccggcacctctctgctgaccggcccaaccagccccattgccaacatccagagcgacatcggagccagcgagaactcagatggcgacatggtggtcagctgctcagccatcagcagcctgcccgacatcgtcttcaccatcaatggagtccagtaccccgtgccacccagtgcctacatcctgcagagcgaggggagctgcatcagtggcttccagggcatgaacctccccaccgaatctggagagctttggatcctgggtgatgtcttcatccgccagtactttaccgtcttcgacagggcaaacaaccaggtcggcctggcccccgtggcttaagcctaagtctcttcagccacctcccaggaagatctggcctctgtcctgtgcccactttagatgtatctaattctcctgactgttcttcccaggggagtgtggaggtcttggccctgttccctgtcctaccaataacgtagaataaaaacataacccactgaaacaggttttgtggagctgcttctctttgctggtctttttccttcacattactggggttagaacgccagggcagggatgaaaatgaccacatccatttggatggcacccaacatagtgaccccagcagctgacacttcatgatggagccaagaagacagagaggcttcgggggttgtgctggaagcatcataaaaagacctgggggtcaaaatactgggctaattgtcttctcatagaagggacacagagctgagatcgtgccattgtactccagcctgggcgacacagagagactccagctcagaaagaaaaaaataggtcactg

SEQ ID NO: 733509 - DNA, 1365 bp, Homo sapiens
cttctccctcgagttgggacccgggaagaaccatgaagtggctgctgctgctgggtctggtggcactctctgagtgcatcatgtacaaggtccccctcatcagaaagaagtccttgaggcgcaccctgtccgagcgtggcctgctgaaggacttcctgaagaagcacaacctcaacccagccagaaagtacttcccccagtggaaggctcccaccctggtagatgaacagcccctggagaactacctggatatggagtacttcggcactatcggcatcggaactcctgcccaggatttcactgtcctctttgacaccggctcctccaacctgtgggtgccctcagtctactgctccagtcttgcctgcaccaaccacaaccgcttcaaccctgaggattcttccacctaccagtccaccagcgagacagtctccatcacctacggcaccggcagcatgacaggcatcctcggatacgacactgtccaggttggaggcatctctgacaccaatcagatcttcggcctgagcgagacggaacctggctccttcctgtattatgctcccttcgatggcatcctggggctggcctaccccagcatttcctcctccggggccacacccgtctttgacaacatctggaaccagggcctggtttctcaggacctcttctctgtctacctcagcgccgatgaccagagtggcagcgtggtgatctttggtggcattgactcttcttactacactggaagtctgaactgggtgcctgttaccgtcgagggttactggcagatcaccgtggacagcatcaccatgaacggagaggccatcgcctgcgctgagggctgccaggccattgttgacaccggcacctctctgctgaccggcccaaccagccccattgccaacatccagagcgacatcggagccagcgagaactcagatggcgacatggtggtcagctgctcagccatcagcagcctgcccgacatcgtcttcaccatcaatggagtccagtaccccgtgccacccagtgcctacatcctgcagagcgaggggagctgcatcagtggcttccagggcatgaacctccccaccgaatctggagagctttggatcctgggtgatgtcttcatccgccagtactttaccgtcttcgacagggcaaacaaccaggtcggcctggcccccgtggcttaagcctaagtctcttcagccacctcccaggaagatctggcctctgtcctgtgcccactttagatgtatctaattctcctgactgttcttcccaggggagtgtggaggtcttggccctgttccctgtcctaccaataacgtagaataaaaacataacccactgaaacag

SEQ ID NO: 733510 - DNA, 693 bp, Homo sapiens
cttctcccctcactttccacagcgatgaccagagtggcagcgtggtgatctttggtggcattgactctctccacaactggaagtctgaactgggtgcctgttaccgtcgagggttactggcagatcaccgtggacagcatcaccatgaacggagaggccatcgcctgcgctgagggctgccaggccattgttgacaccggcacctctctgctgaccggcccaaccagccccattgccaacatccagagcgacatcggagccagcgagaactcagatggcgacatggtggtcagctgctcagccatcagcagcctgcccgacatcgtcttcaccatcaatggagtccagtaccccgtgccacccagtgcctacatcctgcagagcgaggggagctgcatcagtggcttccagggcatgaacctccccaccgaatctggagagctttggatcctgggtgatgtcttcatccgccagtactttaccgtcttcgacagggcaaacaaccaggtcggcctggcccccgtggcttaagcctaagtctcttcagccacctcccaggaagatctggcctctgtcctgtgcccactttagatgtatctaattctcctgactgttcttcccaggggagtgtggaggtcttggccctgttccctgtcctaccaataacgtagaataaaaacataacccactgaa

SEQ ID NO: 733511 - DNA, 1018 bp, Homo sapiens
cttctcccctcactttccacagcgatgaccagagtggcagcgtggtgatctttggtggcattgactctctccacaactggaagtctgaactgggtgcctgttaccgtcgagggttactggcagatcaccgtggacagcatcaccatgaacggagaggccatcgcctgcgctgagggctgccaggccattgttgacaccggcacctctctgctgaccggcccaaccagccccattgccaacatccagagcgacatcggagccagcgagaactcagatggcgacatggtggtcagctgctcagccatcagcagcctgcccgacatcgtcttcaccatcaatggagtccagtaccccgtgccacccagtgcctacatcctgcagagcgaggggagctgcatcagtggcttccagggcatgaacctccccaccgaatctggagagctttggatcctgggtgatgtcttcatccgccagtactttaccgtcttcgacagggcaaacaaccaggtcggcctggcccccgtggcttaagcctaagtctcttcagccacctcccaggaagatctggcctctgtcctgtgcccactttagatgtatctaattctcctgactgttcttcccaggggagtgtggaggtcttggccctgttccctgtcctaccaataacgtagaataaaaacataacccactgaaacaggttttgtggagctgcttctctttgctggtctttttccttcacattactggggttagaacgccagggcagggatgaaaatgaccacatccatttggatggcacccaacatagtgaccccagcagctgacacttcatgatggagccaagaagacagagaggcttcgggggttgtgctggaagcatcataaaaagacctgggggtcaaaatactgggctaattgtcttctcatagaagggacacagagctgagatcgtgccattgtactccagcctgggcgacacagagagactccagctcagaaagaaaaaaataggtcactg

SEQ ID NO: 733512 - DNA, 935 bp, Homo sapiens
ctcgagttggtacctgccagtaccctcgacggtaaggcagatcaccgtgtacagcatcaccatgaacggagaggccatcgcctgcgctgagggctgccaggccattgttgacaccggcacctctctgctgaccggcccaaccagccccattgccaacatccagagcgacatcggagccagcgagaactcagatggcgacatggtggtcagctgctcagccatcagcagcctgcccgacatcgtcttcaccatcaatggagtccagtaccccgtgccacccagtgcctacatcctgcagagcgaggggagctgcatcagtggcttccagggcatgaacctccccaccgaatctggagagctttggatcctgggtgatgtcttcatccgccagtactttaccgtcttcgacagggcaaacaaccaggtcggcctggcccccgtggcttaagcctaagtctcttcagccacctcccaggaagatctggcctctgtcctgtgcccactttagatgtatctaattctcctgactgttcttcccaggggagtgtggaggtcttggccctgttccctgtcctaccaataacgtagaataaaaacataacccactgaaacaggttttgtggagctgcttctctttgctggtctttttccttcacattactggggttagaacgccagggcagggatgaaaatgaccacatccatttggatggcacccaacatagtgaccccagcagctgacacttcatgatggagccaagaagacagagaggcttcgggggttgtgctggaagcatcataaaaagacctgggggtcaaaatactgggctaattgtcttctcatagaagggacacagagctgagatcgtgccattgtactccagcctgggcgacacagagagactccagctcagaaagaaaaaaataggtcactg

SEQ ID NO: 733513 - DNA, 1016 bp, Homo sapiens
caggctgctgatggctgagcagctgaccaccatgtcgccatctgagttctcgctggctccgatgacgctctggatgttggcaatgggtctggttgggccgggcagcatgacaggcatcctcggatacgacactgtccaggttggaggcatctctgacaccaatcagatcttcggcctgagcgagacggaacctggctccttcctgtattatgctcccttcgatggcatcctggggctggcctaccccagcatttcctcctccggggccacacccgtctttgacaacatctggaaccagggcctggtttctcaggacctcttctctgtctacctcagcgccgatgaccagagtggcagcgtggtgatctttggtggcattgactcttcttactacactggaagtctgaactgggtgcctgttaccgtcgagggttactggcagatcaccgtggacagcatcaccatgaacggagaggccatcgcctgcgctgagggctgccaggccattgttgacaccggcacctctctgctgaccggcccaaccagccccattgccaacatccagagcgacatcggagccagcgagaactcagatggcgacatggtggtcagctgctcagccatcagcagcctgcccgacatcgtcttcaccatcaatggagtccagtaccccgtgccacccagtgcctacatcctgcagagcgaggggagctgcatcagtggcttccagggcatgaacctccccaccgaatctggagagctttggatcctgggtgatgtcttcatccgccagtactttaccgtcttcgacagggcaaacaaccaggtcggcctggcccccgtggcttaagcctaagtctcttcagccacctcccaggaagatctggcctctgtcctgtgcccactttagatgtatctaattctcctgactgttcttcccaggggagtgtggaggtcttggccctgttccctgtcctaccaataacgtagaataaaaacataacccactgaaacag

SEQ ID NO: 733514 - DNA, 526 bp, Homo sapiens
ctcgagttggtacctgccagtaccctcgacggtaaggcagatcaccgtgtacagcatcaccatgaacggagaggccatcgcctgcgctgagggctgccaggccattgttgacaccggcacctctctgctgaccggcccaaccagccccattgccaacatccagagcgacatcggagccagcgagaactcagatggcgacatggtggtcagctgctcagccatcagcagcctgcccgacatcgtcttcaccatcaatggagtccagtaccccgtgccacccagtgcctacatcctgcagagcgaggggagctgcatcagtggcttccagggcatgaacctccccaccgaatctggagagctttggatcctgggtgatgtcttcatccgccaggtggagagagggagagagccagtgtggagagagccagtgtggagagagggagagagccagtgtggagagagggagagagccagtgtggagagagccagtgtggagagagggagagagccagtgtggagagggtcc

SEQ ID NO: 733515 - DNA, 427 bp, Homo sapiens
  misc_feature (415)..(415): n is a, c, g, or t
ctcgagttggtacctgccagtaccctcgacggtaaggcagatcaccgtgtacagcatcaccatgaacggagaggccatcgcctgcgctgagggctgccaggccattgttgacaccggcacctctctgctgaccggcccaaccagccccattgccaacatccagagcgacatcggagccagcgagaactcagatggcgacatggtggtcagctgctcagccatcagcagcctgcccgacatcgtcttcaccatcaatggagtccagtaccccgtgccacccagtgcctacatcctgcagagcgaggggagctgcatcagtggcttccagggcatgaacctccccaccgaatctggagagctttggatcctgggtgatgtcttcatccgccaggtggagagagggtaccaactcgantcgtatatgtaa

SEQ ID NO: 733516 - DNA, 609 bp, Homo sapiens
cttctcccctcactttccacagcgatgaccagagtggcagcgtggtgatctttggtggcattgactctctccacaactggaagtctgaactgggtgcctgttaccgtcgagggttactggcagatcaccgtggacagcatcaccatgaacggagaggccatcgcctgcgctgagggctgccaggccattgttgacaccggcacctctctgctgaccggcccaaccagccccattgccaacatccagagcgacatcggagccagcgagaactcagatggcgacatggtggtcagctgctcagccatcagcagcctgcccgacatcgtcttcaccatcaatggagtccagtaccccgtgccacccagtgcctacatcctgcagagcgaggggagctgcatcagtggcttccagggcatgaacctccccaccgaatctggagagctttggatcctgggtgatgtcttcatccgccaggtggagagagggagagagccagtgtggagagagccagtgtggagagagggagagagccagtgtggagagagggagagagccagtgtggagagagccagtgtggagagagggagagagccagtgtggagagggtcc

SEQ ID NO: 733517 - DNA, 510 bp, Homo sapiens
  misc_feature (498)..(498): n is a, c, g, or t
cttctcccctcactttccacagcgatgaccagagtggcagcgtggtgatctttggtggcattgactctctccacaactggaagtctgaactgggtgcctgttaccgtcgagggttactggcagatcaccgtggacagcatcaccatgaacggagaggccatcgcctgcgctgagggctgccaggccattgttgacaccggcacctctctgctgaccggcccaaccagccccattgccaacatccagagcgacatcggagccagcgagaactcagatggcgacatggtggtcagctgctcagccatcagcagcctgcccgacatcgtcttcaccatcaatggagtccagtaccccgtgccacccagtgcctacatcctgcagagcgaggggagctgcatcagtggcttccagggcatgaacctccccaccgaatctggagagctttggatcctgggtgatgtcttcatccgccaggtggagagagggtaccaactcgantcgtatatgtaa

SEQ ID NO: 733518 - DNA, 649 bp, Homo sapiens
tacatatacgaatcgagttggtacctctcacactggaagtctgaactgggtgcctgttaccgtcgagggttactggcagatcaccgtggacagcatcaccatgaacggagaggccatcgcctgcgctgagggctgccaggccattgttgacaccggcacctctctgctgaccggcccaaccagccccattgccaacatccagagcgacatcggagccagcgagaactcagatggcgacatggtggtcagctgctcagccatcagcagcctgcccgacatcgtcttcaccatcaatggagtccagtaccccgtgccacccagtgcctacatcctgcagagcgaggggagctgcatcagtggcttccagggcatgaacctccccaccgaatctggagagctttggatcctgggtgatgtcttcatccgccagtactttaccgtcttcgacagggcaaacaaccaggtcggcctggcccccgtggcttaagcctaagtctcttcagccacctcccaggaagatctggcctctgtcctgtgcccactttagatgtatctaattctcctgactgttcttcccaggggagtgtggaggtcttggccctgttccctgtcctaccaataacgtagaataaaaacataacccactgaa

SEQ ID NO: 733519 - DNA, 974 bp, Homo sapiens
tacatatacgaatcgagttggtacctctcacactggaagtctgaactgggtgcctgttaccgtcgagggttactggcagatcaccgtggacagcatcaccatgaacggagaggccatcgcctgcgctgagggctgccaggccattgttgacaccggcacctctctgctgaccggcccaaccagccccattgccaacatccagagcgacatcggagccagcgagaactcagatggcgacatggtggtcagctgctcagccatcagcagcctgcccgacatcgtcttcaccatcaatggagtccagtaccccgtgccacccagtgcctacatcctgcagagcgaggggagctgcatcagtggcttccagggcatgaacctccccaccgaatctggagagctttggatcctgggtgatgtcttcatccgccagtactttaccgtcttcgacagggcaaacaaccaggtcggcctggcccccgtggcttaagcctaagtctcttcagccacctcccaggaagatctggcctctgtcctgtgcccactttagatgtatctaattctcctgactgttcttcccaggggagtgtggaggtcttggccctgttccctgtcctaccaataacgtagaataaaaacataacccactgaaacaggttttgtggagctgcttctctttgctggtctttttccttcacattactggggttagaacgccagggcagggatgaaaatgaccacatccatttggatggcacccaacatagtgaccccagcagctgacacttcatgatggagccaagaagacagagaggcttcgggggttgtgctggaagcatcataaaaagacctgggggtcaaaatactgggctaattgtcttctcatagaagggacacagagctgagatcgtgccattgtactccagcctgggcgacacagagagactccagctcagaaagaaaaaaataggtcactg

SEQ ID NO: 733520 - DNA, 565 bp, Homo sapiens
tacatatacgaatcgagttggtacctctcacactggaagtctgaactgggtgcctgttaccgtcgagggttactggcagatcaccgtggacagcatcaccatgaacggagaggccatcgcctgcgctgagggctgccaggccattgttgacaccggcacctctctgctgaccggcccaaccagccccattgccaacatccagagcgacatcggagccagcgagaactcagatggcgacatggtggtcagctgctcagccatcagcagcctgcccgacatcgtcttcaccatcaatggagtccagtaccccgtgccacccagtgcctacatcctgcagagcgaggggagctgcatcagtggcttccagggcatgaacctccccaccgaatctggagagctttggatcctgggtgatgtcttcatccgccaggtggagagagggagagagccagtgtggagagagccagtgtggagagagggagagagccagtgtggagagagggagagagccagtgtggagagagccagtgtggagagagggagagagccagtgtggagagggtcc

SEQ ID NO: 733521 - DNA, 466 bp, Homo sapiens
  misc_feature (454)..(454): n is a, c, g, or t
tacatatacgaatcgagttggtacctctcacactggaagtctgaactgggtgcctgttaccgtcgagggttactggcagatcaccgtggacagcatcaccatgaacggagaggccatcgcctgcgctgagggctgccaggccattgttgacaccggcacctctctgctgaccggcccaaccagccccattgccaacatccagagcgacatcggagccagcgagaactcagatggcgacatggtggtcagctgctcagccatcagcagcctgcccgacatcgtcttcaccatcaatggagtccagtaccccgtgccacccagtgcctacatcctgcagagcgaggggagctgcatcagtggcttccagggcatgaacctccccaccgaatctggagagctttggatcctgggtgatgtcttcatccgccaggtggagagagggtaccaactcgantcgtatatgtaa

SEQ ID NO: 733522 - DNA, 568 bp, Homo sapiens
acatatacgactcgagttggtaccctctctccacactggaagtctgaactgggtgcctgttaccgtcgagggttactggcagatcaccgtggacagcatcaccatgaacggagaggccatcgcctgcgctgagggctgccaggccattgttgacaccggcacctctctgctgaccggcccaaccagccccattgccaacatccagagcgacatcggagccagcgagaactcagatggcgacatggtggtcagctgctcagccatcagcagcctgcccgacatcgtcttcaccatcaatggagtccagtaccccgtgccacccagtgcctacatcctgcagagcgaggggagctgcatcagtggcttccagggcatgaacctccccaccgaatctggagagctttggatcctgggtgatgtcttcatccgccaggtggagagagggagagagccagtgtggagagagccagtgtggagagagggagagagccagtgtggagagagggagagagccagtgtggagagagccagtgtggagagagggagagagccagtgtggagagggtcc

SEQ ID NO: 733523 - DNA, 1015 bp, Homo sapiens
ctgccctcctcccgggctgataccctggaagccaagtcctgcatgagatgaaccagggtggctctgggcctgaggctggcatccagagctcagtgaacatgacccgatggtgaacatcatctcggtttccccacccaggttggaggcatctctgacaccaatcagatcttcggcctgagcgagacggaacctggctccttcctgtattatgctcccttcgatggcatcctggggctggcctaccccagcatttcctcctccggggccacacccgtctttgacaacatctggaaccagggcctggtttctcaggacctcttctctgtctacctcagcgccgatgaccagagtggcagcgtggtgatctttggtggcattgactcttcttactacactggaagtctgaactgggtgcctgttaccgtcgagggttactggcagatcaccgtggacagcatcaccatgaacggagaggccatcgcctgcgctgagggctgccaggccattgttgacaccggcacctctctgctgaccggcccaaccagccccattgccaacatccagagcgacatcggagccagcgagaactcagatggcgacatggtggtcagctgctcagccatcagcagcctgcccgacatcgtcttcaccatcaatggagtccagtaccccgtgccacccagtgcctacatcctgcagagcgaggggagctgcatcagtggcttccagggcatgaacctccccaccgaatctggagagctttggatcctgggtgatgtcttcatccgccagtactttaccgtcttcgacagggcaaacaaccaggtcggcctggcccccgtggcttaagcctaagtctcttcagccacctcccaggaagatctggcctctgtcctgtgcccactttagatgtatctaattctcctgactgttcttcccaggggagtgtggaggtcttggccctgttccctgtcctaccaataacgtagaataaaaacataacccactgaaacag

SEQ ID NO: 733524 - DNA, 549 bp, Homo sapiens
ctcgagttggtacctgccagtaccctcgacggtaaggcagatcaccgtgtacagcatcaccatgaacggagaggccatcgcctgcgctgagggctgccaggccattgttgacaccggcacctctctgctgaccggcccaaccagccccattgccaacatccagagcgacatcggagccagcgagaactcagatggcgacatggtggtcagctgctcagccatcagcagcctgcccgacatcgtcttcaccatcaatggagtccagtaccccgtgccacccagtgcctacatcctgcagagcgaggggagctgcatcagtggcttccagggcatgaacctccccaccgaatctggagagctttggatcctgggtgatgtcttcatccgccaggtggagagagagagagagccagtgtggagagagggagagagccagtgtggagagagccagtgtggagagagggagagagccagtgtggagagagggagagagccagtgtggagagagccagtgtggagagagggagagagccagtgtggagagggtcc

SEQ ID NO: 733525 - DNA, 632 bp, Homo sapiens
cttctcccctcactttccacagcgatgaccagagtggcagcgtggtgatctttggtggcattgactctctccacaactggaagtctgaactgggtgcctgttaccgtcgagggttactggcagatcaccgtggacagcatcaccatgaacggagaggccatcgcctgcgctgagggctgccaggccattgttgacaccggcacctctctgctgaccggcccaaccagccccattgccaacatccagagcgacatcggagccagcgagaactcagatggcgacatggtggtcagctgctcagccatcagcagcctgcccgacatcgtcttcaccatcaatggagtccagtaccccgtgccacccagtgcctacatcctgcagagcgaggggagctgcatcagtggcttccagggcatgaacctccccaccgaatctggagagctttggatcctgggtgatgtcttcatccgccaggtggagagagagagagagccagtgtggagagagggagagagccagtgtggagagagccagtgtggagagagggagagagccagtgtggagagagggagagagccagtgtggagagagccagtgtggagagagggagagagccagtgtggagagggtcc

SEQ ID NO: 733526 - DNA, 588 bp, Homo sapiens
tacatatacgaatcgagttggtacctctcacactggaagtctgaactgggtgcctgttaccgtcgagggttactggcagatcaccgtggacagcatcaccatgaacggagaggccatcgcctgcgctgagggctgccaggccattgttgacaccggcacctctctgctgaccggcccaaccagccccattgccaacatccagagcgacatcggagccagcgagaactcagatggcgacatggtggtcagctgctcagccatcagcagcctgcccgacatcgtcttcaccatcaatggagtccagtaccccgtgccacccagtgcctacatcctgcagagcgaggggagctgcatcagtggcttccagggcatgaacctccccaccgaatctggagagctttggatcctgggtgatgtcttcatccgccaggtggagagagagagagagccagtgtggagagagggagagagccagtgtggagagagccagtgtggagagagggagagagccagtgtggagagagggagagagccagtgtggagagagccagtgtggagagagggagagagccagtgtggagagggtcc

SEQ ID NO: 733527 - DNA, 591 bp, Homo sapiens
acatatacgactcgagttggtaccctctctccacactggaagtctgaactgggtgcctgttaccgtcgagggttactggcagatcaccgtggacagcatcaccatgaacggagaggccatcgcctgcgctgagggctgccaggccattgttgacaccggcacctctctgctgaccggcccaaccagccccattgccaacatccagagcgacatcggagccagcgagaactcagatggcgacatggtggtcagctgctcagccatcagcagcctgcccgacatcgtcttcaccatcaatggagtccagtaccccgtgccacccagtgcctacatcctgcagagcgaggggagctgcatcagtggcttccagggcatgaacctccccaccgaatctggagagctttggatcctgggtgatgtcttcatccgccaggtggagagagagagagagccagtgtggagagagggagagagccagtgtggagagagccagtgtggagagagggagagagccagtgtggagagagggagagagccagtgtggagagagccagtgtggagagagggagagagccagtgtggagagggtcc

SEQ ID NO: 733528 - DNA, 695 bp, Homo sapiens
tacatatacgaatcgagttggtacctctcacactggctctctctacactggctctctctctctctctctctctccacactggaagtctgaactgggtgcctgttaccgtcgagggttactggcagatcaccgtggacagcatcaccatgaacggagaggccatcgcctgcgctgagggctgccaggccattgttgacaccggcacctctctgctgaccggcccaaccagccccattgccaacatccagagcgacatcggagccagcgagaactcagatggcgacatggtggtcagctgctcagccatcagcagcctgcccgacatcgtcttcaccatcaatggagtccagtaccccgtgccacccagtgcctacatcctgcagagcgaggggagctgcatcagtggcttccagggcatgaacctccccaccgaatctggagagctttggatcctgggtgatgtcttcatccgccagtactttaccgtcttcgacagggcaaacaaccaggtcggcctggcccccgtggcttaagcctaagtctcttcagccacctcccaggaagatctggcctctgtcctgtgcccactttagatgtatctaattctcctgactgttcttcccaggggagtgtggaggtcttggccctgttccctgtcctaccaataacgtagaataaaaacataacccactgaa

SEQ ID NO: 733529 - DNA, 1020 bp, Homo sapiens
tacatatacgaatcgagttggtacctctcacactggctctctctacactggctctctctctctctctctctctccacactggaagtctgaactgggtgcctgttaccgtcgagggttactggcagatcaccgtggacagcatcaccatgaacggagaggccatcgcctgcgctgagggctgccaggccattgttgacaccggcacctctctgctgaccggcccaaccagccccattgccaacatccagagcgacatcggagccagcgagaactcagatggcgacatggtggtcagctgctcagccatcagcagcctgcccgacatcgtcttcaccatcaatggagtccagtaccccgtgccacccagtgcctacatcctgcagagcgaggggagctgcatcagtggcttccagggcatgaacctccccaccgaatctggagagctttggatcctgggtgatgtcttcatccgccagtactttaccgtcttcgacagggcaaacaaccaggtcggcctggcccccgtggcttaagcctaagtctcttcagccacctcccaggaagatctggcctctgtcctgtgcccactttagatgtatctaattctcctgactgttcttcccaggggagtgtggaggtcttggccctgttccctgtcctaccaataacgtagaataaaaacataacccactgaaacaggttttgtggagctgcttctctttgctggtctttttccttcacattactggggttagaacgccagggcagggatgaaaatgaccacatccatttggatggcacccaacatagtgaccccagcagctgacacttcatgatggagccaagaagacagagaggcttcgggggttgtgctggaagcatcataaaaagacctgggggtcaaaatactgggctaattgtcttctcatagaagggacacagagctgagatcgtgccattgtactccagcctgggcgacacagagagactccagctcagaaagaaaaaaataggtcactg

SEQ ID NO: 733530 - DNA, 611 bp, Homo sapiens
tacatatacgaatcgagttggtacctctcacactggctctctctacactggctctctctctctctctctctctccacactggaagtctgaactgggtgcctgttaccgtcgagggttactggcagatcaccgtggacagcatcaccatgaacggagaggccatcgcctgcgctgagggctgccaggccattgttgacaccggcacctctctgctgaccggcccaaccagccccattgccaacatccagagcgacatcggagccagcgagaactcagatggcgacatggtggtcagctgctcagccatcagcagcctgcccgacatcgtcttcaccatcaatggagtccagtaccccgtgccacccagtgcctacatcctgcagagcgaggggagctgcatcagtggcttccagggcatgaacctccccaccgaatctggagagctttggatcctgggtgatgtcttcatccgccaggtggagagagggagagagccagtgtggagagagccagtgtggagagagggagagagccagtgtggagagagggagagagccagtgtggagagagccagtgtggagagagggagagagccagtgtggagagggtcc

SEQ ID NO: 733531 - DNA, 634 bp, Homo sapiens
tacatatacgaatcgagttggtacctctcacactggctctctctacactggctctctctctctctctctctctccacactggaagtctgaactgggtgcctgttaccgtcgagggttactggcagatcaccgtggacagcatcaccatgaacggagaggccatcgcctgcgctgagggctgccaggccattgttgacaccggcacctctctgctgaccggcccaaccagccccattgccaacatccagagcgacatcggagccagcgagaactcagatggcgacatggtggtcagctgctcagccatcagcagcctgcccgacatcgtcttcaccatcaatggagtccagtaccccgtgccacccagtgcctacatcctgcagagcgaggggagctgcatcagtggcttccagggcatgaacctccccaccgaatctggagagctttggatcctgggtgatgtcttcatccgccaggtggagagagagagagagccagtgtggagagagggagagagccagtgtggagagagccagtgtggagagagggagagagccagtgtggagagagggagagagccagtgtggagagagccagtgtggagagagggagagagccagtgtggagagggtcc

SEQ ID NO: 733532 - DNA, 512 bp, Homo sapiens
  misc_feature (500)..(500): n is a, c, g, or t
tacatatacgaatcgagttggtacctctcacactggctctctctacactggctctctctctctctctctctctccacactggaagtctgaactgggtgcctgttaccgtcgagggttactggcagatcaccgtggacagcatcaccatgaacggagaggccatcgcctgcgctgagggctgccaggccattgttgacaccggcacctctctgctgaccggcccaaccagccccattgccaacatccagagcgacatcggagccagcgagaactcagatggcgacatggtggtcagctgctcagccatcagcagcctgcccgacatcgtcttcaccatcaatggagtccagtaccccgtgccacccagtgcctacatcctgcagagcgaggggagctgcatcagtggcttccagggcatgaacctccccaccgaatctggagagctttggatcctgggtgatgtcttcatccgccaggtggagagagggtaccaactcgantcgtatatgtaa

SEQ ID NO: 733533 - DNA, 491 bp, Homo sapiens
  misc_feature (479)..(479): n is a, c, g, or t
ctgccctcctcccgggctgataccctggaagccaagtcctgcatgagatgaaccagggtggctctgggcctgaggctggcatccagagctcagtgaacatgacccgatggtgaacatcatctcggtttccccacccaggttggaggcatctctgacaccaatcagatcttcggcctgagcgagacggaacctggctccttcctgtattatgctcccttcgatggcatcctggggctggcctaccccagcatttcctcctccggggccacacccgtctttgacaacatctggaaccagggcctggtttctcaggacctcttctctgtctacctcagcgccgatgaccagagtggcagcgtggtgatctttggtggcattgactcttcttactacactggaagtctgaactgggtgcctgttaccgtcgagggttactggcagatcaccgtggacaggtggagagagggtaccaactcgantcgtatatgtaa

SEQ ID NO: 733534 - DNA, 492 bp, Homo sapiens
  misc_feature (480)..(480): n is a, c, g, or t
caggctgctgatggctgagcagctgaccaccatgtcgccatctgagttctcgctggctccgatgacgctctggatgttggcaatgggtctggttgggccgggcagcatgacaggcatcctcggatacgacactgtccaggttggaggcatctctgacaccaatcagatcttcggcctgagcgagacggaacctggctccttcctgtattatgctcccttcgatggcatcctggggctggcctaccccagcatttcctcctccggggccacacccgtctttgacaacatctggaaccagggcctggtttctcaggacctcttctctgtctacctcagcgccgatgaccagagtggcagcgtggtgatctttggtggcattgactcttcttactacactggaagtctgaactgggtgcctgttaccgtcgagggttactggcagatcaccgtggacaggtggagagagggtaccaactcgantcgtatatgtaa

SEQ ID NO: 733535 - DNA, 841 bp, Homo sapiens
  misc_feature (829)..(829): n is a, c, g, or t
cttctccctcgagttgggacccgggaagaaccatgaagtggctgctgctgctgggtctggtggcactctctgagtgcatcatgtacaaggtccccctcatcagaaagaagtccttgaggcgcaccctgtccgagcgtggcctgctgaaggacttcctgaagaagcacaacctcaacccagccagaaagtacttcccccagtggaaggctcccaccctggtagatgaacagcccctggagaactacctggatatggagtacttcggcactatcggcatcggaactcctgcccaggatttcactgtcctctttgacaccggctcctccaacctgtgggtgccctcagtctactgctccagtcttgcctgcaccaaccacaaccgcttcaaccctgaggattcttccacctaccagtccaccagcgagacagtctccatcacctacggcaccggcagcatgacaggcatcctcggatacgacactgtccaggttggaggcatctctgacaccaatcagatcttcggcctgagcgagacggaacctggctccttcctgtattatgctcccttcgatggcatcctggggctggcctaccccagcatttcctcctccggggccacacccgtctttgacaacatctggaaccagggcctggtttctcaggacctcttctctgtctacctcagcgccgatgaccagagtggcagcgtggtgatctttggtggcattgactcttcttactacactggaagtctgaactgggtgcctgttaccgtcgagggttactggcagatcaccgtggacaggtggagagagggtaccaactcgantcgtatatgtaa

SEQ ID NO: 733536 - DNA, 447 bp, Homo sapiens
accacacattcaaactataaggcctgtgttcttccaaacgtagttccaccactcccccgctgtgtgaccttgggcaggtggcctcacctccctcaggctcagtgtcctcatggtaagtggaaacaacagtgacggtgcccactgcatgggccctggcctaagaggaaaagaaaccacattggtcacaccccaggacagccctggaaagtgcccaatcaacggtcgctctgaggaggcaacagcagatggtcacacaaatggacgaacaaaaaaattcatgtcttctcccctcactttccacagcgatgaccagagtggcagcgtggtgatctttggtggcattgactcttcttactacactggaagtctgaactgggtgcctgttaccgtcgagggttactggcagatcaccgtggacaggtgagactgccatgaacgggcagcatc

SEQ ID NO: 733537 - DNA, 437 bp, Homo sapiens
gtttggataggagacattgtaaaactcaagaatgggaaaaaaaaattttaacagaagtatgtatgaaggaaatattttaagtataatctacccaaagaaaataactgctacagccaacattaaaggttttattccctgttttgttaagtaacttcactccaaattgtgacattctttagagaaaatattttccttaagagtagttatttacgtgttttattgggggagcatattttcaggggggcaacatcttgctaagaacatttgattagcctcacttctgtcctcaccttctatattgcttacttttcaagatatttcttctgagcccttttctttgtatgcccagctccctgttatgtaattaagtagttgattaccattccaaatgcttcccctacacaggctgttgtccaccctgtttcatgaatttgtga

SEQ ID NO: 733538 - DNA, 1056 bp, Homo sapiens
  misc_feature (4)..(5): n is a, c, g, or t
  misc_feature (653)..(653): n is a, c, g, or t
gcgnncacactcaaaacaaagagcatcaggatggcattggtcttaccacaagcagaatgctggaagacaatggtggaataccttcagaactctaagaaacaaatgatttccaacactgatttccaaaactggtttaattatgtcaagtctagggtgcaatcaacacattttagatatgcagaagctaaaacaatacttccctcgcaccctttcttgagaagctattagaggatgtgctttcagtaaccaagaaagcaggatgtggtagacaggggccaccacaatagaggatgctagctatgctcccagcctagaacacaactagtccagactggagtaggagggtggaagactaagggtaggaggcctccaagaaaaagcaaaatgcaaatggtaggttatgtgtttgagtactcagaaaaatggatagatgtcagaaagatattgcagtgattaattttatgtgtcaacttcactgggtcatagggtgcccagatatttggtcaagcattattctggtaataatatgtgtgtctttgagggtgtttctggacaagattaacattggaatcagtagactgaataaagcagacggccctcctcaaggtgggtgggcatcatccaatcagcttaaggccagaatagaacaaaanggctgaccctccctcaagtaagagggaaccctcctgcctgattgcttgtgttggaatttgtctcttcctgccttcagacttgaactgaattattggctgggtctcaagacttcaggctttcagactggaacacaacatcgactctcctgggtctccaacttgccaaatgtagatcttgggacttctcagcctccctaactatgtgagcctgttccttataatgaacctatttctatatatgcatactattggttttgtttctctggagaaccctgactaatacagatatatagaaatgtttagaaagtgatatatgtgataacatatgaaagaactgtagataactcttaaagaaaatgtcattttagacaattaaaatatttgtgctcaactgcttgaaaaa

SEQ ID NO: 733539 - DNA, 559 bp, Homo sapiens
  misc_feature (8)..(8): n is a, c, g, or t
  misc_feature (29)..(29): n is a, c, g, or t
  misc_feature (97)..(97): n is a, c, g, or t
  misc_feature (112)..(112): n is a, c, g, or t
  misc_feature (117)..(117): n is a, c, g, or t
  misc_feature (170)..(170): n is a, c, g, or t
  misc_feature (193)..(193): n is a, c, g, or t
  misc_feature (228)..(228): n is a, c, g, or t
  misc_feature (246)..(246): n is a, c, g, or t
ggacggcntggcctaaggctcctccaacngcaccatcaaggcccgggagcctgccagaactgatcccttggtgtgggaggactgggtaccacctacncccaacaagtcatgngggantctaattggtaggattttgacggttttgcaacataggtctattattagagtcnccatgacaaaaataggggttacnagatatgcccaagtcagcatttgtcctgggtcccntgtgtgatctgtttgganatgtttccttttcttctcccacttgctcagcagcttgggcttccattctagttcttttaccagatttttgtgtgacctgttgacttcatttggattgccctctttcaatttccttgtgaaaaacccttaactttctctttacccttagctgaaatgtttacatagcttctggtgatatcttttcatgattttatatctcttaaaatggtgatggatgtgacacctcataaaagtgagctttgaactgtagataactcttaaagaaaatgtcattttagacaattaaaatatttgtgctcaactgcttgaaaaa

SEQ ID NO: 733540 - DNA, 460 bp, Homo sapiens
agcaaaaataagaaaattaaaactacctataaatccaacatgcagagataaccactgttattaatctgttaatgactatatttttctaatatttttaagatttttatttctttttaaaagtaggatcatagtaaacatactgttttattagcctgctgtttttcactttacattatatcttggaaatacctccttgccatcagttactttcacgtaaccttttgatggttctcaccattgattgtaaatatttctttttatgtgtgagacttttgtggctttctcattttcgctgggggaatgtaacaagaagctcagttttcttttcaaaaataaaaatggcactgagtgcggtggctaatgcctgtaatcccagcactttgggaagccaaagtgggaggatcgcttgagcccaggagtttgagaccagcctgggcaacatagtgagacccgtctctgc

SEQ ID NO: 733541 - DNA, 474 bp, Homo sapiens
gaaaagcctgtgttcaggagggagttgccaaggcctcaagaaagatccctcctgagtgccagggattacagattcccaggggactttcctaaggcctcggctggcccctccagccctgctcacctcggaagctcagctcactgtcactaaccccacagtcctctgcagagctctccttctcctgcttgctgctgccccggctcctcttgacgctcttatagaactgcccccagcggtgccgccctgcatccttcttcaggcgtttctctttggcccttctgttctgaaaccaaacctgccacacaagcacaagggacatactcagggggcgtccaccacaaacccaaagcccccagggaccccctagggcgggcggctgggaagcagactgaagcctgaatgggagcacaggtcttggggagtgcgatgcggccccacccctttttccccagggtgggcctcagaactctgtct

SEQ ID NO: 733542 - DNA, 904 bp, Homo sapiens; identical to SEQ ID NO: 41156
  misc_feature (843)..(843): n is a, c, g, or t
  misc_feature (869)..(869): n is a, c, g, or t

SEQ ID NO: 733543 - DNA, 1909 bp, Homo sapiens
aacatgcaattcatcactgctcaccagagctggcaggcgacaggtcattccggggcgctttcaaagagcgcatgtagagatacacactcaagaccacacaaaaaacagtggccgcaagtgcaaactgaagaaaatgactgtacacgtaatgaaactctacgccctggaagagagatgttccgatgactgcagatgtcaggataaaagcatagaatcctttaaaaaaaaaaaaaaaaggaagtggaaaattaatattaacccaaggctcacatgaaacttacgccactatgaaacaatgcaatgttcatttttaaagtcttaatttcattattcagactaaatacacacaaatatgcaaataagcaatgtctgaggtataattttcaatatacataccattatctcttgtagaactttccaaatagtttaacatattgattctttttcagttcaaatggtcattatttgcttttaattaagggaaaacagacaagaagtgcaacctgaaaattcccacaatccaaactctcaggcacaaagtcaaatggctaattattaacagagctgggccaaacacatattttaaagtctaatgccattacctaaggggagggtattatgcacctaccaggggtcaggcaccgagccaggttggtagttacaaaattataaatatttatacttaaccaagttgccaataatggtttcaaaagattctagtaaaactctatcatccagaacagagatcttaacatgccacccgcagaaaagatgccacaacacaaatgcccgaggctaggcaggggactgcgagtacctggggggtagggacagcaggcggggacattcacgtgcaatgccaagttaaaaagcacccgccctgtgacgctccacagaactctcgttccgggctagtcctgcagccacacagaaaggctcactggaagatccaatttttttcttttggctaaagaaatagttttgctttcaaaggagctgagtgcctcaaagagctgtgatcctaaaaagtcatcaaatccatttggataaacggtcaaaagcaaaaaagaggtagctgttatttatatgagaattctaaaaccaaaccttttgtaaagtaaaatagttgtctcaaattatctgaatccacattttccacaaatactccaaacaataacttctaaattctgacttttgaaaatattcatttacctttcataaaatgtaattttaaaaaagaatggttagataaagcagtcttttgctctctagcctatgtggattaaaaataatcatccaaaatgtcttaggaacctccttagttaataatcgtaaaatctcgaaaagaaatctcaatacttgaaccagagtaattagatgaggaaatttttaaaaaggatcaagcaacttggccagccactcccccactggctccaagagctccatgtccaagtgctgtgctcagtctctgaatgtaccacacccctcagagggaagtgaaaatataacacaagattacttagaaaagaattggtacctacagagaaacacacaaaacactgaaatcaaaggacctggcggcaaagtcaacaacccacctcaccccagactcaccttccctggtgtggtaagtgaaccaccagagggagggagggtgccaaaggttctaaaacttgctccatcagcaaagaatttggtaaaagcaacaaaaagtctaacaataccaatgataagtattaagcacccaccaggggtcagactctggagctgggggagacgttttatcacatgactggcactaaaaggcagaaggtgtctaaactatctttggcttcccctttagaacccagtggagtgactgcagacagagtagatgctgcgtaagtctctaaacaaagtatccaaagtt

SEQ ID NO: 733544 - DNA, 1385 bp, Homo sapiens
tagaggatccccccagttcctgcttcttgaaaccagttccagggtcttggctttgcctactctccttcctctccaatgcaatgaatgacattcagaattccaggttgaacccccaagacctatgcctcacccccgacccaggcagcaggaactcagggagttctcacctggtctgggacctgcaggacagctcggagctgcacccagagtttgcaaaatgccacgtgccttggacacccaggtttgcctatggagtgttctatgcagacccctgcacgggaggtgattcttatcacccacatgagcaatcatctcccccaattttctctaaacagagctgggcattaactcctcttgaaaggggcaggaatggctccaagatcacctccaggaaaggccagagtgttctaatgacttgaaaacctgctcccggccagaagcagccactcatcttggaaccccctggctctcattttggcctctcgaggatatgggctgtgatttctgagcacccagggaacacagttggctgattcctaatcaacctagttgtacaggggacaaagtcagaggggcaatcaaactcgcaacagaactcgaatctacaagcctgacctgactcagggatctcgccttgtcaccgacacacaagcacggcccctttaccaacgtgttcattgttttgtttcaaaaggcaatgcggcagcgggtccttgggagccagctctagtatagcactggctaattttttaaaaacgtctgttggctgtgagtgaatgaatgaagggatgaagggatgaatggatgagttacaaccactgccaccctgtggaggaagctgaaaggctgaaagcaaagctcatgggagggaccatgcgccaggcaaggtgaggcctggggaggacttctccgctcatgggtgggagggcttggccccaggctactcttgaccccgaccctgggtcacagtcgtggtgtgtgacacatggaaagcaccatggggaagaagctatgggtgacagtggcagacgagatccagctgggacgtgctcagggcagtaaccccggaggaggcagctacaagaaagggtgtttgcttcataaccacagcccatggcgctacacagcccacccaaaatgaaagggtttgctttcaggagaagaaaaggccaaaagcacggggtcaagataagtaggccaaatgcatggatgggtagatggagcaattcatgttgaaagtcattgccggcctcccaaactcggataccaagctaaacatgtgggtgagggattctgacacgggcaaacagtgctcagtgctatagtagagggatgggtgggcagaagcagctctgctgagagcggaggatgctctggaaagaagg

SEQ ID NO: 733545 - DNA, 668 bp, Homo sapiens
tcttccttctgaccagaaacacacatttgggggtggctacgtctttagggtgctacttaaaacagcagactgagttgaagcacagctttgccacagggcctttgtctcattgtcactctgtgtgactaacctgtgtaatcattgtgttgtcatcagtacctgtataaaaacaggatctgtttgggattaccagaagcttcttaatgacagtgtcttctcatgaatgtagtgtatattttttacagtttatttttgcctatctttttgttttaaaaactttcaaacctgcataaaacttaaaataagaggataattaattcctgaatacctttacccagaatcgccagttgctagccattggctacattctggcactgtattctttccttaatacaagaaatacagaggtgaaagaagcctaggagatagttttattattaaaattagggtgattagcctgagcagcatgatgaggccctgtctctaccaaaaataaataaataaaaaaatacagaaattagccggttagtacacatgcctgtagtctcagctacttaggaggctgaggtgggaggatcacttgggcctgggagttggaggctgcagtgagctgagatcatgccatatcactacactccagcctgggtgacagagacagaccctatctc

SEQ ID NO: 733546 - DNA, 527 bp, Homo sapiens
tttcttggatgaaagccccatagtttgaattaaacaccccagactagttcccgttgcagcaataatgccggggttctcctcacaactcctccaccagaaacactctccaaacaaaaactgacggcctcaagaaatggcttctgattgacttcaggaaagcaagagcacctttacaccttctgagcgaactgccggactgggttctccagcccagatcttccttctagagactactcagcgttctccagctgggggaagagggaaggagacaccacaccgacaaaccccagaccatttgcaggatttgtaacaaggacacttctctttaagagcacctcctcctcctgcgtaggccgcaggtcagggtgactggttggaaccactgagtctttaaaataaagttagaggcaatcatgataatttagtttacttctgaatattttaaatattacgaaaacaagtataacagctttgttttcaaaactcttttgaggtatcagccattaaaagattaaggtttttgtaaa

SEQ ID NO: 733547 - DNA, 716 bp, Homo sapiens
gttttgggggacacttgaacactgactttggtgttttcccctggttgaggatggccctatggatactgagtttcctagaactaggggaccctaaacattcattgtaatgaaagcagatagattgtgagcataattactcccagaatgttgatgtaaagctgagagtaaatgggtagtttcttacaactaattgttcagtgtcaccagcacacctcactgagggggaaactgtccacccagcacgctgcatccagccctgctctgtgagaccacctcattcccattcagtctctttgttggccaggagtccataatggtgtgtgcatgtgggggagggggatcttttcctgccaatctacaaacctagcctacaaagcttcacctctacaatatgtactgaaagtaaagtgataaggaataattatgattgagattattattggccaccctaatataatgtacataataaactttatcatcataaacaaccacatttatactctgttgtgcccaagatactgtcttaggtgtcagcaattcaaagaataacatagagtccctattttcaatgtgcttactctctattctggacaataggatatttattcattcagtgacagtgactactaaataccatgaaagatacaaaaaagaaaaagaaatggtatctacagtaaaagattttacaaaggcaatcaggcaagcattcaaataac

SEQ ID NO: 733548 - DNA, 2902 bp, Homo sapiens
  misc_feature (2092)..(2092): n is a, c, g, or t
aacaactttagtacttggctttgtgtgaaagaaaacagaattccctatgtaatacccaacacaccatactcatgcaataaatattggtgaatacaggtgctgtactagagatgacaaaagtacaattaagagtcctatttttcactggatctactagttgaataaggatgccatatactaaagcatagaaaagttaaatatccattccctataaaatctaagaaatactatgcagtaatatgtcataaattgccaaataataatttactgtaatacagaaaaagatctgcacctatgtatgaaaagattctcagaaaactaagaataaagggaaattctaacttgatacatcctgtgcacctcaagtctatagcaaaagttacatttcattgagaaattttgagcacaatttaagtaagaggagaagataagaaagaagaaataaagttcactattcgtatatgatatagtcatttgtataaaatccaaaacagcaaactactagaactgagaaaattcagcaaggttgtctaatataagattaatttataaaaagcagttgttttttctataccgagagatcagcaatcttttttaaatgttttcagctttgtgggccatatggtctctgtcataactataactgctgatgtagtatgaaagcagccttagacatcatgtcaagacatggcaatgcctgtgttccaataaagctttctttgtaagtagatggcaagcttggatttggcctgtgagccataaatttctaacccctgccatttatcatgagaaacccacttagaaaatagtctaacaaaaattaacttaattaaaaacgcataaaaccttcatgggaaaaaaaaaatctaagtttattagaaaataaaagattgttatgtgatatatggcttaacctagtaatgcctgttttctttaaagcacatcagtgtctcctgttcaaaattttttttttcctagaaacttgacaaattcattttaaagttagcatagaccaatacaggtccagaattagctgagtcagttttgacagaaagaggaaggaaggaacactagacctacaaggtaaatgagagttactgtaaaattatactaataaaaacaacataatgctagcaaaagaaaggcaaatagattggtataaactagtaatctcagaaagattcatgtatatttgacaacttggtatatgatgtggcacaactaggtagtgaggttgcttaaagaagatgattatttagatttagtaggagtactggctatttggaaaaaaaagctagatccctactttcaactttatatgcaaaggctaactcttgaaggattaaagacctaaataagaaatataacacttatatttaatgaattcacttatatttagtgaatattcacttatatttagtgaatagtaggctgggcatggtggcttatgcctgtaatcccagcactttgagtggtcaggagttcaagaccagcctggccaacatggtgaaatcctacctctactaaaaatacaaaaattagctggtatggtggtggacacctgtagtcccagctactcgggaggctgaggcaggagaatcacttgaacccaggaggcggaggtttccgtgagccaagatcgtgccactgcactccagcctcggtgacacagtgagactctatctgaaaataaataaataaataaatgtgaatagtagaaattttggagaataactacatcatagggatcatagaacataatgttcaaatttagtagatctgattacatcagaattaaagatttctgttaaaagaactatacacagagttaaaagtcagatgtcagctttggaacttttaaaacctaaagggaataatacctgtaatatattaagaactcctaaaagttaacagaaacaaagaacaatagcttttaaaaaaataggtaaaagatactaacagacaatttaaataaagggtagctaagtgctaacaggtagatgagaagatagacaaactcactagtaatcagaaaaaaatgaaagtaaatgagatacaatttttcacccatcaaaatgacaaatatttaaangttttctgatgccaagtattgggtatggtgtagatatctgtgtacttacgatgtgagtgtaaactaatattgtcattctgtaaaccagtcaataattaaatcagaagtgtttaatccctctgacccagcactcagaggaatttttaaacagatctttgaggatataatctttgtagctgcatagtttgtagtagtggggatttggagatagcctagctaaatatccatcactggtaaatagagcaaataagaaaaatgaaatgggagtaacaatggtgagatctttaaaactagatgaaactttaaaacatacagttgagagaaagaaacaatgagattcataaatatttaagaaaatagaaaaagcacagtagaaggaaatcggagtagagataataggaggaaagaggaaacaagtttgaggaaatatcacttgctaaatttatttatattatatttctatagatgaagcaaggatgatacagattcttttttctggatgaagcctggcttgaaaaaaaaacaaatggggctgggcacggtggctcatgcctgtaatcctagcactttgggaggccgaggcaggcagatcatttgaggtcaggatttcaaaaccagcctgatcaacatggtgaaaccccatctctactaaaaatacaaaaattaggcatggtagcaggcgcctgtaaccccagctattcaggaggctgaggcaaggagaattgcttgaacccaggaggcagaggttgcagtgagccaagatcacaccactacaccccagcctgggtgatagagtgagactccatctca

SEQ ID NO: 733549 - DNA, 1328 bp, Homo sapiens
gagagcagaccaggcccggtggagaattaggtgctgctgggagctcctgcctcccacaggattccagctgcagggagcctcagggactctgggccgcacggagttgggggcattccccagagagcgtcgccatggtctgcagggagcagttatcaaagaatcaggtcaagtgggtgtttgccggcattacctgtgtgtctgtggtggtcattgccgcaatagtccttgccatcaccctgcggcggccaggctgtgagctggaggcctgcagccctgatgccgacatgctggactacctgctgagcctgggccagatcagccggcgagatgccttggaggtcacctggtaccacgcagccaacagcaagaaagccatgacagctgccctgaacagcaacatcacagtcctggaggctgacgtcaatgtagaagggctcggcacagccaatgagacaggagttcccatcatggcacacccccccactatctacagtgacaacacactggagcagtggctggacgctgtgctgggctcttcccaaaagggcatcaaactggacttcaagaacatcaaggcagtgggcccctccctggacctcctgcggcagctgacagaggaaggcaaagtccggcggcccatatggatcaacgctgacatcttaaagggccccaacatgctcatctcaactgaggtcaatgccacacagttcctggccctggtccaggagaagtatcccaaggctaccctatctccaggctggaccaccttctacatgtccacgtccccaaacaggacgtacacccaagccatggtggagaagatgcacgagctggtgggaggagtgccccagagggtcaccttccctgtacggtcttccatggtgcgggctgcctggccccacttcagctggctgctgagccaatctgagaggtacagcctgacgctgtggcaggctgcctcggaccccatgtcggtggaagatctgctctacgtccgggataacactgctgtccaccaagtctactatgacatctttgagcctctcctgtcacagttcaagcagctggccttgaatgccacacggaaaccaatgtactacacgggaggcagcctgatccctcttctccagctgcctggggatgacggtctgaatgtggagtggctggttcctgacgtccagggcagcggtaaaacagcaacaatgaccctcccagacacagaaggcatgatcctgctgaacactggcctcgagggaactgtggctgaaaaccccgtgcccattgttcatactccaagtggcaacatcctgacgctggagtcctgcctg

SEQ ID NO: 733550 - DNA, 477 bp, Homo sapiens; identical to SEQ ID NO: 43211

SEQ ID NO: 733551 - DNA, 878 bp, Homo sapiens
aggaaaagagcgggaaggggagtggaaggcaggggctgaagacacaggccaggcggaatgaagatgatggtggtcttgctcatgctgtcctcgctcagccggctcctgggcctcatgaggcactcatctctcaggcaatacctggactctgtgcccttgccaccctgccaggagcaacagccaaagctagtgccgagctagaccacaaggcctgctacctgtgccacagcttgctgatgctggccggggtagttgttagctgccaggacatcactccagaccagtggggcgagctgcagctgctgtgcatgcagttggaccgccacatcagcacgcagatccgggagagcccccaggccatgcaccgcaccaatgctcaaggacctggctacccagacctacatccgtttggcaggagctgctgacccacttgccagccccaggccccagtatttcagcccctggaaagacatctaaagggacagggtcagggcagcccagggctcctggcttcagcaggaagtgaacaggctcagggaactggaggaagcgaagcatcaaggccagaggaggccacatgctgaccagcctgatgaggcaagagcctgcccctgccaccgccccgacccctctcctctctgcaagagcctgcctctgccaccgccccgaccccctctcctctcagcaagggatgggcctctctgcctcgcccacccctcagccgctcctcccagccatctcctcttccctaaggcctctgtctccatagctctggtttccctgggcctcagtcctccccaccctccttcctctgtctccctgtcactaatgtgaggtttctttgtgcacattaaagtcttctttcagcatcagtggtt

SEQ ID NO: 733552 - DNA, 530 bp, Homo sapiens
aacacatagtaagttactttcatatccagaaagtttagatagaatgatttctatgtaagcttttactgtgtagtctgagtccatgaatattgattacaaaaaacacatctgtaggtgagttacaatacctcacttataattcaaaattcatgttgtgttagctcaatatttttcaaataatttttgcatgcaattttcaccttctttctgagtagtttcaggtattttgtatggttccagcagtcagttaggttgccattgtttggaagcacacatccacgtatctgcaccatgatgatatgacacgcccataccccccatttcacattttgtcagaagtgcatagttatcactaactttgccagtagaaatgtactcccaatttcccacggacttatcttgaataatctctccactgaaggcataacaggttttgaattctgttagaatagttgtttttactatcttttaattttatacaaatttcaaagttacgtaatacttttatttaaaaagtgaaacaaagcttt

SEQ ID NO: 733553 - DNA, 2144 bp, Homo sapiens; identical to SEQ ID NO: 43635

SEQ ID NO: 733554 - DNA, 2519 bp, Homo sapiens; identical to SEQ ID NO: 43637

SEQ ID NO: 733555 - DNA, 2465 bp, Homo sapiens; identical to SEQ ID NO: 43636

SEQ ID NO: 733556 - DNA, 1446 bp, Homo sapiens
taaaatatgtgaaatccccttttgttctgaggattctttagtaggcaggagtgaccagattggaatatgcttggctggaaaaattaagattcaacttaacagactgttaataaccagaaccatcttctcttccgtaatgtggatttgccactgcaggtcaccctacaatgctatgttagaggtacaacactcctaccctcaggctataaacaaggtgaattattatctttatatctcttcatttagccctgatttgctgaagtgaaggcttgcttgagagttggttgcattataatttggtgagaatttaatctctcaatgacaacttacttgattccctcattctctttctgctacatagatcacagtagaccttggcagacagttctgtagttacataggtctgaattcaaaatccagttctgccacttggcggctgtgtgaacttaagcaagtcaggcaatgtttctgatgttttcttttcctcctccacaaagaataattaacatctaacaatagggtctcagctagttgttttaaaaatggttagagagatgtgtggaatgaagtaagtgtgcagtaagtgttaactacaaatattattatcttagacatacagatttccatgattcatgaatggtgaagcatcttagaagacatccattctaagccaggcatggtggtgtgcacctatagtaccagttgctcagtagaatgaggcaggagaattgcttgagcctaggagtttgaggctagtatgggcaatatggtgagaccctatctcaagaaaaaagcaaaactttttttaaagcttaaaaagagagacatctgttccactactctcatcttagaggccagaaaactgaggctcagataatttcagagactttcacagatcccccaaccatttgatggcaaagccaggaatagaactctgctctcctttcccactgggacagtgggacagactgaccgatttttttctccacctctgctgtctcagcaatggtttgggacagtgtggatggaccagaagctggatagtacagagccagggataaaaagttcaggcttcctgaagggaagctgcagtcctccctaggccacaacaccttcgagatagaataaatacagcacccttctctacccaagttaggaaaggaagaagtgttacccaattagttgtatggggactgccaaagcacgccagtctgaagatgagcagaaactggctcattccatttggcacctagcacactaactgcaccagttaataggccacgcttttctccagagccattggctgaagagttcaaataaaaagtattgagaataggctatccaaaacagtaggctcagatgctatcacacaaagcactttatccttaagttcaatttttctaaattgtagttggctgctttggcttaataaaaaccttcataaaa

SEQ ID NO: 733557 - DNA, 687 bp, Homo sapiens
ggtcctctttacttgtccttaaaccgcacatgtgtatttttatttctttgaggaagactgggtggcaggcacctgtgtgtgtgtctggaaacatatagcaagctagaggcagatttcaggcaaaaaaaaatgctcttttgggctgggcgtggtgactcacatctataatctcagcagacaggtggatcacctgaggtcaggagtttgacaccagcctggccaacatggtgaaacctcgtctctactaaaaatacaaaagagctgggtgtggtggtgcatgcctgtaatcccagctgctcgggaggctgaggcaggagaatctcttgaacctgggagatggaggttgcagtgagctgacatcgcagtactgcactccagcctgagcaaaaaaaaaaaaaagaaaaagaaaaaagagcccttttatttaagtatttaaccagaagagaaactaaggatcagagagaaaatgtgggaaaagaaaaattgtaggcagaaggttttacctggctgaaaatcatccacaaatgattttctttctcctcaaaacattgagtctctctctctttttttttttttctgctgtgttgcccaggctgaggcaagagaatctcttgaacccatcttggcagtgagctgagattgcgctactgcacaccagcctgggcaacagagcaagactccatctaa

SEQ ID NO: 733558 - DNA, 1165 bp, Homo sapiens
  misc_feature (8)..(8): n is a, c, g, or t
taaaattngcttcaacaagctctccaccagttgactttctttggctaattttactttgcatgatatgccttaatatgccttcataaataaccattttaagtcataatttgtccttaagctgcttttttcttctattaattggatcatagtaaagagtagtcaatagggtcttcagctattaattgtagaggtgattaaaaccaacaaggagtttcatgtgcaaaggagataaggaatgaatataaagattgctatttgggtggctcttattaaactgtgtattttgtacttatcactacacgtatcccccaaatgcttacatgggagtttgaggttagtattttcacttccttggtgttagtactctattcacattcttattgtaaccttcctcatttcacagataaggaatctttggggattaaccaacctcctttctgtaatggtaatcattaaaataagtcctattgataaaggtcagatggagccctagagtgtattactgcatctatttttttccccgagaagataaaggaccttcagggatggcttaagtgtatctgtccagatgaaggatgggtcacatgacctcttggcttcccaagtctaagctctgtgactttgcaccagtgtgtgcatatatgtgcaaggcccttcaagtggtctgaaaccgtggctctaaaaaccacagctggtggagaggaggacagacacacttgccaccttgcctacctaattgccatctaaaatgggccgaacagtggatttcacaatagagttttcaccctttagatttacaacctgtcaggtggaaactgaagtgaaaactgctgcacacagcaattcagggagcaaaaaatgtgctgaggagactgtttacctaaaggttgttcttggtgctattccttgtcaaaatgtgaacacacacaaatgaggtttgtgcattgtcatccgtgggctgccattgagccagtaacccccagtggtctcatggtgctcttcgctccagtttggggaatgctggattctttcagcccctgcagccctccaggtcaaaatgacactttgtcactgagttttctacacagctctattagtaactgacagcacacgccttcaagggaacttcaagggaaacatggaataaactaagtctcaattgcaa

SEQ ID NO: 733559 - DNA, 379 bp, Homo sapiens
  misc_feature (152)..(152): n is a, c, g, or t
  misc_feature (378)..(379): n is a, c, g, or t
ttccagtgaaataatagaaaacttttattagcagcatcttaaaaagtagggaaacaaacaccccagtctcttgataaaaatgagtctcttgggccaggcgtggtggctcatgcttgtaatccccagcactttcagaggcccaggtgggcagnatcacaaggtcaggagttcaagaccagcctggccaaatggtgagaccacgcccccccccccccatctctactaaaaatacaaaaattagccgggtgtctgttgtcccagctacttgggaggctgaggcaggagaattgcttgaacctgggaggcggaggttgtagtgagccaagatccaagatcgtgccactgcatcccagcctgggcgacagagcgagactcttnn

SEQ ID NO: 733560 - DNA, 784 bp, Homo sapiens
aagtactgtggttatgtaggagtgtccttgtttttaaaaagtatacacttaagtatttagtactaatgggacatcacaattgcaacttagtaacaaacagttcaaaaaataatgtgaatacatagctagagagtggtatggaaaatatggcaagatgttaacaatagaagaatctaggggaaggatatacaggatcttttgaactattctacttttctgtaagtttaaaattatttcaaaatagttaacaaataagacaagtagtatttgagctgttaggaatttgtcacactgagatttttgttgtttttgagacagggtctcactctgtcacccgggctgggagtgcagtggccgcgatcattaggctcactggaagcctcaatctcaagggatcctcctgcctcagcctcctgagtaactgggactacaggcatgagccaccacacctggcccaatttttctgatttttaatagagatgagttctcacccatgttgcccaggttggtctcaaactcctgagctcaagcaatcctcctgcctttagcctcccaaggtgctgggattacaggcgtgaaccactgtgctgggcctacactgatttttatactattagaaaaatctctacttaacggtttcattatcttaggtaaaagtattcaatagaatagctgaaataaatgtgaagcttttcttaataggcagtaattagataaaatgaacaacattctcaatcctcctcatgccacataattctctccctgcaagtttgtctcaaaaaaa

SEQ ID NO: 733561 - DNA, 450 bp, Homo sapiens
acctgacagctcactgctcagattacttttctaaaatgagatgggagagaaacagatgtttgctctttccaagaaattgatacacatgctgatttctgtgccttttttacttgttctttccgtagaatgtacaccctccactctaacaccctactctaaccatccttgaacacctatgtaacatcacctttatcagaaaacttctcagccagatacagaaatcattccaatgacctgacctgtgttcacacagaactccagaacaagaccaagctgacagtgctggaaggagacattctggatgagccattcctgaagagagcctgccaggacgtctcggtcatcatccacaccgcctgtatcattgatgtcttcggtgtcactcacagagagtctatcatgaatgtcaatgtgaaaggtatggtaggctggggaggagatgcagcaagg

SEQ ID NO: 733562 - DNA, 1328 bp, Homo sapiens; identical to SEQ ID NO: 306883

SEQ ID NO: 733563 - DNA, 428 bp, Homo sapiens; identical to SEQ ID NO: 306885

SEQ ID NO: 733564 - DNA, 1661 bp, Homo sapiens
gtgagaagtacgtccactcttctgtccagcttttaacaatctaactaatgccctctccagggtcaccctagaatcagatctgctccccagcatcttctgtttcctggtgagtgattcctgctactttggatggccatgacgggctggagctgccttgtgacaggagcaggagggtttctgggacagaggatcatccgcctcttggtgaaggagaaggagctgaaggagatcagggtcttggacaaggccttcggaccagaattgagagaggaattttctaaactccagaacaagaccaagctgacagtgctggaaggagacattctggatgagccattcctgaagagagcctgccaggacgtctcggtcatcatccacaccgcctgtatcattgatgtcttcggtgtcactcacagagagtctatcatgaatgtcaatgtgaaaggtacccagctcctgttagaggcctgtgtccaagctagtgtgccagtcttcatctacaccagtagcatagaggtagccgggcccaactcctacaaggaaatcatccagaatggccatgaagaagagcctctggaaaacacatggcccgctccatacccacacagcaaaaagcttgctgagaaggctgtactggcggctaacgggtggaatctgaaaaacggcggcaccctgtacacttgtgccttacgacccatgtatatctatggggaaggaagccgattcctttctgctagtataaacgaggccctgaacaacaatgggatcctgtcaagtgttggaaagttctccactgttaacccagtctatgttggcaatgtggcctgggcccacattctggccttgagggccctgcaggaccccaagaaggccccaagcatccgaggacagttctactatatctcagatgacacgcctcaccaaagctatgataaccttaattacaccctgagcaaagagttcggcctccgccttgattccagatggagctttcctttatccctgatgtattggattggcttcctgctggaaatagtgagcttcctactcaggccaatttacacctatcgaccgcccttcaaccgccacatagtcacattgtcaaatagcgtattcaccttctcttataagaaggctcagcgagatttggcgtataagccactctacagctgggaggaagccaagcagaaaacggtggagtgggttggttcccttgtggaccggcacaaggagaacctgaagtccaagactcagtgatttaaggatgacagagatgtgcatgtgggtattgttaggagatgtcatcaagctccaccctcctggcctcatacagaaagtgacaagggcacaagctcaggtcctgctgcctccctttcatacaatggccaacttattgtattcctcatgtcatcaaaacctgcgcagtcattggcccaacaagaaggtttctgtcctaatcatataccagaggaaagaccatgtggtttgctgttaccaaatctcagtagctgattctgaacaatttagggactcttttaacttgagggtcgttttgactactagagctccatttctactcttaaatgagaaaggatttcctttctttttaatcttccattccttcacatagtttgataaaaagatcaataaatgtttgaatg

SEQ ID NO: 733565 - DNA, 1683 bp, Homo sapiens
gtgagaagtacgtccactcttctgtccagcttttaacaatctaactaatgccctctccagggtcaccctagaatcagatctgctccccagcatcttctgtttcctggtgagtgattcctgctactttggatggccatgacgggctggagctgccttgtgacaggagcaggagggtttctgggacagaggatcatccgcctcttggtgaaggagaaggagctgaaggagatcagggtcttggacaaggccttcggaccagaattgagagaggaattttctaaactccagaacaagaccaagctgacagtgctggaaggagacattctggatgagccattcctgaagagagcctgccaggacgtctcggtcatcatccacaccgcctgtatcattgatgtcttcggtgtcactcacagagagtctatcatgaatgtcaatgtgaaaggtacccagctcctgttagaggcctgtgtccaagctagtgtgccagtcttcatctacaccagtagcatagaggtagccgggcccaactcctacaaggaaatcatccagaatggccatgaagaagagcctctggaaaacacatggcccgctccatacccacacagcaaaaagcttgctgagaaggctgtactggcggctaacgggtggaatctgaaaaacggcggcaccctgtacacttgtgccttacgacccatgtatatctatggggaaggaagccgattcctttctgctagtataaacgaggccctgaacaacaatgggatcctgtcaagtgttggaaagttctccactgttaacccagtctatgttggcaatgtggcctgggcccacattctggccttgagggccctgcaggaccccaagaaggccccaagcatccgaggacagttctactatatctcagatgacacgcctcaccaaagctatgataaccttaattacaccctgagcaaagagttcggcctccgccttgattccagatggagctttcctttatccctgatgtattggattggcttcctgctggaaatagtgagcttcctactcaggccaatttacacctatcgaccgcccttcaaccgccacatagtcacattgtcaaatagcgtattcaccttctcttataagaaggctcagcgagatttggcgtataagccactctacagctgggaggaagccaagcagaaaacggtggagtgggttggttcccttgtggaccggcacaaggagaacctgaagtccaagactcagtgatttaaggatgacagagatgtgcatgtgggtattgttaggagatgtcatcaagctccaccctcctggcctcatacagaaagtgacaagggcacaagctcaggtcctgctgcctccctttcatacaatggccaacttattgtattcctcatgtcatcaaaacctgcgcagtcattggcccaacaagaaggtttctgtcctaatcatataccagaggaaagaccatgtggtttgctgttaccaaatctcagtagctgattctgaacaatttagggactcttttaacttgagggtcgttttgactactagagctccatttctactcttaaatgagaaaggatttcctttctttttaatcttccattccttcacatagtttgataaaaagatcaataaatgtttgaatgtttaatgtggagggaggtgtga

SEQ ID NO: 733566 - DNA, 441 bp, Homo sapiens; identical to SEQ ID NO: 306894

SEQ ID NO: 733567 - DNA, 419 bp, Homo sapiens
tacaatcgagctcggcccagttttacatgagatgtgcatgtgggtattgttaggagatgtcatcaagctccaccctcctggcctcatacagaaagtgacaagggcacaagctcaggtcctgctgcctccctttcatacaatggccaacttattgtattcctcatgtcatcaaaacctgcgcagtcattggcccaacaagaaggtttctgtcctaatcatataccagaggaaagaccatgtggtttgctgttaccaaatctcagtagctgattctgaacaatttagggactcttttaacttgagggtcgttttgactactagagctccatttctactcttaaatgagaaaggatttcctttctttttaatcttccattccttcacatagtttgataaaaagatcaataaatgtttgaatg

SEQ ID NO: 733568 - DNA, 1029 bp, Homo sapiens
gtgagaagtacgtccactcttctgtccagcttttaacaatctaactaatgccctctccagggtcaccctagaatcagatctgctccccagcatcttctgtttcctggtgagtgattcctgctactttggatggccatgacgggctggagctgccttgtgacaggagcaggagggtttctgggacagaggatcatccgcctcttggtgaaggagaaggagctgaaggagatcagggtcttggacaaggccttcggaccagaattgagagaggaattttctagtaagtaaacttgggtcatgggtgtgtggttccatcttaaacactgcatgtatgtggggggagatggaccttgtctagcaagttattgaaatttgtagccaaatctaagccaatctcacatccaaagtcatcaagaaataaatattaaatagtataaaatggcatagtatgaaagatactgggtgggatttccagagactagattctggccctgacccagaacttgagaagcagccacctcagcctccaggcctcttttcttctcatctagaaaatcccacatcagttctttgtcttgtctgcaactcttttatgttctgaagcttttgtcttggcaattgctgtacaacattcataaaggacactattaccctggagacctcaccaatgggtcattgtctctctagaacgtgccaggctgtgttttgttttgcagcttccttagtatcctttgtgagggcaaaataaaaggaagttaaggtaaagatgagtgtataagtgggtgtgtgtgacagagagagaggaaaacaataagggggagagagagtcggggagagagagtcggggagagagactcagagagagagacaatgagaaagacagagaaataatgaaaaatatatagtgagagagagagcatcagtgagagaatgtgtgtgcacagtgcacagcacagagcagagacagagtaagaggcagtataaggccagacatgcctcatttagattttgcatatatggctttttttt

SEQ ID NO: 733569 - DNA, 1738 bp, Homo sapiens; identical to SEQ ID NO: 306889

SEQ ID NO: 733570 - DNA, 1716 bp, Homo sapiens
tattgaagagtttatattgcctatatacaatggtgtatgtgtgtgtgtgatgtgaattcttcaactgcccattttgcctaaggactggaactgtccatattcacagagtatagcctcctgattttttagattttaaatgatctgactttaatggtactgattacaaatcataatttgtcaatacccttacttggcaaaataaaaagtgataaccctaggtccctttccaaaattaaagtacacacacacacacatccatgaaacccaaaagtctagaaattcttactctccagaacccacatgtcagtttctcttcattttggtatttttcttatggctgtagtacgaccaaatctcagacagaaccacagaagaatgtaccctgagtctgttacaaccaccatatttgggagtggggggtggggcacatagatctgtgttcgtggttggcacctcttagggatatatcctgacagtgacaatatgctcttcatggacaggtacccagctcctgttagaggcctgtgtccaagctagtgtgccagtcttcatctacaccagtagcatagaggtagccgggcccaactcctacaaggaaatcatccagaatggccatgaagaagagcctctggaaaacacatggcccgctccatacccacacagcaaaaagcttgctgagaaggctgtactggcggctaacgggtggaatctgaaaaacggcggcaccctgtacacttgtgccttacgacccatgtatatctatggggaaggaagccgattcctttctgctagtataaacgaggccctgaacaacaatgggatcctgtcaagtgttggaaagttctccactgttaacccagtctatgttggcaatgtggcctgggcccacattctggccttgagggccctgcaggaccccaagaaggccccaagcatccgaggacagttctactatatctcagatgacacgcctcaccaaagctatgataaccttaattacaccctgagcaaagagttcggcctccgccttgattccagatggagctttcctttatccctgatgtattggattggcttcctgctggaaatagtgagcttcctactcaggccaatttacacctatcgaccgcccttcaaccgccacatagtcacattgtcaaatagcgtattcaccttctcttataagaaggctcagcgagatttggcgtataagccactctacagctgggaggaagccaagcagaaaacggtggagtgggttggttcccttgtggaccggcacaaggagaacctgaagtccaagactcagtgatttaaggatgacagagatgtgcatgtgggtattgttaggagatgtcatcaagctccaccctcctggcctcatacagaaagtgacaagggcacaagctcaggtcctgctgcctccctttcatacaatggccaacttattgtattcctcatgtcatcaaaacctgcgcagtcattggcccaacaagaaggtttctgtcctaatcatataccagaggaaagaccatgtggtttgctgttaccaaatctcagtagctgattctgaacaatttagggactcttttaacttgagggtcgttttgactactagagctccatttctactcttaaatgagaaaggatttcctttctttttaatcttccattccttcacatagtttgataaaaagatcaataaatgtttgaatg

SEQ ID NO: 733571 - DNA, 1707 bp, Homo sapiens; identical to SEQ ID NO: 306888

SEQ ID NO: 733572 - DNA, 1685 bp, Homo sapiens
gtttgcaaaaaaaatggggtggaggaaaatgaggcatctgtgtgagtatataaccatttgacatctctttttagccctctccagggtcaccctagaatcagatctgctccccagcatcttctgtttcctggtgagtgattcctgctactttggatggccatgacgggctggagctgccttgtgacaggagcaggagggtttctgggacagaggatcatccgcctcttggtgaaggagaaggagctgaaggagatcagggtcttggacaaggccttcggaccagaattgagagaggaattttctaaactccagaacaagaccaagctgacagtgctggaaggagacattctggatgagccattcctgaagagagcctgccaggacgtctcggtcatcatccacaccgcctgtatcattgatgtcttcggtgtcactcacagagagtctatcatgaatgtcaatgtgaaaggtacccagctcctgttagaggcctgtgtccaagctagtgtgccagtcttcatctacaccagtagcatagaggtagccgggcccaactcctacaaggaaatcatccagaatggccatgaagaagagcctctggaaaacacatggcccgctccatacccacacagcaaaaagcttgctgagaaggctgtactggcggctaacgggtggaatctgaaaaacggcggcaccctgtacacttgtgccttacgacccatgtatatctatggggaaggaagccgattcctttctgctagtataaacgaggccctgaacaacaatgggatcctgtcaagtgttggaaagttctccactgttaacccagtctatgttggcaatgtggcctgggcccacattctggccttgagggccctgcaggaccccaagaaggccccaagcatccgaggacagttctactatatctcagatgacacgcctcaccaaagctatgataaccttaattacaccctgagcaaagagttcggcctccgccttgattccagatggagctttcctttatccctgatgtattggattggcttcctgctggaaatagtgagcttcctactcaggccaatttacacctatcgaccgcccttcaaccgccacatagtcacattgtcaaatagcgtattcaccttctcttataagaaggctcagcgagatttggcgtataagccactctacagctgggaggaagccaagcagaaaacggtggagtgggttggttcccttgtggaccggcacaaggagaacctgaagtccaagactcagtgatttaaggatgacagagatgtgcatgtgggtattgttaggagatgtcatcaagctccaccctcctggcctcatacagaaagtgacaagggcacaagctcaggtcctgctgcctccctttcatacaatggccaacttattgtattcctcatgtcatcaaaacctgcgcagtcattggcccaacaagaaggtttctgtcctaatcatataccagaggaaagaccatgtggtttgctgttaccaaatctcagtagctgattctgaacaatttagggactcttttaacttgagggtcgttttgactactagagctccatttctactcttaaatgagaaaggatttcctttctttttaatcttccattccttcacatagtttgataaaaagatcaataaatgtttgaatg

SEQ ID NO: 733573 - DNA, 874 bp, Homo sapiens
gtgagaagtacgtccactcttctgtccagcttttaacaatctaactaatgccctctccagggtcaccctagaatcagatctgctccccaagcatccgaggacagttctactatatctcagatgacacgcctcaccaaagctatgataaccttaattacaccctgagcaaagagttcggcctccgccttgattccagatggagctttcctttatccctgatgtattggattggcttcctgctggaaatagtgagcttcctactcaggccaatttacacctatcgaccgcccttcaaccgccacatagtcacattgtcaaatagcgtattcaccttctcttataagaaggctcagcgagatttggcgtataagccactctacagctgggaggaagccaagcagaaaacggtggagtgggttggttcccttgtggaccggcacaaggagaacctgaagtccaagactcagtgatttaaggatgacagagatgtgcatgtgggtattgttaggagatgtcatcaagctccaccctcctggcctcatacagaaagtgacaagggcacaagctcaggtcctgctgcctccctttcatacaatggccaacttattgtattcctcatgtcatcaaaacctgcgcagtcattggcccaacaagaaggtttctgtcctaatcatataccagaggaaagaccatgtggtttgctgttaccaaatctcagtagctgattctgaacaatttagggactcttttaacttgagggtcgttttgactactagagctccatttctactcttaaatgagaaaggatttcctttctttttaatcttccattccttcacatagtttgataaaaagatcaataaatgtttgaatg

SEQ ID NO: 733574 - DNA, 723 bp, Homo sapiens
gtgagaagtacgtccactcttctgtccagcttttaacaatctaactaatgccctctccagggtcaccctagaatcagatctgctccccagcatcttctgtttcctggtgagtgattcctgctactttggatggccatgacgggctggagctgccttgtgacaggagcaggagggtttctgggacagaggatcatccgcctcttggtgaaggagaaggagctgaaggagatcagggtcttggacaaggccttcggaccagaattgagagaggaattttctagaccggcacaaggagaacctgaagtccaagactcagtgatttaaggatgacagagatgtgcatgtgggtattgttaggagatgtcatcaagctccaccctcctggcctcatacagaaagtgacaagggcacaagctcaggtcctgctgcctccctttcatacaatggccaacttattgtattcctcatgtcatcaaaacctgcgcagtcattggcccaacaagaaggtttctgtcctaatcatataccagaggaaagaccatgtggtttgctgttaccaaatctcagtagctgattctgaacaatttagggactcttttaacttgagggtcgttttgactactagagctccatttctactcttaaatgagaaaggatttcctttctttttaatcttccattccttcacatagtttgataaaaagatcaataaatgtttgaatg

SEQ ID NO: 733575 - DNA, 450 bp, Homo sapiens; identical to SEQ ID NO: 364807

SEQ ID NO: 733576 - DNA, 3850 bp, Homo sapiens; identical to SEQ ID NO: 364806
  misc_feature (3846)..(3849): n is a, c, g, or t

SEQ ID NO: 733577 - DNA, 3810 bp, Homo sapiens; identical to SEQ ID NO: 364812
  misc_feature (3806)..(3809): n is a, c, g, or t

SEQ ID NO: 733578 - DNA, 325 bp, Homo sapiens; identical to SEQ ID NO: 364808

SEQ ID NO: 733579 - DNA, 536 bp, Homo sapiens; identical to SEQ ID NO: 364810

SEQ ID NO: 733580 - DNA, 185 bp, Homo sapiens; identical to SEQ ID NO: 364809

SEQ ID NO: 733581 - DNA, 566 bp, Homo sapiens; identical to SEQ ID NO: 364811

SEQ ID NO: 733582 - DNA, 433 bp, Homo sapiens
tccggggccccccccgtgccgcccacgggtgactccggggccccccccgtgccgcccacgggtgactccggcgccccccccgtgccgcccacgggtgacgccgggcccccccccgtgccgcccacgggtgactccggcgccccccccgtgccgcccacgggtgactccggggccccccccgtgacccccacgggtgactccgagaccgcccccgtgccgcccacgggtgactccggggccccccctgtgccccccacgggtgactctgaggctgcccctgtgccccccacagatgactccaaggaagctcagatgcctgcagtcattaggttttagcgtcccatgagccttggtatcaagaggccacaagagtgggaccccaggggctcccctcccatcttgagctcttcctgaataaagcctcatacccctg

SEQ ID NO: 733583 - DNA, 2006 bp, Homo sapiens
gatgctcaccatggggcgcctgcaactggttgtgttgggcctcacctgctgctgggcagtggcgagtgccgcgaagctgggcgccgtgtacacagaaggtgggttcgtggaaggcgtcaataagaagctcggcctcctgggtgactctgtggacatcttcaagggcatccccttcgcagctcccaccaaggccctggaaaatcctcagccacatcctggctggcaagggaccctgaaggccaagaacttcaagaagagatgcctgcaggccaccatcacccaggacagcacctacggggatgaagactgcctgtacctcaacatttgggtgccccagggcaggaagcaagtctcccgggacctgcccgttatgatctggatctatggaggcgccttcctcatggggtccggccatggggccaacttcctcaacaactacctgtatgacggcgaggagatcgccacacgcggaaacgtcatcgtggtcaccttcaactaccgtgtcggcccccttgggttcctcagcactggggacgccaatctgccaggtaactatggccttcgggatcagcacatggccattgcttgggtgaagaggaatatcgcggccttcgggggggaccccaacaacatcacgctcttcggggagtctgctggaggtgccagcgtctctctgcagaccctctccccctacaacaagggcctcatccggcgagccatcagccagagcggcgtggccctgagtccctgggtcatccagaaaaacccactcttctgggccaaaaaggtggctgagaaggtgggttgccctgtgggtgatgccgccaggatggcccagtgtctgaaggttactgatccccgagccctgacgctggcctataaggtgccgctggcaggcctggagtaccccatgctgcactatgtgggcttcgtccctgtcattgatggagacttcatccccgctgacccgatcaacctgtacgccaacgccgccgacatcgactatatagcaggcaccaacaacatggacggccacatcttcgccagcatcgacatgcctgccatcaacaagggcaacaagaaagtcacggaggaggacttctacaagctggtcagtgagttcacaatcaccaaggggctcagaggcgccaagacgacctttgatgtctacaccgagtcctgggcccaggacccatcccaggagaataagaagaagactgtggtggactttgagaccgatgtcctcttcctggtgcccaccgagattgccctagcccagcacagagccaatgccaagagtgccaagacctacgcctacctgttttcccatccctctcggatgcccgtctaccccaaatgggtgggggccgaccatgcagatgacattcagtacgttttcgggaagcccttcgccacccccacgggctaccggccccaagacaggacagtctctaaggccatgatcgcctactggaccaactttgccaaaacaggggaccccaacatgggcgactcggctgtgcccacacactgggaaccctacactacggaaaacagcggctacctggagatcaccaagaagatgggcagcagctccatgaagcggagcctgagaaccaacttcctgcgctactggaccctcacctatctggcgctgcccacagtgaccgaccaggaggccacccctgtgccccccacaggggactccgaggccactcccgtgccccccacgggtgactccgagaccgcccccgtgccgcccacgggtgactccggggccccccccgtgccgcccacgggtgactccggggccccccccgtgccgcccacgggtgactccggggccccccccgtgccgcccacggatgactccaaggaagctcagatgcctgcagtcattaggttttagcgtcccatgagccttggtatcaagaggccacaagagtgggaccccaggggctcccctcccatcttgagctcttcctgaataaagcctcatacccctg

SEQ ID NO: 733584 - DNA, 969 bp, Homo sapiens
  misc_feature (54)..(54): n is a, c, g, or t
  misc_feature (57)..(57): n is a, c, g, or t
  misc_feature (100)..(100): n is a, c, g, or t
  misc_feature (104)..(104): n is a, c, g, or t
ccccgcaagacggggggcgcaccgtgtcgctcgccgggcggcgggaggggaganacntacggtaagaaaggagtttgtgaaagcgtcttgcgggggctgnccgnagcccccgcaagacgacctttgatgtctacaccgagtcctgggcccaggacccatcccaggagaataagaagaagactgtggtggactttgagaccgatgtcctcttcctggtgcccaccgagattgccctagcccagcacagagccaatgccaagagtgccaagacctacgcctacctgttttcccatccctctcggatgcccgtctaccccaaatgggtgggggccgaccatgcagatgacattcagtacgttttcgggaagcccttcgccacccccacgggctaccggccccaagacaggacagtctctaaggccatgatcgcctactggaccaactttgccaaaacaggggaccccaacatgggcgactcggctgtgcccacacactgggaaccctacactacggaaaacagcggctacctggagatcaccaagaagatgggcagcagctccatgaagcggagcctgagaaccaacttcctgcgctactggaccctcacctatctggcgctgcccacagtgaccgaccaggaggccacccctgtgccccccacaggggactccgaggccactcccgtgccccccacgggtgactccgagaccgcccccgtgccgcccacgggtgactccggggccccccccgtgccgcccacgggtgactccggggccccccccgtgccgcccacgggtgactccggggccccccccgtgccgcccacggatgactccaaggaagctcagatgcctgcagtcattaggttttagcgtcccatgagccttggtatcaagaggccacaagagtgggaccccaggggctcccctcccatcttgagctcttcctgaataaagcctcatacccctg

SEQ ID NO: 733585 - DNA, 2050 bp, Homo sapiens
gatgctcaccatggggcgcctgcaactggttgtgttgggcctcacctgctgctgggcagtggcgagtgccgcgaagctgggcgccgtgtacacagaaggtgggttcgtggaaggcgtcaataagaagctcggcctcctgggtgactctgtggacatcttcaagggcatccccttcgcagctcccaccaaggccctggaaaatcctcagccacatcctggctggcaagggaccctgaaggccaagaacttcaagaagagatgcctgcaggccaccatcacccaggacagcacctacggggatgaagactgcctgtacctcaacatttgggtgccccagggcaggaagcaagtctcccgggacctgcccgttatgatctggatctatggaggcgccttcctcatggggtccggccatggggccaacttcctcaacaactacctgtatgacggcgaggagatcgccacacgcggaaacgtcatcgtggtcaccttcaactaccgtgtcggcccccttgggttcctcagcactggggacgccaatctgccaggtaactatggccttcgggatcagcacatggccattgcttgggtgaagaggaatatcgcggccttcgggggggaccccaacaacatcacgctcttcggggagtctgctggaggtgccagcgtctctctgcagaccctctccccctacaacaagggcctcatccggcgagccatcagccagagcggcgtggccctgagtccctgggtcatccagaaaaacccactcttctgggccaaaaaggtggctgagaaggtgggttgccctgtgggtgatgccgccaggatggcccagtgtctgaaggttactgatccccgagccctgacgctggcctataaggtgccgctggcaggcctggagtaccccatgctgcactatgtgggcttcgtccctgtcattgatggagacttcatccccgctgacccgatcaacctgtacgccaacgccgccgacatcgactatatagcaggcaccaacaacatggacggccacatcttcgccagcatcgacatgcctgccatcaacaagggcaacaagaaagtcacggaggaggacttctacaagctggtcagtgagttcacaatcaccaaggggctcagaggcgccaagacgacctttgatgtctacaccgagtcctgggcccaggacccatcccaggagaataagaagaagactgtggtggactttgagaccgatgtcctcttcctggtgcccaccgagattgccctagcccagcacagagccaatgccaagagtgccaagacctacgcctacctgttttcccatccctctcggatgcccgtctaccccaaatgggtgggggccgaccatgcagatgacattcagtacgttttcgggaagcccttcgccacccccacgggctaccggccccaagacaggacagtctctaaggccatgatcgcctactggaccaactttgccaaaacaggggaccccaacatgggcgactcggctgtgcccacacactgggaaccctacactacggaaaacagcggctacctggagatcaccaagaagatgggcagcagctccatgaagcggagcctgagaaccaacttcctgcgctactggaccctcacctatctggcgctgcccacagtgaccgaccaggaggccacccctgtgccccccacaggggactccgaggccactcccgtgccccccacgggtgactccgagaccgcccccgtgccgcccacgggtgactccggggccccccccgtgccgcccacgggtgactccggggccccccccgtgccgcccccgtgccgcccacgggtgactccggggccccccctgtgccccccacgggtgactctgaggctgcccctgtgccccccacagatgactccaaggaagctcagatgcctgcagtcattaggttttagcgtcccatgagccttggtatcaagaggccacaagagtgggaccccaggggctcccctcccatcttgagctcttcctgaataaagcctcatacccctg

SEQ ID NO: 733586 - DNA, 1013 bp, Homo sapiens
  misc_feature (54)..(54): n is a, c, g, or t
  misc_feature (57)..(57): n is a, c, g, or t
  misc_feature (100)..(100): n is a, c, g, or t
  misc_feature (104)..(104): n is a, c, g, or t
ccccgcaagacggggggcgcaccgtgtcgctcgccgggcggcgggaggggaganacntacggtaagaaaggagtttgtgaaagcgtcttgcgggggctgnccgnagcccccgcaagacgacctttgatgtctacaccgagtcctgggcccaggacccatcccaggagaataagaagaagactgtggtggactttgagaccgatgtcctcttcctggtgcccaccgagattgccctagcccagcacagagccaatgccaagagtgccaagacctacgcctacctgttttcccatccctctcggatgcccgtctaccccaaatgggtgggggccgaccatgcagatgacattcagtacgttttcgggaagcccttcgccacccccacgggctaccggccccaagacaggacagtctctaaggccatgatcgcctactggaccaactttgccaaaacaggggaccccaacatgggcgactcggctgtgcccacacactgggaaccctacactacggaaaacagcggctacctggagatcaccaagaagatgggcagcagctccatgaagcggagcctgagaaccaacttcctgcgctactggaccctcacctatctggcgctgcccacagtgaccgaccaggaggccacccctgtgccccccacaggggactccgaggccactcccgtgccccccacgggtgactccgagaccgcccccgtgccgcccacgggtgactccggggccccccccgtgccgcccacgggtgactccggggccccccccgtgccgcccccgtgccgcccacgggtgactccggggccccccctgtgccccccacgggtgactctgaggctgcccctgtgccccccacagatgactccaaggaagctcagatgcctgcagtcattaggttttagcgtcccatgagccttggtatcaagaggccacaagagtgggaccccaggggctcccctcccatcttgagctcttcctgaataaagcctcatacccctg

SEQ ID NO: 733587 - DNA, 595 bp, Homo sapiens
gcgcggcgcgccagcaacactgcacgcaggtggcaccggcggctcatgaaggagctgcaggacatcgcgcgccttaggaccgcttcatctccgtggagctggtggacgagagcctgttcgactggaacgtgaagctgcaccaggtggacaaggactcggtgctgtggcaggacatgaaggagaccaacaccgagttcatcctgctcaacctcaccttccccgacaacttccccttctcgccgcccttcatgcgggtgctcagcccgcgcctggagaacggctacgtgctggacggcggcgcatctgcatggagctgctcacgccgcgcgctggtccagcgcctacaccgtggaggccgtcatgcgccagttcgcagccagcctggtcaagggccagggacggatctgtagaaaagctggcaaatcaaaaaagtccttcagtcgcaaggaagctgaagctacctttaagagtttggtgaagacgcattgaaaaatatggttgggtcaccccgcccgtgttccgacggctgatgtctgccacgtgcagtagacgctcgagcgcctgtccacacacacaccagtaccctgacatctcc

SEQ ID NO: 733588 - DNA, 530 bp, Homo sapiens
aatggactctcatctgcctactcctctactctcccgtcccgtgacagtccctcctacccaccctccacgagccatgtggcacttgccctgggctgattgggctgcctgcttggcccatggggagctgtgttaaagtgagagttgtgcctgctgtatctttttgtgtgtagaaagatggggttcattcagatcccaagtcctttccccaaccctcaaagtgaagcctcctagggatgaagagctggtcagcctggactttaaatacctaatgtggcccagccttggttcccaaaccctgccttccctccctgtgcttttgggtgggaaacgggggatttgtatctcccttcctcctccttctccatgtgggtggcctctctaggtttctctgtgttctctgatccttggagagccagagccaaggcagtcatcttgttcccccttccacggccaggctgggtgccttcaggtgaccaggggcagagtgtaagtcaccaggttcaatggggtgaggggagaaccaccttaag

SEQ ID NO: 733589 - DNA, 2824 bp, Homo sapiens; identical to SEQ ID NO: 69437

SEQ ID NO: 733590 - DNA, 5428 bp, Homo sapiens; identical to SEQ ID NO: 69438

SEQ ID NO: 733591 - DNA, 2926 bp, Homo sapiens; identical to SEQ ID NO: 69160

SEQ ID NO: 733592 - DNA, 3202 bp, Homo sapiens; identical to SEQ ID NO: 69161

SEQ ID NO: 733593 - DNA, 3030 bp, Homo sapiens
ggtgacaacgtttggaagggccagggcgaccggcagtgtgcacagggactgtgtcgggcttggacctcacctgatcctctctcttagcgcgacccttcctctgctccctgtctcctctttctgccacttgtgcgctgcttccgcgcactcccggctccctagcggcaggaggaggaaggcgcacagcgggtggagagggtgcgccaaggagaggtaaccccttcgggagcccggggaatcccggccgccaccaggggccgtgccaccgccctcgcgggaccaaagcttccggcgtgtccccaactttgtggcgccctcaggccgcggcgactgggttagagatgccttccagcggcagagcgctgctggactcgccgctggacagcggctccctgacctccctggactctagtgtcttctgcagcgagggtgaaggggagcccttggcgctcggggactgcttcacggtcaacgtgggcggcagccgcttcgtgctctcgcagcaggcgctgtcctgcttcccgcacacgcgccttggcaagctggccgtggtggtggcttcctaccgccgccccggggccctggccgccgtgcccagccctctggagctttgcgacgatgccaaccccgtggacaacgagtacttcttcgaccgcagctcgcaggcgttccgatatgtcctgcactactaccgcaccggccgcctgcatgtcatggagcagctgtgcgcgctctccttcctgcaggagatccagtactggggcatcgatgagctcagcatcgattcctgctgcagggacagatacttcagaaggaaagagctgagtgaaactttagacttcaagaaggacacagaagaccaggaaagtcaacatgagagtgaacaggacttctcccaaggaccttgtcccactgttcgccagaagctctggaatatcctggagaaacctggatcttccacagctgcccgtatctttggcgtcatctccattatcttcgtggtggtgtccatcattaacatggccctgatgtcagctgagttaagctggctggacctgcagctgctggaaatcctggagtatgtgtgcattagctggttcaccggggagtttgtcctccgcttcctgtgtgtgcgggacaggtgtcgcttcctaagaaaggattacgctcccttgggatgacaatcacccagtgttacgaagaagtcggcctactgctcctatttctatccgtgggaatctctatattttcaactgtagaatactttgctgagcaaagcattcctgacacaaccttcacaagtgtcccttgtgcatggtggtgggccaccacctctatgactactgtgggatatggggacattagaccagacaccaccacaggcaaaatcgtggccttcatgtgtatattatcgggaattcttgtcttggccttgcctattgctattattaacgatcgcttctctgcttgctacttcaccttgaaactcaaggaagcagctgttagacagcgtgaagccctaaagaagcttaccaagaatatagccactgactcatatatcagtgttaacttgagagatgtctatgcccggagtatcatggagatgctgcgactgaaaggcagagaaagagcaagtactaggagcagcgggggagatgatttctggttttgaattaattttcaatttatttacaaaagctatgtacaattaactaaaatgataaagcagtgatgtggatttctgtattctgatgatgagtctcttcagagtactgctcatcttaattaatttttgctgatatattgcttcatctactagaatatttcacatcacctataacaactgcacagtgttctgacacatttgagtgtccaaaatagccaattaacacaaccaaatacaactgggccaatataaacatgtttgaattgtcaaatataaaataatgttattgcaatacatacaaaaaagttaaagattttatgtatcactaacattagaagttttttgcaccactaattttttaaaaatggaaggtaaactgcatagcccagagaaagataagtaaatatttaagaacatattgaacaactttgctatttaaagatattatccaagtacataaattactccgttctctatcagttaaagctattgaatataatacttagctttacaagagaaaacccatatttgatgggcagagattatatccctatcttctttttcatgtaaaccactggtcacaaatgaactgatctctgtatcccattattactataagaggtgggaatcccaaaactgcttagattgcagtacatgagtctacacaaagacttcaacaattgcacatcttcattctcccaactgagtgtagtatgtggagcataaaacagcatatttcttagtatttcatgaatatcagatggtctttaaatgtctctttatggatgtattgttcacattatggctttaaaataatgaatatgtaaaagtgaggtagtgaacatcctaaatttctacactggaattactaaataatcttatttcataaaatgggaaatatatgttaaatgacatcactggatgaacttgaagatcttttacttgttaacaaaaaaatactatggacagctttctgattgttggggtaaatagcaaatgttcaaactttgcaggcattttgacattcatcataacaacacaattcctagacattgtattatataattaaagccaaaacctctaaagctaagaactagctcatgattcccattattttagtaaatgagattctacaacctaagaataacaaggaatgcatcactttaatacctacatttccaatataatagagcccccaaggggaagaaaattggttcttgaggaaaaaaaaatcttatcacttcatttacaaaacacagataagcatattgagtatatctgtggtattaacatttcatgggggtgagatgttagggaaaaaagcctagaaggctctttgccaggggtgaatggtgataagaaat

SEQ ID NO: 733594 - DNA, 2754 bp, Homo sapiens; identical to SEQ ID NO: 69162

SEQ ID NO: 733595 - DNA, 1291 bp, Homo sapiens; identical to SEQ ID NO: 358637
  misc_feature (1288)..(1288): n is a, c, g, or t
  misc_feature (1291)..(1291): n is a, c, g, or t

SEQ ID NO: 733596 - DNA, 1423 bp, Homo sapiens; identical to SEQ ID NO: 358638

SEQ ID NO: 733597 - DNA, 1228 bp, Homo sapiens; identical to SEQ ID NO: 358639
  misc_feature (1225)..(1225): n is a, c, g, or t
  misc_feature (1228)..(1228): n is a, c, g, or t

SEQ ID NO: 733598 - DNA, 1360 bp, Homo sapiens
gccgccgctgccgctgccgccgccggcccggactcgtccggagcgcagggtgtctgcccagctgcgcgcggcgcgcggaggctccggcgtccgccgctgcgccctccggcccctgctcctcgcgccggcccgcgtgggtcccggcgggcgcgaacccaccatgcagctgcagttccggagctggatgctggccgcgctcacgctgctcgtggtcttcctcatcttcgcagacatctcagagatcgaagaagaaatcggagctgaagttgtaataaacggctcctcatcaccagctgttgttgacagaagtaatgaaagcatcaagcacaacatccagccagcctcgtccaaatggagacataaccagacgctctctctgaggatcaggaagcagattttaaagttcttggatgctgaaaaggacatttctgtcctaaagggaaccctgaagcctggagatattattcattacatcttcgatcgagacagcaccatgaatgtgtcccagaacctctacgagctcctccccaggacttcgccactgaagaataagcactttgggacttgtgccatcgtgggcaactcgggggtcttgctgaacagcggctgtgggcaggagattgacgcccacagcttcgtcatcaggtgcaacctggccccagtacaggagtatgcccgggatgtggggctcaagacagacctggtaaccatgaacccctcggtcatccagcgggcctttgaggacttggtcaatgccacgtggcgggagaagctgctgcaacggctgcacagcctcaatggcagcatcctgtggatccctgccttcatggcccggggcggcaaggagcgtgttgagtgggtcaacgagcttatcctgaagcaccacgtcaacgtgcgcactgcatacccctcgctgcgcctgctgcacgccgttcgcggatactggctgaccaacaaagtccacatcaaaagacccaccaccggcctcttgatgtataccctggccacacgtttctgcaaacaaatctacctctacggcattcctgaccactagaactgtgcttggcacagagtaggcacttaataaactcctgctgcatgaacaaaagaacaagtgtggatgcttcaaaggaagacttgcacccggctgacccccagagtggggaaggggtcccacctaataggaagaacaccaagacttccccaagaggagaaggaacggctccccctttctcggcgaggccatgtgtctggaccctgtgtgagatgctttctatactagcccttgttggggtgttgcacccattttacagatcaaacaaccaagtttatcagaaattaaagactcatttaagatgcc

SEQ ID NO: 733599 - DNA, 2523 bp, Homo sapiens; identical to SEQ ID NO: 414127

SEQ ID NO: 733600 - DNA, 3267 bp, Homo sapiens
agcgggtcagttaactgttcctacaaatgaaagacacaagccaataaagccagtgagaaaggagcttaccaaaggcagtgtacgaagaaggttcctgggagactgtcagaaatgagtttttcactgaacttcaccctgccggcgaacacaacgtcctctcctgtcacaggtgggaaagaaacggactgtgggccctctcttggattagcggcgggcataccattgctggtggccacagccctgctggtggctttactatttactttgattcaccgaagaagaagcagcattgaggccatggaggaaagtgacagaccatgtgaaatttcagaaattgatgacaatcccaagatatctgagaatcctaggagatcacccacacatgagaagaatacgatgggagcacaagaggcccacatatatgtgaagactgtagcaggaagcgaggaacctgtgcatgaccgttaccgtcctactatagaaatggaaagaaggaggggattgtggtggcttgtgcccagactgagcctggaatgatgcagctcagtcaaggagcagcagacctggcactggaacagggttgaaaacccagggttttgtacttggagaggaaagatgccaagctgcttcttaatcaatccaaatttcatttacagctctggaacactttggggctgatttgtctctttaggggacatccccaacatggttaattccaactctcagatcttgtgctttagttagtacatgtgactcaccagatggggtccttagatcctattcctgctcccagtgggaatttgcttttctttgtcattttgggaaaggggcttggtttctgagtgtcttgccttctcatctttttttttcatatcctttttctcaaaaaagccatcagatctgactttcatggaagtgttgctgaggtcagcctggtgcaagttgggatacaaatgaaacttatgcaggatgtgtgagaggaagcagttaattgtttctgaatatctcagggtaggaaccatgtggagccacacattccctgaccacagggaagcacctggctcaatcatgtcacacagcagtggaaagaatacggactcttaagtcacacctaccactgagcagctgtacgactttggagaagttgtttaacattttcaagcctcagtttttgcttttttaaaggaggggaaatatttgcctcatgtcataattgaaaagattaaataagaaataaagggaagtgtctgctacttagttgccagtcaaaatgttagttctctctctctaccaccttcctcctacctcttcccatattgcttgcctgataaaacagctaatcaccagcatttgttccccatagtcacagggccacacaagggaacatttaggacaaactttctccatggcctatgatccaaattgttatctaaagatgattctaggtgttgctggtagtatgtgaatcttccaatctaggtgtgatcgtgtcctcatatgaatcaggaaaaggcagtttcttacaagttccgaattccaaatacagagactggtggtgttacatttaaccttaaagatgttaatgttgatggaaattcatgtttcatattaaaacaacactttgtctttacaatgaaacattttgcttaatttttaaagtaagacattatgatacctctgatggcagttcctcaaataactttaacttttgtgctttagggatagttgttaaagttacaacttcttttattttattttttaaaggcttcagattaaacaagagcccttaagcccacgcatagcattgccgcttcagcttgctgaggactgtctccaaggaggccaaatggaaaaggagaggctacttcaagtggtgttggcccattgagcctattgggcaaactataaccaggttgccttattttgggtggattactccaggagaggccaccctccagctttctcttatcccagtaactcctcttcccattttccaatccatccccagccattttttttttttcttctgtactcttcttttgccttcaatatgagtttcatttcctctgtgtctttgggcagacttccttctaacatgtgtcagctaccctaccacacacctggcctaggagacacatcattcattgctcctacttgtgtctgtaatcagagagtatttaaggagggcagttctgcgacggactgtgtgtgtgttgaaagtaaagatggggggccgcggggaaggcaagagtttttccaaaagattattagaaatgagggctgtatctactctgtggagtagaaccaagtctacttggagaaaagaaccaagtccttgggatatctaggggaaagctgtttggcagaaagaaaaatcaagaggacccaaggggatggagacaggaccacaggaatgggccaaggagcaacgtgcctgccattcagccagcttgggacaggctttcactttcactcccatgaggaggcttccaggcagcctggttcccccatgtatagccattgccctctagcaggccaggcctcccagtgggaaggcctgggtccagggcatcttaagttcatccagcagctccatgagccacacagatatcctagaaaatattcctttctcacacagggcttctgattactcagaaacatgcccctcttccctgaataaccaagaacatgttctatgaacccaatctctgccacatgtcaatacctgctcttcaaagccccttttgaaactcagttttgtgccaagtcctctggatctaattaccttaaacaagcagatttagccatttttaaacagacattcccagtcatcctggtgcttgtacttctcctacatgtcatgaaggaccttggatttactgagaactcagccgtggccttggctttgatacttataggtgtcagcccttgggccgattgttgatcatccagagcctcagttctgtacttgtaaagtggagacagcagttctcatcctccatccttttagcccatggggtggttgtaaggctggattgaaatatgcatgtgactaagccatgtagctataaagtgagggatgacttgtgttttggatcacttattttaattctacttataatccacggcttagaatatttaaacattgtttctattaaactagaaaggttcagcatttctgtcatttacttctgctatgatacacaagaacttatgttggaatgaagtgaaaagtaaaatggccattcttatgaacctacaaaaaaa

SEQ ID NO: 733601 - DNA, 229 bp, Homo sapiens
gacgtccccacccaccccgtcctccaggttctacgcggcagaaatcgctatcggcctcttcttccttcacaatcagggcatcatctacagggacctgaagctggacaatgtgatgctggatgctgagggacacatcaagatcactgactttggcatgtgtaaggagaacgtcttccccgggacgacaacccgcaccttctgcgggaccccggactacatagccccggag

SEQ ID NO: 733602 - DNA, 1917 bp, Homo sapiens
caggctgcgagatgaacgtgcaccggcgctgtgtgcgtagcgtgccctccctgtgcggtgtggaccacaccgagcgccgcgggcgcctgcagctggagatccgggctcccacagcagatgagatccacgtaactgttggcgaggcccgtaacctaattcctatggaccccaatggtctctctgatccctatgtgaaactgaagctcatcccagaccctcggaacctgacgaaacagaagacccgaacggtgaaagccacgctaaaccctgtgtggaatgagacctttgtgttcaacctgaagccaggggatgtggagcgccggctcagcgtggaggtgtgggactgggaccggacctcccgcaacgacttcatgggggccatgtcctttggcgtctcggagctgctcaaggcgcccgtggatggctggtacaagttactgaaccaggaggagggcgagtattacaatgtgccggtggccgatgctgacaactgcagcctcctccagaagtttgaggcttgtaactaccccctggaattgtatgagcgggtgcggatgggcccctcttcctctcccatcccctccccttcccctagtcccaccgaccccaagcgctgcttcttcggggcgagtccaggacgcctgcacatctccgacttcagcttcctcatggttctaggaaaaggcagttttgggaaggtgatgctggccgagcgcaggggctctgatgagctctacgccatcaagatcttgaaaaaggacgtgatcgtccaggacgacgatgtggactgcacgctggtggagaaacgtgtgctggcgctggggggccggggtcctggcggccggccccacttcctcacccagctccactccaccttccagaccccggaccgcctgtatttcgtgatggagtacgtcaccgggggagacttgatgtaccacattcaacagctgggcaagtttaaggagccccatgcagcgttctacgcggcagaaatcgctatcggcctcttcttccttcacaatcagggcatcatctacagggacctgaagctggacaatgtgatgctggatgctgagggacacatcaagatcactgactttggcatgtgtaaggagaacgtcttccccgggacgacaacccgcaccttctgcgggaccccggactacatagccccggagatcattgcctaccagccctatgggaagtctgtcgattggtggtcctttggagttctgctgtatgagatgttggcaggacagcctcccttcgatggggaggacgaggaggagctgtttcaggccatcatggaacaaactgtcacctaccccaagtcgctttcccgggaagccgtggccatctgcaaggggttcctgaccaagcacccagggaagcgcctgggctcagggcctgatggggaacctaccatccgtgcacatggctttttccgctggattgactgggagcggctggaacgattggagatcccgcctcctttcagaccccgcccgtgtggccgcagcggcgagaactttgacaagttcttcacgcgggcggcgccagcgctgacccctccagaccgcctagtcctggccagcatcgaccaggccgatttccagggcttcacctacgtgaaccccgacttcgtgcacccggatgcccgcagccccaccagcccagtgcctgtgcccgtcatgtaatctcacccgccgccactaggtgtccccaacgtcccctccgccgtgccggcggcagccccacttcacccccaacttcaccaccccctgtcccattctagatcctgcaccccagcattccagctctgcccccgcgggttctagacgcccctcccaagcgttcctggccttctgaactccatacagcctctacagccgtcccgcgttcaagacttgagcg

SEQ ID NO: 733603 - DNA, 3002 bp, Homo sapiens
cagcagctgcctgggtgaagcatctgctggacaagtcggaccactggccaggggacctttgattgtctttccagagatgctgctctctgcagggcaccaccttcaaggcacagcccttgttgggagggagaaccctctccagaaaccctgccaccatggtgtcttgccgtacttcccacagccgcctttttgcggcctggccggccaggcttcccgtgcgttatacacagagtttgggcacacactgccctccctccgagatgccagaagtttttccacagccttggagaggggctttgactgagggctgggggccctgggctccgtttccttcacattccagctggcccggatccctctgtggcacagggccctgcccgtcacatgccctctgggtgacatcggagcagacctccatgtggccaggggttgggagaactttacaaacattaggacctaacactgtctcatcgctgaaataagaggccatagcaccgaaaagcagcgtgggcgccggctgaggcttctcccagcccgtgggtggcagcgtgctagcacactgccaccatctcaaagccatccccctagccatcgtgagcatcccagcggcaccgccattgtctcaaccagccggctcctcgtctgtacacctggggatttcttttgatttcaagaacagccttaatcattccagtttgatttacgtgtatacctcataaacatttttcttttgtttctctctccccctttctctcttctcttggctcactcccttgcctctccccctccaccaccaccttgtgactgatggtttggtttcctctctgctctgcccctgctcagcacagggagaatgttgacttagaagcaatagggggcagcaggccaccaagagcacaaccccagggcgaggtctggggaggcctcccagcccgcctctgtttactgtgcaattccagtcgttcttaagccatcaccagtgggtgtactcagagcagaggggccaggacttctgccagccaagggaaaggcccagagccctgtgcgggggaatgtggcactgtctatccatccggtggactgggcagcattcctccccagggctcttcccttgggggcctcctttcatctggggcacagccacaagtctcatctctaacgttctatgcaatgaaatataaaccctcaatgacaactgttaatatttaataaattccatgttatgtataaggagttaattgcaaacatgcaattgagaaactggatagatacactcataaaacccccacccctccccaccccacccctgctcccattgtgtgtgtgaaattctcagtctgtggcatgtttgacctgtggcaggactcgctgctgccaggtgagtcaccgcctgtcctgcagtggagcatgcacagctcgcagcctctttgcacgatttcatccattttaaatgcttgaccctcttgcttggagttctttttgcctcagaacctctccttcaggagcacttctagctgacttctgcacaagctagtgaggacctgccagaattgttgcctgagcgtgccaggctgcagggcaggcagtaaaaggcccccacataccctgcagttttctctgtccaggacagcaggtaaaaaggaatccccagagcagacgcaatggtaggagcctgcacaggatgtgtgtgtatggacattctgaaggtttgctgtaggatatctgtctgtctgtcattttcccttcctaccccaaccctgagccagaggcatctgacagccctttcccagagggcaccacgcaagggcagagctgggcggcatccacagccagagaggcagaggcaagagcagagccaggctgtgcccgagggaccccagctcttgactgcacctgtttcatgcctctcctctgtggctaggaggctcaaaggactgtgagccaggagatctgggctggagctagggggtcaatggatgctcaggaagagctgggcctttggcacttgtggtgagaacagttgacagtggtcatctggaactgttcatataaacagtggcttcaagctaagtttcttgtgaagtttctcaatagcaaatcttacagaaggtcctgtgtgaccctctctgcatctgtccccaggacctatgctccctgctcacccccttctccaaagcccaagcgtcccgctgctcatcagcttttttaccattgagccaggagtgcggcaggcagtacctgcctgacccttcaaggcctgaccttcgtccagagtgctctggtttgcaccatgcatttctcaggggtccgcatttctcatgcttttctataagatctacacaccccttcagagagggctcctcgctcacctctggtagctatggatgggacaggaagctgccaacctttgtgttggacttaacacccttgcctttctgggacttggcctcaccccacccatggaatacctgcctcatcccaaagatcaggtatgggctgaatgcagccatctgagcaagggctgagggaagccatcatctaacacctctggccacccaggaccaggtctgtgtggggatgtgccttggagaccaaggcaatagtcctttccactacaggccaggggatgggacaagaagtagggaacaggcagggaaatgttaggaggtcagcctccagcaggcctagtctcaggctctaaagtactgacttttcagcaaatttcctttctggccaagccctctgagtttgaaattctgacatctgccactcctcatcccccactgtacccacaggatacatcatcgcccctctgtgaaggtggctggagcaggcctctggtccatggactgtccttcctggcccttgcatggatgcagttgtgactctggggacaatgcagccagaagctgagggaccagcacttggtgccttggaaagtagagagcaacagacacatctccaaatgggcaaggagtctctagcatgcagcccaggccttc

SEQ ID NO: 733604 - DNA, 2102 bp, Homo sapiens
  misc_feature (70)..(70): n is a, c, g, or t
cagtttctcaattgcatgtttgcaattaactccttatacataacatggaatttattaaatattaacagtngtcattgagggtttatatttcattgcagaggggccaggacttctgccagccaagggaaaggcccagagccctgtgcgggggaatgtggcactgtctatccatccggtggactgggcagcattcctccccagggctcttcccttgggggcctcctttcatctggggcacagccacaagtctcatctctaacgttctatgcaatgaaatataaaccctcaatgacaactgttaatatttaataaattccatgttatgtataaggagttaattgcaaacatgcaattgagaaactggatagatacactcataaaacccccacccctccccaccccacccctgctcccattgtgtgtgtgaaattctcagtctgtggcatgtttgacctgtggcaggactcgctgctgccaggtgagtcaccgcctgtcctgcagtggagcatgcacagctcgcagcctctttgcacgatttcatccattttaaatgcttgaccctcttgcttggagttctttttgcctcagaacctctccttcaggagcacttctagctgacttctgcacaagctagtgaggacctgccagaattgttgcctgagcgtgccaggctgcagggcaggcagtaaaaggcccccacataccctgcagttttctctgtccaggacagcaggtaaaaaggaatccccagagcagacgcaatggtaggagcctgcacaggatgtgtgtgtatggacattctgaaggtttgctgtaggatatctgtctgtctgtcattttcccttcctaccccaaccctgagccagaggcatctgacagccctttcccagagggcaccacgcaagggcagagctgggcggcatccacagccagagaggcagaggcaagagcagagccaggctgtgcccgagggaccccagctcttgactgcacctgtttcatgcctctcctctgtggctaggaggctcaaaggactgtgagccaggagatctgggctggagctagggggtcaatggatgctcaggaagagctgggcctttggcacttgtggtgagaacagttgacagtggtcatctggaactgttcatataaacagtggcttcaagctaagtttcttgtgaagtttctcaatagcaaatcttacagaaggtcctgtgtgaccctctctgcatctgtccccaggacctatgctccctgctcacccccttctccaaagcccaagcgtcccgctgctcatcagcttttttaccattgagccaggagtgcggcaggcagtacctgcctgacccttcaaggcctgaccttcgtccagagtgctctggtttgcaccatgcatttctcaggggtccgcatttctcatgcttttctataagatctacacaccccttcagagagggctcctcgctcacctctggtagctatggatgggacaggaagctgccaacctttgtgttggacttaacacccttgcctttctgggacttggcctcaccccacccatggaatacctgcctcatcccaaagatcaggtatgggctgaatgcagccatctgagcaagggctgagggaagccatcatctaacacctctggccacccaggaccaggtctgtgtggggatgtgccttggagaccaaggcaatagtcctttccactacaggccaggggatgggacaagaagtagggaacaggcagggaaatgttaggaggtcagcctccagcaggcctagtctcaggctctaaagtactgacttttcagcaaatttcctttctggccaagccctctgagtttgaaattctgacatctgccactcctcatcccccactgtacccacaggatacatcatcgcccctctgtgaaggtggctggagcaggcctctggtccatggactgtccttcctggcccttgcatggatgcagttgtgactctggggacaatgcagccagaagctgagggaccagcacttggtgccttggaaagtagagagcaacagacacatctccaaatgggcaaggagtctctagcatgcagcccaggccttc

SEQ ID NO: 733605 - DNA, 1340 bp, Homo sapiens
  misc_feature (70)..(70): n is a, c, g, or t
cagtttctcaattgcatgtttgcaattaactccttatacataacatggaatttattaaatattaacagtngtcattgagggtttatatttcattgcagaggggccaggacttctgccagccaagggaaaggcccagagccctgtgcgggggaatgtggcactgtctatccatccggtggactgggcagcattcctccccagggctcttcccttgggggcctcctttcatctggggcacagccacaagtctcatctctaacgttctatgcaatgaaatataaaccctcaatgacaactgttaatatttaataaattccatgttatgtataaggagttaattgcaaacatgcaattgagaaactggatagatacactcataaaacccccacccctccccaccccacccctgctcccattgtgtgtgtgaaattctcagtctgtggcatgtttgacctgtggcaggactcgctgctgccaggtgagtcaccgcctgtcctgcagtggagcatgcacagctcgcagcctctttgcacgatttcatccattttaaatgcttgaccctcttgcttggagttctttttgcctcagaacctctccttcaggagcacttctagctgacttctgcacaagctagtgaggacctgccagaattgttgcctgagcgtgccaggctgcagggcaggcagtaaaaggcccccacataccctgcagttttctctgtccaggacagcaggtaaaaaggaatccccagagcagacgcaatggtaggagcctgcacaggatgtgtgtgtatggacattctgaaggtttgctgtaggatatctgtctgtctgtcattttcccttcctaccccaaccctgagccagaggcatctgacagccctttcccagagggcaccacgcaagggcagagctgggcggcatccacagccagagaggcagaggcaagagcagagccaggctgtgcccgagggaccccagctcttgactgcacctgtttcatgcctctcctctgtggctaggagggtctcaggctctaaagtactgacttttcagcaaatttcctttctggccaagccctctgagtttgaaattctgacatctgccactcctcatcccccactgtacccacaggatacatcatcgcccctctgtgaaggtggctggagcaggcctctggtccatggactgtccttcctggcccttgcatggatgcagttgtgactctggggacaatgcagccagaagctgagggaccagcacttggtgccttggaaagtagagagcaacagacacatctccaaatgggcaaggagtctctagcatgcagcccaggccttc

SEQ ID NO: 733606 - DNA, 2240 bp, Homo sapiens
cagcagctgcctgggtgaagcatctgctggacaagtcggaccactggccaggggacctttgattgtctttccagagatgctgctctctgcagggcaccaccttcaaggcacagcccttgttgggagggagaaccctctccagaaaccctgccaccatggtgtcttgccgtacttcccacagccgcctttttgcggcctggccggccaggcttcccgtgcgttatacacagagtttgggcacacactgccctccctccgagatgccagaagtttttccacagccttggagaggggctttgactgagggctgggggccctgggctccgtttccttcacattccagctggcccggatccctctgtggcacagggccctgcccgtcacatgccctctgggtgacatcggagcagacctccatgtggccaggggttgggagaactttacaaacattaggacctaacactgtctcatcgctgaaataagaggccatagcaccgaaaagcagcgtgggcgccggctgaggcttctcccagcccgtgggtggcagcgtgctagcacactgccaccatctcaaagccatccccctagccatcgtgagcatcccagcggcaccgccattgtctcaaccagccggctcctcgtctgtacacctggggatttcttttgatttcaagaacagccttaatcattccagtttgatttacgtgtatacctcataaacatttttcttttgtttctctctccccctttctctcttctcttggctcactcccttgcctctccccctccaccaccaccttgtgactgatggtttggtttcctctctgctctgcccctgctcagcacagggagaatgttgacttagaagcaatagggggcagcaggccaccaagagcacaaccccagggcgaggtctggggaggcctcccagcccgcctctgtttactgtgcaattccagtcgttcttaagccatcaccagtgggtgtactcagagcagaggggccaggacttctgccagccaagggaaaggcccagagccctgtgcgggggaatgtggcactgtctatccatccggtggactgggcagcattcctccccagggctcttcccttgggggcctcctttcatctggggcacagccacaagtctcatctctaacgttctatgcaatgaaatataaaccctcaatgacaactgttaatatttaataaattccatgttatgtataaggagttaattgcaaacatgcaattgagaaactggatagatacactcataaaacccccacccctccccaccccacccctgctcccattgtgtgtgtgaaattctcagtctgtggcatgtttgacctgtggcaggactcgctgctgccaggtgagtcaccgcctgtcctgcagtggagcatgcacagctcgcagcctctttgcacgatttcatccattttaaatgcttgaccctcttgcttggagttctttttgcctcagaacctctccttcaggagcacttctagctgacttctgcacaagctagtgaggacctgccagaattgttgcctgagcgtgccaggctgcagggcaggcagtaaaaggcccccacataccctgcagttttctctgtccaggacagcaggtaaaaaggaatccccagagcagacgcaatggtaggagcctgcacaggatgtgtgtgtatggacattctgaaggtttgctgtaggatatctgtctgtctgtcattttcccttcctaccccaaccctgagccagaggcatctgacagccctttcccagagggcaccacgcaagggcagagctgggcggcatccacagccagagaggcagaggcaagagcagagccaggctgtgcccgagggaccccagctcttgactgcacctgtttcatgcctctcctctgtggctaggagggtctcaggctctaaagtactgacttttcagcaaatttcctttctggccaagccctctgagtttgaaattctgacatctgccactcctcatcccccactgtacccacaggatacatcatcgcccctctgtgaaggtggctggagcaggcctctggtccatggactgtccttcctggcccttgcatggatgcagttgtgactctggggacaatgcagccagaagctgagggaccagcacttggtgccttggaaagtagagagcaacagacacatctccaaatgggcaaggagtctctagcatgcagcccaggccttc

SEQ ID NO: 733607 - DNA, 2950 bp, Homo sapiens
gagcgggctgcctccttccccccgagcggagctgcggggcctggccgggccgggtgcggaccccgggaacccggacgcggcgcccgggcccgcgggcggggggatcggcgggggggacccgcggggtgaccggcggcaggagccgccaccatggagttccgccaggaggagtttcggaagctagcgggtcgtgctctcgggaagctgcaccgccttctggagaagcggcaggaaggcgcggagacgctggagctgagtgcggatgggcgcccggtgaccacgcagacccgggacccgccggtggtggactgcacctgcttcggcctccctcgccgctacattatcgccatcatgagtggtctgggcttctgcatcagctttggcatccgctgcaacctgggcgtggccatcgtctccatggtcaataacagcacgacccaccgcgggggccacgtggtggtgcagaaagcccagttcagctgggatccagagactgtcggcctcatacacggctcctttttctggggctacattgtcactcagattccaggaggatttatctgtcaaaaatttgcagccaacagagttttcggctttgctattgtggcaacatccactctaaacatgctgatcccctcagctgcccgcgtccactatggctgtgtcatcttcgtgaggatcctgcaggggttggtagagggggtcacataccccgcctgccatgggatctggagcaaatgggccccacccttagaacggagtcgcctggcgacgacagccttttgtggttcctatgctggggcggtggtcgcgatgcccctcgccggggtccttgtgcagtactcaggatggagctctgttttctacgtctacggcagcttcgggatcttctggtacctgttctggctgctcgtctcctacgagtcccccgcgctgcaccccagcatctcggaggaggagcgcaagtacatcgaggacgccatcggagagagcgcgaaactcatgaaccccctcacgaagtttagcactccctggcggcgcttcttcacgtctatgccagtctatgccatcatcgtggccaacttctgccgcagctggacgttctacctgctgctcatctcccagcccgcctacttcgaagaagtgttcggcttcgagatcagcaaggtaggcctggtgtccgcgctgccccacctggtcatgaccatcatcgtgcccatcggcggccagatcgcggacttcctgcggagccgccgcatcatgtccaccaccaacgtgcgcaagttgatgaactgcggaggcttcggcatggaagccacgctgctgttggtggtcggctactcgcactccaagggcgtggccatctccttcctggtcctagccgtgggcttcagcggcttcgccatctctgggttcaacgtgaaccacctggacatagccccgcgctacgccagcatcctcatgggcatctccaacggcgtgggcacactgtcgggcatggtgtgccccatcatcgtgggggccatgactaagcacaagactcgggaggagtggcagtacgtgttcctaattgcctccctggtgcactatggaggtgtcatcttctacggggtctttgcttctggagagaagcagccgtgggcagagcctgaggagatgagcgaggagaagtgtggcttcgttggccatgaccagctggctggcagtgacgacagcgaaatggaggatgaggctgagcccccgggggcaccccctgcacccccgccctcctatggggccacacacagcacatttcagccccccaggcccccaccccctgtccgggactactgaccatgtgcctcccactgaatggcagtttccaggacctccattccactcatctctggcctgagtgacagtgtcaaggaaccctgctcctctctgtcctgcctcaggcctaagaagcactctcccttgttcccagtgctgtcaaatcctctttccttcccaattgcctctcaggggtagtgaagctgcagactgacagtttcaaggatacccaaattcccctaaaggttccctctccacccgttctgcctcagtggtttcaaatctctcctttcagggctttatttgaatggacagttcgacctcttactctctcttgtggttttgaggcacccacaccccccgctttcctttatctccagggactctcaggctaacctttgagatcactcagctcccatctcctttcagaaaaattcaaggtcctcctctagaagtttcaaatctctcccaactctgttctgcatcttccagattggtttaaccaattactcgtccccgccattccagggattgattctcaccagcgtttctgatggaaaatggcggtttcaagtccccgattccgtgcccacttcacatctcccctaccagcagattctgcgaaagcaccaaatttctcaagaccctcttctccctagcttagcataatgtctggggaaacaaccaaaatcgcaattttaacaatatgcctctctacccccgtgcactttttctgacatggttttcaggtctaaatagtggctgctccagtccatgaactcaaaggtttgaagctaccaccattgaactcccccatggtggtttcatgatgccccctccccaattcctcgcactttattctcctgggtggtttcgaactaccctgtttctcagtggccatttgttgtgtccctcaggggcttaatgactcaaaatctgggatccttcccctctcagacacccctctttcagcttagaatttggggaacctatagagaagtcacagaatcccatgaaagggaatggggcaggagacaggggtgttttttcccagtgcagggttgtgtctttgtgtctctgtctctgtgactgtaaatcctgccctgccccactcccaataaaagctttggtgtatagg

SEQ ID NO: 733608 - DNA, 2852 bp, Homo sapiens
gagcgggctgcctccttccccccgagcggagctgcggggcctggccgggccgggtgcggaccccgggaacccggacgcggcgcccgggcccgcgggcggggggatcggcgggggggacccgcggggtgaccggcggcaggagccgccaccatggagttccgccaggaggagtttcggaagctagcgggtcgtgctctcgggaagctgcaccgccttctggagaagcggcaggaaggcgcggagacgctggagctgagtgcggatgggcgcccggtgaccacgcagacccgggacccgccggtggtggactgcacctgcttcggcctccctcgccgctacattatcgccatcatgagtggtctgggcttctgcatcagctttggcatccgctgcaacctgggcgtggccatcgtctccatggtcaataacagcacgacccaccgcgggggccacgtggtggtgcagaaagcccagttcagctgggatccagagactgtcggcctcatacacggctcctttttctggggctacattgtcactcagattccaggaggatttatctgtcaaaaatttgcagccaacagagttttcggctttgctattgtggcaacatccactctaaacatgctgatcccctcagctgcccgcgtccactatggctgtgtcatcttcgtgaggatcctgcaggggttggtagagggggtcacataccccgcctgccatgggatctggagcaaatgggccccacccttagaacggagtcgcctggcgacgacagccttttgtggttcctatgctggggcggtggtcgcgatgcccctcgccggggtccttgtgcagtactcaggatggagctctgttttctacgtctacggcagcttcgggatcttctggtacctgttctggctgctcgtctcctacgagtcccccgcgctgcaccccagcatctcggaggaggagcgcaagtacatcgaggacgccatcggagagagcgcgaaactcatgaaccccctcacgaagtttagcactccctggcggcgcttcttcacgtctatgccagtctatgccatcatcgtggccaacttctgccgcagctggacgttctacctgctgctcatctcccagcccgcctacttcgaagaagtgttcggcttcgagatcagcaaggtaggcctggtgtccgcgctgccccacctggtcatgaccatcatcgtgcccatcggcggccagatcgcggacttcctgcggagccgccgcatcatgtccaccaccaacgtgcgcaagttgatgaactgcggaggcttcggcatggaagccacgctgctgttggtggtcggctactcgcactccaagggcgtggccatctccttcctggtcctagccgtgggcttcagcggcttcgccatctctgggttcaacgtgaaccacctggacatagccccgcgctacgccagcatcctcatgggcatctccaacggcgtgggcacactgtcgggcatggtgtgccccatcatcgtgggggccatgactaagcacaagactcgggaggagtggcagtacgtgttcctaattgcctccctggtgcactatggaggtgtcatcttctacggggtctttgcttctggagagaagcagccgtgggcagagcctgaggagatgagcgaggagaagtgtggcttcgttggccatgaccagctggctggcagtgacgacagcgaaatggaggatgaggctgagcccccgggggcaccccctgcacccccgccctcctatggggccacacacagcacatttcagccccccaggcccccaccccctgtccgggactactgaccatgtgcctcccactgaatggcagtttccaggacctccattccactcatctctggcctgagtgacagtgtcaaggaaccctgctcctctctgtcctgcctcaggcctaagaagcactctcccttgttcccagtgctgtcaaatcctctttccttcccaattgcctctcaggggtagtgaagctgcagactgacagtttcaaggatacccaaattcccctaaaggttccctctccacccgttctgcctcagtggtttcaaatctctcctttcagggctttatttgaatggacagttcgacctcttactctctcttgtggttttgaggcacccacaccccccgctttcctttatctccagggactctcaggctaacctttgagatcactcagctcccatctcctttcagaaaaattcaaggtcctcctctagaagtttcaaatctctcccaactctgttctgcatcttccagattggtttaaccaattactcgtccccgccattccagggattgattctcaccagcgtttctgatggaaaatggcggtttcaagtccccgattccgtgcccacttcacatctcccctaccagcagattctgcgaaagcaccaaatttctcaagaccctcttctccctagcttagcataatgtctggggaaacaaccaaaatcgcaattttaacaatatgcctctctacccccgtgcactttttctgacatggttttcaggtctaaatagtggctgctccagtccatgaactcaaaggtttgaagctaccaccattgaactcccccatggtggtttcatgatgccccctccccaattcctcgcactttattctcctgggtggtttcgaactaccctgtttctcagtggccatttgttgtgtccctcaggggcttaatgactcaaaatctgggatccttcccctctcagacacccctctttcagcttagaatttggggaacctatagagaagtcacagaatcccactcccaataaaagctttggtgtatagg

SEQ ID NO: 733609 - DNA, 1179 bp, Homo sapiens
gcttcggcatggaagccacgctgctgttggtggtcggctactcgcactccaagggcgtggccatctccttcctggtcctagccgtgggcttcagcggcttcgccatctctgggttcaacgtgaaccacctggacatagccccgcgctacgccagcatcctcatgggcatctccaacggcgtgggcacactgtcgggcatggtgtgccccatcatcgtgggggccatgactaagcacaagactcgggaggagtggcagtacgtgttcctaattgcctccctggtgcactatggaggtgtcatcttctacggggtctttgcttctggagagaagcagccgtgggcagagcctgaggagatgagcgaggagaagtgtggcttcgttggccatgaccagctggctggcagtgacgacagcgaaatggaggatgaggctgagcccccgggggcaccccctgcacccccgccctcctatggggccacacacagcacatttcagccccccaggcccccaccccctgtccgggactactgaccatgtgcctcccactgaatggcagtttccaggacctccattccactcatctctggcctgagtgacagtgtcaaggaaccctgctcctctctgtcctgcctcaggcctaagaagcactctcccttgttcccagtgctgtcaaatcctctttccttcccaattgcctctcaggggtagtgaagctgcagactgacagtttcaaggatacccaaattcccctaaaggttccctctccacccgttctgcctcagtggtttcaaatctctcctttcagggctttatttgaatggacagttcgacctcttactctctcttgtggttttgaggcacccacaccccccgctttcctttatctccagggactctcaggctaacctttgagatcactcagctcccatctcctttcagaaaaattcaaggtcctcctctagaagtttcaaatctctcccaactctgttctgcatcttccagattggtttaaccaattactcgtccccgccattccagggattgattctcaccagcgtttctgatggaaaatggcggtttcaagtccccgattccgtgcccacttcacatctcccctaccagcagattctgcgaaagcaccaaatttctcaagacccaggagcctatgtgtagacct

SEQ ID NO: 733610 - DNA, 924 bp, Homo sapiens
  misc_feature (4)..(5): n is a, c, g, or t
  misc_feature (18)..(18): n is a, c, g, or t
  misc_feature (447)..(447): n is a, c, g, or t
ttanncaagcttggcacngagggtgtgctggagttgtctgaaccgatatttctttttgttccttggtattgttgattcgtcgccgagtcaggctcatgtacaaaggcatgtttcgtgttgattgttcccatgtaagatatttttaaagccactgcttattctttgttaggaaaatgtaacagcagaaaaggaaagaaacaaagaacatgaacaaaaagcattaaactggctccatcagaagacgttgaagggcagtgaagagcacagactctgtgggcttcttagataagaaaacgtagcttcagtgggggctccagggttgcagagtatgagtgacacagaccgggactattccattagcctgtggtctgcagggtaggcccgcaggaaatgaggaatggccgagctggagagaagagctgattttggcattactaagcccagaangcacataacccatagtgaaatgtgctggcctctggtgcatttgcaagatgagcacaaactttctgggcctccatcctaggacctgggcagacccacatggctgggctctgaatgcccaccctgcgacggtgggttctgatcagcaaacgctgaggagtgggcagattttctttgtctttgcttgcattttctagatccacacctggatactgccaatgttggaccgatgacaggcagcagggggagagggaggcgaaagggcaaggtgcggtggcaagaaaggaaagcccgggaaaaggccttttaaccttagccgagaacgataacacaaggaccggacattaaagcagagggagagggaccgaagggcgtccaaacaaaaatgttctcccggcccaggaaacaaaaaacaaggtggccaagggcaactttagacgaagggtttgcccccgtaaggaaggacccccaaaacgcaaa

SEQ ID NO: 733611 - DNA, 2355 bp, Homo sapiens
agcgcagaagctccgatccagacacacgcgaggcgctgtcctttcagcaccacaagctcgggctgaggagggaggactcctggccgtcctcctcctcttcaaattggcttgaatctgctctgaccccccacgagtgcagcacagtctgggaagaaaggcgtaaggatggtgaagctgaacagtaaccccagcgagaagggaaccaagccgccttcagttgaggatggcttccagaccgtccctctcatcactcccttggaggttaatcacttacagctgcctgctccagaaaaggtgattgtgaagacaagaacggaatatcagccggaacagaagaacaaagggaagttccgggtgccgaaaatcgctgaatttacggtcaccatccttgtcagcctggccctagctttccttgcgtgcatcgtgttcctggtggtttacaaagccttcacctatgatcacagctgcccagagggattcgtctataagcacaaacgctgtatcccagcctccctggatgcttactactcctcccaggaccccaattccagaagccgcttctacacagtcatcagccactacagcgtggccaagcagagcactgcccgggccatcgggccgtggctgtcagcagccgctgtcatccatgagcccaagccgcccaagacccagggccactagaggcctgccccagccagaatggggggcggggtggagaggaggacccccattggctaagccaagctccagttacaagacaacactgtactcctgggatatgggggcgggggcggggcagggcagggtggggggaagaacgcaccaaaaacgtggtgtgtgctggagttgtctgaaccgatatttctttttgttccttggtattgttgattcgtcgccgagtcaggctcatgtacaaaggcatgtttcgtgttgattgttcccatgtaagatatttttaaagccactgcttattctttgttaggaaaatgtaacagcagaaaaggaaagaaacaaagaacatgaacaaaaagcattaaactggctccatcggaagacgttgaagggcagtgaagagcacagactctgtgggcttcttagataagaaaacgtagcttcagtgggggctccagggttgcagagtatgagtgacacagaccgggactattccattagcctgtggtctgcagggtaggcccgcaggaaatgaggaatggccgagctggagagaagagctgattttggcattactaagcccagaacgcacataacccatagtgaaatgtgctggcctctggtgcattttgcaagatgagcacaaactttctgggcctccatcctaggacctgggcagacccacatggcctgggctctgaatgcccaccctgcgacggtgggttctgcatcagcaaacgctgaggagtgggcagattttctttgtcttttgcttgcattttctagatccacacctggatactgcccatgttgacgagacagcagcagggggagagggagggaaggaaggtgcggctgcaagaaggaaggcacgggacaggcatgtgacactaggccacaagcgataagcacaggcacctgacttttaagtttttgtttgtttgttgtttcccaaagtgctgataacaataacaacaacaataggattccaaccaggagcctcaagtgacagccaggaagagacctgaaggttggggccaccacaatgccaaatcgtttctaaaggaagctgaaaaatgggactgtcttttgcccacttcgttgtgttaaaaggggacatttgtccaaactccccaaccgagttctagaagctcctgacaaggaggcagcatccagccttgaccaggcctcccagttccctggaaccgtatcaggcattcgcctgcctctcacaaatgtttcagggaggccagttctgcagggtgtcagctccaggacccacagggccagaaccagctgggagaattggttatttgagatgtggtactgcttcctcacaagtctcccacaggccatgtaaagggtatttttttgtggcttgctgtgttgctgagatcatcgtatgcaacagctgggtaataagactagcatagctcaaactatcctgccaaacgctctcatctgatttttcctcccttctcccccaacctccaatcaccctgagtcacctgtaaattcatttgtcattcaaagcggaataacaagttgtccctagcaaaaccgctgagcgctttataattttgtggtgtatttttgtcagtaggtagcagaggcggaagtattttttggtgtaattcttgaaattttctgacaggaaacaaataaagatagatgtgtctgaga

SEQ ID NO: 733612 - DNA, 385 bp, Homo sapiens
cagctgcgtatgtggcccaggggaggagtgtggtccctctgtgtgcattccctggaatgtggaacttcctagatgccaccctcctcttggagagcagtggctggtcttacttttttattgtactttcagtgtctgccacacagcacaggcccagtgaaagtggaccaagacccagctgcgtacaagtacttgcaggaataagcaggtacctgcatgaatgagcacagagcttgcaggagaggcctggggtatcttggtgcaccaggccacggggtcaaatttacctgccttcctggcaagagatcacaagaaatattcccaggttcacatgtaagaatgtttgctgcagtactatctataaaattaaagtattggaaactagact

SEQ ID NO: 733613 - DNA, 657 bp, Homo sapiens
agcgcagaagctccgatccagacacacgcgaggcgctgtcctttcagcaccacaagctcgggctgaggagggaggactcctggccgtcctcctcctcttcaaattggcttgaatctgctctgaccccccacgagtgcagcacagtctgggaagaaaggcgtaaggatggtgaagctgaacagtaaccccagcgagaagggaaccaagccgccttcagttgaggatggcttccagaccgtccctctcatcactcccttggaggttaatcacttacagctgcctgctccagaaaaggtgattgtgaagacaagaacggaatatcagccggaacagaagaacaaagggaagttccgggtgccgaaaatcgctgaatttacggtcaccatccttgtcagcctggccctagctttccttgcgtgcatcgtgttcctggtggtttacaaagccttcacctcccccaacctccaatcaccctgagtcacctgtaaattcatttgtcattcaaagcggaataacaagttgtccctagcaaaaccgctgagcgctttataattttgtggtgtatttttgtcagtaggtagcagaggcggaagtattttttggtgtaattcttgaaattttctgacaggaaacaaataaagatagatgtgtctgaga

SEQ ID NO: 733614 - DNA, 2395 bp, Homo sapiens
  misc_feature (2381)..(2381): n is a, c, g, or t
  misc_feature (2383)..(2383): n is a, c, g, or t
agcgcagaagctccgatccagacacacgcgaggcgctgtcctttcagcaccacaagctcgggctgaggagggaggactcctggccgtcctcctcctcttcaaattggcttgaatctgctctgaccccccacgagtgcagcacagtctgggaagaaaggcgtaaggatggtgaagctgaacagtaaccccagcgagaagggaaccaagccgccttcagttgaggatggcttccagaccgtccctctcatcactcccttggaggttaatcacttacagctgcctgctccagaaaaggtgattgtgaagacaagaacggaatatcagccggaacagaagaacaaagggaagttccgggtgccgaaaatcgctgaatttacggtcaccatccttgtcagcctggccctagctttccttgcgtgcatcgtgttcctggtggtttacaaagccttcacctatgatcacagctgcccagagggattcgtctataagcacaaacgctgtatcccagcctccctggatgcttactactcctcccaggaccccaattccagaagccgcttctacacagtcatcagccactacagcgtggccaagcagagcactgcccgggccatcgggccgtggctgtcagcagccgctgtcatccatgagcccaagccgcccaagacccagggccactagaggcctgccccagccagaatggggggcggggtggagaggaggacccccattggctaagccaagctccagttacaagacaacactgtactcctgggatatgggggcgggggcggggcagggcagggtggggggaagaacgcaccaaaaacgtggtgtgtgctggagttgtctgaaccgatatttctttttgttccttggtattgttgattcgtcgccgagtcaggctcatgtacaaaggcatgtttcgtgttgattgttcccatgtaagatatttttaaagccactgcttattctttgttaggaaaatgtaacagcagaaaaggaaagaaacaaagaacatgaacaaaaagcattaaactggctccatcggaagacgttgaagggcagtgaagagcacagactctgtgggcttcttagataagaaaacgtagcttcagtgggggctccagggttgcagagtatgagtgacacagaccgggactattccattagcctgtggtctgcagggtaggcccgcaggaaatgaggaatggccgagctggagagaagagctgattttggcattactaagcccagaacgcacataacccatagtgaaatgtgctggcctctggtgcattttgcaagatgagcacaaactttctgggcctccatcctaggacctgggcagacccacatggcctgggctctgaatgcccaccctgcgacggtgggttctgcatcagcaaacgctgaggagtgggcagattttctttgtcttttgcttgcattttctagatccacacctggatactgcccatgttgacgagacagcagcagggggagagggagggaaggaaggtgcggctgcaagaaggaaggcacgggacaggcatgtgacactaggccacaagcgataagcacaggcacctgacttttaagtttttgtttgtttgttgtttcccaaagtgctgataacaataacaacaacaataggattccaaccaggagcctcaagtgacagccaggaagagacctgaaggttggggccaccacaatgccaaatcgtttctaaaggaagctgaaaaatgggactgtcttttgcccacttcgttgtgttaaaaggggacatttgtccaaactccccaaccgagttctagaagctcctgacaaggaggcagcatccagccttgaccaggcctcccagttccctggaaccgtatcaggcattcgcctgcctctcacaaatgtttcagggaggccagttctgcagggtgtcagctccaggacccacagggccagaaccagctgggagaattggttatttgagatgtggtactgcttcctcacaagtctcccacaggccatgtaaagggtatttttttgtggcttgctgtgttgctgagatcatcgtatgcaacagctgggtaataagactagcatagctcaaactatcctgccaaacgctctcatctgatttttcctcccttctcccccaacctccaatcaccctgagtcacctgtaaattcatttgtcattcaaagcggaataacaagttgtccctagcaaaaccgctgagcgctttataattttgtggtgtatttttgtcagtaggtagcagaggcggaagtattttttggtgtaattcttgaaattttctgacaggaaacaaataaagatagatgtgtctgagaaaaaaaaaaaacagagagagagagananagagagagagag

SEQ ID NO: 733615 - DNA, 2247 bp, Homo sapiens
agcgcagaagctccgatccagacacacgcgaggcgctgtcctttcagcaccacaagctcgggctgaggagggaggactcctggccgtcctcctcctcttcaaattggcttgaatctgctctgaccccccacgagtgcagcacagtctgggaagaaaggcgtaaggatggtgaagctgaacagtaaccccagcgagaagggaaccaagccgccttcagttgaggatggcttccagaccgtccctctcatcactcccttggaggttaatcacttacagctgcctgctccagaaaaggtgattgtgaagacaagaacggaatatcagccggaacagaagaacaaagggaagttccgggtgccgaaaatcgctgaatttacggtcaccatccttgtcagcctggccctagctttccttgcgtgcatcgtgttcctggtggtttacaaagccttcacctatgatcacagctgcccagagggattcgtctataagcacaaacgctgtatcccagcctccctggatgcttactactcctcccaggaccccaattccagaagccgcttctacacagtcatcagccactacagcgtggccaagcagagcactgcccgggccatcgggccgtggctgtcagcagccgctgtcatccatgagcccaagccgcccaagacccagggccactagaggcctgccccagccagaatggggggcggggtggagaggaggacccccattggctaattgtctgaaccgatatttctttttgttccttggtattgttgattcgtcgccgagtcaggctcatgtacaaaggcatgtttcgtgttgattgttcccatgtaagatatttttaaagccactgcttattctttgttaggaaaatgtaacagcagaaaaggaaagaaacaaagaacatgaacaaaaagcattaaactggctccatcggaagacgttgaagggcagtgaagagcacagactctgtgggcttcttagataagaaaacgtagcttcagtgggggctccagggttgcagagtatgagtgacacagaccgggactattccattagcctgtggtctgcagggtaggcccgcaggaaatgaggaatggccgagctggagagaagagctgattttggcattactaagcccagaacgcacataacccatagtgaaatgtgctggcctctggtgcattttgcaagatgagcacaaactttctgggcctccatcctaggacctgggcagacccacatggcctgggctctgaatgcccaccctgcgacggtgggttctgcatcagcaaacgctgaggagtgggcagattttctttgtcttttgcttgcattttctagatccacacctggatactgcccatgttgacgagacagcagcagggggagagggagggaaggaaggtgcggctgcaagaaggaaggcacgggacaggcatgtgacactaggccacaagcgataagcacaggcacctgacttttaagtttttgtttgtttgttgtttcccaaagtgctgataacaataacaacaacaataggattccaaccaggagcctcaagtgacagccaggaagagacctgaaggttggggccaccacaatgccaaatcgtttctaaaggaagctgaaaaatgggactgtcttttgcccacttcgttgtgttaaaaggggacatttgtccaaactccccaaccgagttctagaagctcctgacaaggaggcagcatccagccttgaccaggcctcccagttccctggaaccgtatcaggcattcgcctgcctctcacaaatgtttcagggaggccagttctgcagggtgtcagctccaggacccacagggccagaaccagctgggagaattggttatttgagatgtggtactgcttcctcacaagtctcccacaggccatgtaaagggtatttttttgtggcttgctgtgttgctgagatcatcgtatgcaacagctgggtaataagactagcatagctcaaactatcctgccaaacgctctcatctgatttttcctcccttctcccccaacctccaatcaccctgagtcacctgtaaattcatttgtcattcaaagcggaataacaagttgtccctagcaaaaccgctgagcgctttataattttgtggtgtatttttgtcagtaggtagcagaggcggaagtattttttggtgtaattcttgaaattttctgacaggaaacaaataaagatagatgtgtctgaga

SEQ ID NO: 733616 - DNA, 2287 bp, Homo sapiens
  misc_feature (2273)..(2273): n is a, c, g, or t
  misc_feature (2275)..(2275): n is a, c, g, or t
agcgcagaagctccgatccagacacacgcgaggcgctgtcctttcagcaccacaagctcgggctgaggagggaggactcctggccgtcctcctcctcttcaaattggcttgaatctgctctgaccccccacgagtgcagcacagtctgggaagaaaggcgtaaggatggtgaagctgaacagtaaccccagcgagaagggaaccaagccgccttcagttgaggatggcttccagaccgtccctctcatcactcccttggaggttaatcacttacagctgcctgctccagaaaaggtgattgtgaagacaagaacggaatatcagccggaacagaagaacaaagggaagttccgggtgccgaaaatcgctgaatttacggtcaccatccttgtcagcctggccctagctttccttgcgtgcatcgtgttcctggtggtttacaaagccttcacctatgatcacagctgcccagagggattcgtctataagcacaaacgctgtatcccagcctccctggatgcttactactcctcccaggaccccaattccagaagccgcttctacacagtcatcagccactacagcgtggccaagcagagcactgcccgggccatcgggccgtggctgtcagcagccgctgtcatccatgagcccaagccgcccaagacccagggccactagaggcctgccccagccagaatggggggcggggtggagaggaggacccccattggctaattgtctgaaccgatatttctttttgttccttggtattgttgattcgtcgccgagtcaggctcatgtacaaaggcatgtttcgtgttgattgttcccatgtaagatatttttaaagccactgcttattctttgttaggaaaatgtaacagcagaaaaggaaagaaacaaagaacatgaacaaaaagcattaaactggctccatcggaagacgttgaagggcagtgaagagcacagactctgtgggcttcttagataagaaaacgtagcttcagtgggggctccagggttgcagagtatgagtgacacagaccgggactattccattagcctgtggtctgcagggtaggcccgcaggaaatgaggaatggccgagctggagagaagagctgattttggcattactaagcccagaacgcacataacccatagtgaaatgtgctggcctctggtgcattttgcaagatgagcacaaactttctgggcctccatcctaggacctgggcagacccacatggcctgggctctgaatgcccaccctgcgacggtgggttctgcatcagcaaacgctgaggagtgggcagattttctttgtcttttgcttgcattttctagatccacacctggatactgcccatgttgacgagacagcagcagggggagagggagggaaggaaggtgcggctgcaagaaggaaggcacgggacaggcatgtgacactaggccacaagcgataagcacaggcacctgacttttaagtttttgtttgtttgttgtttcccaaagtgctgataacaataacaacaacaataggattccaaccaggagcctcaagtgacagccaggaagagacctgaaggttggggccaccacaatgccaaatcgtttctaaaggaagctgaaaaatgggactgtcttttgcccacttcgttgtgttaaaaggggacatttgtccaaactccccaaccgagttctagaagctcctgacaaggaggcagcatccagccttgaccaggcctcccagttccctggaaccgtatcaggcattcgcctgcctctcacaaatgtttcagggaggccagttctgcagggtgtcagctccaggacccacagggccagaaccagctgggagaattggttatttgagatgtggtactgcttcctcacaagtctcccacaggccatgtaaagggtatttttttgtggcttgctgtgttgctgagatcatcgtatgcaacagctgggtaataagactagcatagctcaaactatcctgccaaacgctctcatctgatttttcctcccttctcccccaacctccaatcaccctgagtcacctgtaaattcatttgtcattcaaagcggaataacaagttgtccctagcaaaaccgctgagcgctttataattttgtggtgtatttttgtcagtaggtagcagaggcggaagtattttttggtgtaattcttgaaattttctgacaggaaacaaataaagatagatgtgtctgagaaaaaaaaaaaacagagagagagagananagagagagagag

SEQ ID NO: 733617 - DNA, 1984 bp, Homo sapiens
agcgcagaagctccgatccagacacacgcgaggcgctgtcctttcagcaccacaagctcgggctgaggagggaggactcctggccgtcctcctcctcttcaaattggcttgaatctgctctgaccccccacgagtgcagcacagtctgggaagaaaggcgtaaggatggtgaagctgaacagtaaccccagcgagaagggaaccaagccgccttcagttgaggatggcttccagaccgtccctctcatcactcccttggaggttaatcacttacagctgcctgctccagaaaaggtgattgtgaagacaagaacggaatatcagccggaacagaagaacaaagggaagttccgggtgccgaaaatcgctgaatttacggtcaccatccttgtcagcctggccctagctttccttgcgtgcatcgtgttcctggtggtttacaaagccttcaccaaaaacgtggtgtgtgctggagttgtctgaaccgatatttctttttgttccttggtattgttgattcgtcgccgagtcaggctcatgtacaaaggcatgtttcgtgttgattgttcccatgtaagatatttttaaagccactgcttattctttgttaggaaaatgtaacagcagaaaaggaaagaaacaaagaacatgaacaaaaagcattaaactggctccatcggaagacgttgaagggcagtgaagagcacagactctgtgggcttcttagataagaaaacgtagcttcagtgggggctccagggttgcagagtatgagtgacacagaccgggactattccattagcctgtggtctgcagggtaggcccgcaggaaatgaggaatggccgagctggagagaagagctgattttggcattactaagcccagaacgcacataacccatagtgaaatgtgctggcctctggtgcattttgcaagatgagcacaaactttctgggcctccatcctaggacctgggcagacccacatggcctgggctctgaatgcccaccctgcgacggtgggttctgcatcagcaaacgctgaggagtgggcagattttctttgtcttttgcttgcattttctagatccacacctggatactgcccatgttgacgagacagcagcagggggagagggagggaaggaaggtgcggctgcaagaaggaaggcacgggacaggcatgtgacactaggccacaagcgataagcacaggcacctgacttttaagtttttgtttgtttgttgtttcccaaagtgctgataacaataacaacaacaataggattccaaccaggagcctcaagtgacagccaggaagagacctgaaggttggggccaccacaatgccaaatcgtttctaaaggaagctgaaaaatgggactgtcttttgcccacttcgttgtgttaaaaggggacatttgtccaaactccccaaccgagttctagaagctcctgacaaggaggcagcatccagccttgaccaggcctcccagttccctggaaccgtatcaggcattcgcctgcctctcacaaatgtttcagggaggccagttctgcagggtgtcagctccaggacccacagggccagaaccagctgggagaattggttatttgagatgtggtactgcttcctcacaagtctcccacaggccatgtaaagggtatttttttgtggcttgctgtgttgctgagatcatcgtatgcaacagctgggtaataagactagcatagctcaaactatcctgccaaacgctctcatctgatttttcctcccttctcccccaacctccaatcaccctgagtcacctgtaaattcatttgtcattcaaagcggaataacaagttgtccctagcaaaaccgctgagcgctttataattttgtggtgtatttttgtcagtaggtagcagaggcggaagtattttttggtgtaattcttgaaattttctgacaggaaacaaataaagatagatgtgtctgaga

SEQ ID NO: 733618 - DNA, 2024 bp, Homo sapiens
  misc_feature (2010)..(2010): n is a, c, g, or t
  misc_feature (2012)..(2012): n is a, c, g, or t
agcgcagaagctccgatccagacacacgcgaggcgctgtcctttcagcaccacaagctcgggctgaggagggaggactcctggccgtcctcctcctcttcaaattggcttgaatctgctctgaccccccacgagtgcagcacagtctgggaagaaaggcgtaaggatggtgaagctgaacagtaaccccagcgagaagggaaccaagccgccttcagttgaggatggcttccagaccgtccctctcatcactcccttggaggttaatcacttacagctgcctgctccagaaaaggtgattgtgaagacaagaacggaatatcagccggaacagaagaacaaagggaagttccgggtgccgaaaatcgctgaatttacggtcaccatccttgtcagcctggccctagctttccttgcgtgcatcgtgttcctggtggtttacaaagccttcaccaaaaacgtggtgtgtgctggagttgtctgaaccgatatttctttttgttccttggtattgttgattcgtcgccgagtcaggctcatgtacaaaggcatgtttcgtgttgattgttcccatgtaagatatttttaaagccactgcttattctttgttaggaaaatgtaacagcagaaaaggaaagaaacaaagaacatgaacaaaaagcattaaactggctccatcggaagacgttgaagggcagtgaagagcacagactctgtgggcttcttagataagaaaacgtagcttcagtgggggctccagggttgcagagtatgagtgacacagaccgggactattccattagcctgtggtctgcagggtaggcccgcaggaaatgaggaatggccgagctggagagaagagctgattttggcattactaagcccagaacgcacataacccatagtgaaatgtgctggcctctggtgcattttgcaagatgagcacaaactttctgggcctccatcctaggacctgggcagacccacatggcctgggctctgaatgcccaccctgcgacggtgggttctgcatcagcaaacgctgaggagtgggcagattttctttgtcttttgcttgcattttctagatccacacctggatactgcccatgttgacgagacagcagcagggggagagggagggaaggaaggtgcggctgcaagaaggaaggcacgggacaggcatgtgacactaggccacaagcgataagcacaggcacctgacttttaagtttttgtttgtttgttgtttcccaaagtgctgataacaataacaacaacaataggattccaaccaggagcctcaagtgacagccaggaagagacctgaaggttggggccaccacaatgccaaatcgtttctaaaggaagctgaaaaatgggactgtcttttgcccacttcgttgtgttaaaaggggacatttgtccaaactccccaaccgagttctagaagctcctgacaaggaggcagcatccagccttgaccaggcctcccagttccctggaaccgtatcaggcattcgcctgcctctcacaaatgtttcagggaggccagttctgcagggtgtcagctccaggacccacagggccagaaccagctgggagaattggttatttgagatgtggtactgcttcctcacaagtctcccacaggccatgtaaagggtatttttttgtggcttgctgtgttgctgagatcatcgtatgcaacagctgggtaataagactagcatagctcaaactatcctgccaaacgctctcatctgatttttcctcccttctcccccaacctccaatcaccctgagtcacctgtaaattcatttgtcattcaaagcggaataacaagttgtccctagcaaaaccgctgagcgctttataattttgtggtgtatttttgtcagtaggtagcagaggcggaagtattttttggtgtaattcttgaaattttctgacaggaaacaaataaagatagatgtgtctgagaaaaaaaaaaaacagagagagagagananagagagagagag

SEQ ID NO: 733619 - DNA, 1702 bp, Homo sapiens
gtctgggaagaaaggcgtaaggatggtgaagctgaacagtaaccccagcgagaagggaaccaagccgccttcagttgaggatggcttccagaccgtccctctcatcactcccttggaggttaatcacttacagctgcctgctccagaaaagggtggggggaagaacgcaccaaaaacgtggtgtgtgctggagttgtctgaaccgatatttctttttgttccttggtattgttgattcgtcgccgagtcaggctcatgtacaaaggcatgtttcgtgttgattgttcccatgtaagatatttttaaagccactgcttattctttgttaggaaaatgtaacagcagaaaaggaaagaaacaaagaacatgaacaaaaagcattaaactggctccatcggaagacgttgaagggcagtgaagagcacagactctgtgggcttcttagataagaaaacgtagcttcagtgggggctccagggttgcagagtatgagtgacacagaccgggactattccattagcctgtggtctgcagggtaggcccgcaggaaatgaggaatggccgagctggagagaagagctgattttggcattactaagcccagaacgcacataacccatagtgaaatgtgctggcctctggtgcattttgcaagatgagcacaaactttctgggcctccatcctaggacctgggcagacccacatggcctgggctctgaatgcccaccctgcgacggtgggttctgcatcagcaaacgctgaggagtgggcagattttctttgtcttttgcttgcattttctagatccacacctggatactgcccatgttgacgagacagcagcagggggagagggagggaaggaaggtgcggctgcaagaaggaaggcacgggacaggcatgtgacactaggccacaagcgataagcacaggcacctgacttttaagtttttgtttgtttgttgtttcccaaagtgctgataacaataacaacaacaataggattccaaccaggagcctcaagtgacagccaggaagagacctgaaggttggggccaccacaatgccaaatcgtttctaaaggaagctgaaaaatgggactgtcttttgcccacttcgttgtgttaaaaggggacatttgtccaaactccccaaccgagttctagaagctcctgacaaggaggcagcatccagccttgaccaggcctcccagttccctggaaccgtatcaggcattcgcctgcctctcacaaatgtttcagggaggccagttctgcagggtgtcagctccaggacccacagggccagaaccagctgggagaattggttatttgagatgtggtactgcttcctcacaagtctcccacaggccatgtaaagggtatttttttgtggcttgctgtgttgctgagatcatcgtatgcaacagctgggtaataagactagcatagctcaaactatcctgccaaacgctctcatctgatttttcctcccttctcccccaacctccaatcaccctgagtcacctgtaaattcatttgtcattcaaagcggaataacaagttgtccctagcaaaaccgctgagcgctttataattttgtggtgtatttttgtcagtaggtagcagaggcggaagtattttttggtgtaattcttgaaattttctgacaggaaacaaataaagatagatgtgtctgaga

SEQ ID NO: 733620 - DNA, 1742 bp, Homo sapiens
  misc_feature (1728)..(1728): n is a, c, g, or t
  misc_feature (1730)..(1730): n is a, c, g, or t
gtctgggaagaaaggcgtaaggatggtgaagctgaacagtaaccccagcgagaagggaaccaagccgccttcagttgaggatggcttccagaccgtccctctcatcactcccttggaggttaatcacttacagctgcctgctccagaaaagggtggggggaagaacgcaccaaaaacgtggtgtgtgctggagttgtctgaaccgatatttctttttgttccttggtattgttgattcgtcgccgagtcaggctcatgtacaaaggcatgtttcgtgttgattgttcccatgtaagatatttttaaagccactgcttattctttgttaggaaaatgtaacagcagaaaaggaaagaaacaaagaacatgaacaaaaagcattaaactggctccatcggaagacgttgaagggcagtgaagagcacagactctgtgggcttcttagataagaaaacgtagcttcagtgggggctccagggttgcagagtatgagtgacacagaccgggactattccattagcctgtggtctgcagggtaggcccgcaggaaatgaggaatggccgagctggagagaagagctgattttggcattactaagcccagaacgcacataacccatagtgaaatgtgctggcctctggtgcattttgcaagatgagcacaaactttctgggcctccatcctaggacctgggcagacccacatggcctgggctctgaatgcccaccctgcgacggtgggttctgcatcagcaaacgctgaggagtgggcagattttctttgtcttttgcttgcattttctagatccacacctggatactgcccatgttgacgagacagcagcagggggagagggagggaaggaaggtgcggctgcaagaaggaaggcacgggacaggcatgtgacactaggccacaagcgataagcacaggcacctgacttttaagtttttgtttgtttgttgtttcccaaagtgctgataacaataacaacaacaataggattccaaccaggagcctcaagtgacagccaggaagagacctgaaggttggggccaccacaatgccaaatcgtttctaaaggaagctgaaaaatgggactgtcttttgcccacttcgttgtgttaaaaggggacatttgtccaaactccccaaccgagttctagaagctcctgacaaggaggcagcatccagccttgaccaggcctcccagttccctggaaccgtatcaggcattcgcctgcctctcacaaatgtttcagggaggccagttctgcagggtgtcagctccaggacccacagggccagaaccagctgggagaattggttatttgagatgtggtactgcttcctcacaagtctcccacaggccatgtaaagggtatttttttgtggcttgctgtgttgctgagatcatcgtatgcaacagctgggtaataagactagcatagctcaaactatcctgccaaacgctctcatctgatttttcctcccttctcccccaacctccaatcaccctgagtcacctgtaaattcatttgtcattcaaagcggaataacaagttgtccctagcaaaaccgctgagcgctttataattttgtggtgtatttttgtcagtaggtagcagaggcggaagtattttttggtgtaattcttgaaattttctgacaggaaacaaataaagatagatgtgtctgagaaaaaaaaaaaacagagagagagagananagagagagagag

SEQ ID NO: 733621 - DNA, 694 bp, Homo sapiens
agcgcagaagctccgatccagacacacgcgaggcgctgtcctttcagcaccacaagctcgggctgaggagggaggactcctggccgtcctcctcctcttcaaattggcttgaatctgctctgaccccccacgagtgcagcacagtctgggaagaaaggcgtaaggatggtgaagctgaacagtaaccccagcgagaagggaaccaagccgccttcagttgaggatggcttccagaccgtccctctcatcactcccttggaggttaatcacttacagctgcctgctccagaaaaggtgattgtgaagacaagaacggaatatcagccggaacagaagaacaaagggaagttccgggtgccgaaaatcgctgaatttacggtcaccatccttgtcagcctggccctagctttccttgcgtgcatcgtgttcctggtggtttacaaagccttcacctatgatcacagctgcccagagggattcgtctataagctcccccaacctccaatcaccctgagtcacctgtaaattcatttgtcattcaaagcggaataacaagttgtccctagcaaaaccgctgagcgctttataattttgtggtgtatttttgtcagtaggtagcagaggcggaagtattttttggtgtaattcttgaaattttctgacaggaaacaaataaagatagatgtgtctgaga

SEQ ID NO: 733622 - DNA, 2228 bp, Homo sapiens
agcgcagaagctccgatccagacacacgcgaggcgctgtcctttcagcaccacaagctcgggctgaggagggaggactcctggccgtcctcctcctcttcaaattggcttgaatctgctctgaccccccacgagtgcagcacagtctgggaagaaaggcgtaaggatggtgaagctgaacagtaaccccagcgagaagggaaccaagccgccttcagttgaggatggcttccagaccgtccctctcatcactcccttggaggttaatcacttacagctgcctgctccagaaaaggtgattgtgaagacaagaacggaatatcagccggaacagaagaacaaagggaagttccgggtgccgaaaatcgctgaatttacggtcaccatccttgtcagcctggccctagctttccttgcgtgcatcgtgttcctggtggtttacaaagccttcacctatgatcacagctgcccagagggattcgtctataagcacaaacgctgtatcccagcctccctggatgcttactactcctcccaggaccccaattccagaagccgcttctacacagtcatcagccactacagcgtggccaagcagagcactgcccgggccatcgggccgtggctgtcagcagccgctgtcatccatgagcccaagccgcccaagacccagggccaggtggggggaagaacgcaccaaaaacgtggtgtgtgctggagttgtctgaaccgatatttctttttgttccttggtattgttgattcgtcgccgagtcaggctcatgtacaaaggcatgtttcgtgttgattgttcccatgtaagatatttttaaagccactgcttattctttgttaggaaaatgtaacagcagaaaaggaaagaaacaaagaacatgaacaaaaagcattaaactggctccatcggaagacgttgaagggcagtgaagagcacagactctgtgggcttcttagataagaaaacgtagcttcagtgggggctccagggttgcagagtatgagtgacacagaccgggactattccattagcctgtggtctgcagggtaggcccgcaggaaatgaggaatggccgagctggagagaagagctgattttggcattactaagcccagaacgcacataacccatagtgaaatgtgctggcctctggtgcattttgcaagatgagcacaaactttctgggcctccatcctaggacctgggcagacccacatggcctgggctctgaatgcccaccctgcgacggtgggttctgcatcagcaaacgctgaggagtgggcagattttctttgtcttttgcttgcattttctagatccacacctggatactgcccatgttgacgagacagcagcagggggagagggagggaaggaaggtgcggctgcaagaaggaaggcacgggacaggcatgtgacactaggccacaagcgataagcacaggcacctgacttttaagtttttgtttgtttgttgtttcccaaagtgctgataacaataacaacaacaataggattccaaccaggagcctcaagtgacagccaggaagagacctgaaggttggggccaccacaatgccaaatcgtttctaaaggaagctgaaaaatgggactgtcttttgcccacttcgttgtgttaaaaggggacatttgtccaaactccccaaccgagttctagaagctcctgacaaggaggcagcatccagccttgaccaggcctcccagttccctggaaccgtatcaggcattcgcctgcctctcacaaatgtttcagggaggccagttctgcagggtgtcagctccaggacccacagggccagaaccagctgggagaattggttatttgagatgtggtactgcttcctcacaagtctcccacaggccatgtaaagggtatttttttgtggcttgctgtgttgctgagatcatcgtatgcaacagctgggtaataagactagcatagctcaaactatcctgccaaacgctctcatctgatttttcctcccttctcccccaacctccaatcaccctgagtcacctgtaaattcatttgtcattcaaagcggaataacaagttgtccctagcaaaaccgctgagcgctttataattttgtggtgtatttttgtcagtaggtagcagaggcggaagtattttttggtgtaattcttgaaattttctgacaggaaacaaataaagatagatgtgtctgaga

SEQ ID NO: 733623 - DNA, 2268 bp, Homo sapiens
  misc_feature (2254)..(2254): n is a, c, g, or t
  misc_feature (2256)..(2256): n is a, c, g, or t
agcgcagaagctccgatccagacacacgcgaggcgctgtcctttcagcaccacaagctcgggctgaggagggaggactcctggccgtcctcctcctcttcaaattggcttgaatctgctctgaccccccacgagtgcagcacagtctgggaagaaaggcgtaaggatggtgaagctgaacagtaaccccagcgagaagggaaccaagccgccttcagttgaggatggcttccagaccgtccctctcatcactcccttggaggttaatcacttacagctgcctgctccagaaaaggtgattgtgaagacaagaacggaatatcagccggaacagaagaacaaagggaagttccgggtgccgaaaatcgctgaatttacggtcaccatccttgtcagcctggccctagctttccttgcgtgcatcgtgttcctggtggtttacaaagccttcacctatgatcacagctgcccagagggattcgtctataagcacaaacgctgtatcccagcctccctggatgcttactactcctcccaggaccccaattccagaagccgcttctacacagtcatcagccactacagcgtggccaagcagagcactgcccgggccatcgggccgtggctgtcagcagccgctgtcatccatgagcccaagccgcccaagacccagggccaggtggggggaagaacgcaccaaaaacgtggtgtgtgctggagttgtctgaaccgatatttctttttgttccttggtattgttgattcgtcgccgagtcaggctcatgtacaaaggcatgtttcgtgttgattgttcccatgtaagatatttttaaagccactgcttattctttgttaggaaaatgtaacagcagaaaaggaaagaaacaaagaacatgaacaaaaagcattaaactggctccatcggaagacgttgaagggcagtgaagagcacagactctgtgggcttcttagataagaaaacgtagcttcagtgggggctccagggttgcagagtatgagtgacacagaccgggactattccattagcctgtggtctgcagggtaggcccgcaggaaatgaggaatggccgagctggagagaagagctgattttggcattactaagcccagaacgcacataacccatagtgaaatgtgctggcctctggtgcattttgcaagatgagcacaaactttctgggcctccatcctaggacctgggcagacccacatggcctgggctctgaatgcccaccctgcgacggtgggttctgcatcagcaaacgctgaggagtgggcagattttctttgtcttttgcttgcattttctagatccacacctggatactgcccatgttgacgagacagcagcagggggagagggagggaaggaaggtgcggctgcaagaaggaaggcacgggacaggcatgtgacactaggccacaagcgataagcacaggcacctgacttttaagtttttgtttgtttgttgtttcccaaagtgctgataacaataacaacaacaataggattccaaccaggagcctcaagtgacagccaggaagagacctgaaggttggggccaccacaatgccaaatcgtttctaaaggaagctgaaaaatgggactgtcttttgcccacttcgttgtgttaaaaggggacatttgtccaaactccccaaccgagttctagaagctcctgacaaggaggcagcatccagccttgaccaggcctcccagttccctggaaccgtatcaggcattcgcctgcctctcacaaatgtttcagggaggccagttctgcagggtgtcagctccaggacccacagggccagaaccagctgggagaattggttatttgagatgtggtactgcttcctcacaagtctcccacaggccatgtaaagggtatttttttgtggcttgctgtgttgctgagatcatcgtatgcaacagctgggtaataagactagcatagctcaaactatcctgccaaacgctctcatctgatttttcctcccttctcccccaacctccaatcaccctgagtcacctgtaaattcatttgtcattcaaagcggaataacaagttgtccctagcaaaaccgctgagcgctttataattttgtggtgtatttttgtcagtaggtagcagaggcggaagtattttttggtgtaattcttgaaattttctgacaggaaacaaataaagatagatgtgtctgagaaaaaaaaaaaacagagagagagagananagagagagagag

SEQ ID NO: 733624 - DNA, 638 bp, Homo sapiens
agcgcagaagctccgatccagacacacgcgaggcgctgtcctttcagcaccacaagctcgggctgaggagggaggactcctggccgtcctcctcctcttcaaattggcttgaatctgctctgaccccccacgagtgcagcacagtctgggaagaaaggcgtaaggatggtgaagctgaacagtaaccccagcgagaagggaaccaagccgccttcagttgaggatggcttccagaccgtccctctcatcactcccttggaggttaatcacttacagctgcctgctccagaaaaggtgattgtgaagacaagaacggaatatcagccggaacagaagaacaaagggaagttccgggtgccgaaaatcgctgaatttacggtcatgtctgccacacagcacaggcccagtgaaagtggaccaagacccagctgcgtacaagtacttgcaggaataagcaggtacctgcatgaatgagcacagagcttgcaggagaggcctggggtatcttggtgcaccaggccacggggtcaaatttacctgccttcctggcaagagatcacaagaaatattcccaggttcacatgtaagaatgtttgctgcagtactatctataaaattaaagtattggaaactagact

SEQ ID NO: 733625 - DNA, 2410 bp, Homo sapiens
agcgcagaagctccgatccagacacacgcgaggcgctgtcctttcagcaccacaagctcgggctgaggagggaggactcctggccgtcctcctcctcttcaaattggcttgaatctgctctgaccccccacgagtgcagcacaccctctctttctgcctcacctcctgctgtaaccagaatcccactgcttgccttaggtctgggaagaaaggcgtaaggatggtgaagctgaacagtaaccccagcgagaagggaaccaagccgccttcagttgaggatggcttccagaccgtccctctcatcactcccttggaggttaatcacttacagctgcctgctccagaaaaggtgattgtgaagacaagaacggaatatcagccggaacagaagaacaaagggaagttccgggtgccgaaaatcgctgaatttacggtcaccatccttgtcagcctggccctagctttccttgcgtgcatcgtgttcctggtggtttacaaagccttcacctatgatcacagctgcccagagggattcgtctataagcacaaacgctgtatcccagcctccctggatgcttactactcctcccaggaccccaattccagaagccgcttctacacagtcatcagccactacagcgtggccaagcagagcactgcccgggccatcgggccgtggctgtcagcagccgctgtcatccatgagcccaagccgcccaagacccagggccactagaggcctgccccagccagaatggggggcggggtggagaggaggacccccattggctaagccaagctccagttacaagacaacactgtactcctgggatatgggggcgggggcggggcagggcagggtggggggaagaacgcaccaaaaacgtggtgtgtgctggagttgtctgaaccgatatttctttttgttccttggtattgttgattcgtcgccgagtcaggctcatgtacaaaggcatgtttcgtgttgattgttcccatgtaagatatttttaaagccactgcttattctttgttaggaaaatgtaacagcagaaaaggaaagaaacaaagaacatgaacaaaaagcattaaactggctccatcggaagacgttgaagggcagtgaagagcacagactctgtgggcttcttagataagaaaacgtagcttcagtgggggctccagggttgcagagtatgagtgacacagaccgggactattccattagcctgtggtctgcagggtaggcccgcaggaaatgaggaatggccgagctggagagaagagctgattttggcattactaagcccagaacgcacataacccatagtgaaatgtgctggcctctggtgcattttgcaagatgagcacaaactttctgggcctccatcctaggacctgggcagacccacatggcctgggctctgaatgcccaccctgcgacggtgggttctgcatcagcaaacgctgaggagtgggcagattttctttgtcttttgcttgcattttctagatccacacctggatactgcccatgttgacgagacagcagcagggggagagggagggaaggaaggtgcggctgcaagaaggaaggcacgggacaggcatgtgacactaggccacaagcgataagcacaggcacctgacttttaagtttttgtttgtttgttgtttcccaaagtgctgataacaataacaacaacaataggattccaaccaggagcctcaagtgacagccaggaagagacctgaaggttggggccaccacaatgccaaatcgtttctaaaggaagctgaaaaatgggactgtcttttgcccacttcgttgtgttaaaaggggacatttgtccaaactccccaaccgagttctagaagctcctgacaaggaggcagcatccagccttgaccaggcctcccagttccctggaaccgtatcaggcattcgcctgcctctcacaaatgtttcagggaggccagttctgcagggtgtcagctccaggacccacagggccagaaccagctgggagaattggttatttgagatgtggtactgcttcctcacaagtctcccacaggccatgtaaagggtatttttttgtggcttgctgtgttgctgagatcatcgtatgcaacagctgggtaataagactagcatagctcaaactatcctgccaaacgctctcatctgatttttcctcccttctcccccaacctccaatcaccctgagtcacctgtaaattcatttgtcattcaaagcggaataacaagttgtccctagcaaaaccgctgagcgctttataattttgtggtgtatttttgtcagtaggtagcagaggcggaagtattttttggtgtaattcttgaaattttctgacaggaaacaaataaagatagatgtgtctgaga

SEQ ID NO: 733626 - DNA, 2450 bp, Homo sapiens
  misc_feature (2436)..(2436): n is a, c, g, or t
  misc_feature (2438)..(2438): n is a, c, g, or t
agcgcagaagctccgatccagacacacgcgaggcgctgtcctttcagcaccacaagctcgggctgaggagggaggactcctggccgtcctcctcctcttcaaattggcttgaatctgctctgaccccccacgagtgcagcacaccctctctttctgcctcacctcctgctgtaaccagaatcccactgcttgccttaggtctgggaagaaaggcgtaaggatggtgaagctgaacagtaaccccagcgagaagggaaccaagccgccttcagttgaggatggcttccagaccgtccctctcatcactcccttggaggttaatcacttacagctgcctgctccagaaaaggtgattgtgaagacaagaacggaatatcagccggaacagaagaacaaagggaagttccgggtgccgaaaatcgctgaatttacggtcaccatccttgtcagcctggccctagctttccttgcgtgcatcgtgttcctggtggtttacaaagccttcacctatgatcacagctgcccagagggattcgtctataagcacaaacgctgtatcccagcctccctggatgcttactactcctcccaggaccccaattccagaagccgcttctacacagtcatcagccactacagcgtggccaagcagagcactgcccgggccatcgggccgtggctgtcagcagccgctgtcatccatgagcccaagccgcccaagacccagggccactagaggcctgccccagccagaatggggggcggggtggagaggaggacccccattggctaagccaagctccagttacaagacaacactgtactcctgggatatgggggcgggggcggggcagggcagggtggggggaagaacgcaccaaaaacgtggtgtgtgctggagttgtctgaaccgatatttctttttgttccttggtattgttgattcgtcgccgagtcaggctcatgtacaaaggcatgtttcgtgttgattgttcccatgtaagatatttttaaagccactgcttattctttgttaggaaaatgtaacagcagaaaaggaaagaaacaaagaacatgaacaaaaagcattaaactggctccatcggaagacgttgaagggcagtgaagagcacagactctgtgggcttcttagataagaaaacgtagcttcagtgggggctccagggttgcagagtatgagtgacacagaccgggactattccattagcctgtggtctgcagggtaggcccgcaggaaatgaggaatggccgagctggagagaagagctgattttggcattactaagcccagaacgcacataacccatagtgaaatgtgctggcctctggtgcattttgcaagatgagcacaaactttctgggcctccatcctaggacctgggcagacccacatggcctgggctctgaatgcccaccctgcgacggtgggttctgcatcagcaaacgctgaggagtgggcagattttctttgtcttttgcttgcattttctagatccacacctggatactgcccatgttgacgagacagcagcagggggagagggagggaaggaaggtgcggctgcaagaaggaaggcacgggacaggcatgtgacactaggccacaagcgataagcacaggcacctgacttttaagtttttgtttgtttgttgtttcccaaagtgctgataacaataacaacaacaataggattccaaccaggagcctcaagtgacagccaggaagagacctgaaggttggggccaccacaatgccaaatcgtttctaaaggaagctgaaaaatgggactgtcttttgcccacttcgttgtgttaaaaggggacatttgtccaaactccccaaccgagttctagaagctcctgacaaggaggcagcatccagccttgaccaggcctcccagttccctggaaccgtatcaggcattcgcctgcctctcacaaatgtttcagggaggccagttctgcagggtgtcagctccaggacccacagggccagaaccagctgggagaattggttatttgagatgtggtactgcttcctcacaagtctcccacaggccatgtaaagggtatttttttgtggcttgctgtgttgctgagatcatcgtatgcaacagctgggtaataagactagcatagctcaaactatcctgccaaacgctctcatctgatttttcctcccttctcccccaacctccaatcaccctgagtcacctgtaaattcatttgtcattcaaagcggaataacaagttgtccctagcaaaaccgctgagcgctttataattttgtggtgtatttttgtcagtaggtagcagaggcggaagtattttttggtgtaattcttgaaattttctgacaggaaacaaataaagatagatgtgtctgagaaaaaaaaaaaacagagagagagagananagagagagagag

SEQ ID NO: 733627 - DNA, 2302 bp, Homo sapiens
agcgcagaagctccgatccagacacacgcgaggcgctgtcctttcagcaccacaagctcgggctgaggagggaggactcctggccgtcctcctcctcttcaaattggcttgaatctgctctgaccccccacgagtgcagcacaccctctctttctgcctcacctcctgctgtaaccagaatcccactgcttgccttaggtctgggaagaaaggcgtaaggatggtgaagctgaacagtaaccccagcgagaagggaaccaagccgccttcagttgaggatggcttccagaccgtccctctcatcactcccttggaggttaatcacttacagctgcctgctccagaaaaggtgattgtgaagacaagaacggaatatcagccggaacagaagaacaaagggaagttccgggtgccgaaaatcgctgaatttacggtcaccatccttgtcagcctggccctagctttccttgcgtgcatcgtgttcctggtggtttacaaagccttcacctatgatcacagctgcccagagggattcgtctataagcacaaacgctgtatcccagcctccctggatgcttactactcctcccaggaccccaattccagaagccgcttctacacagtcatcagccactacagcgtggccaagcagagcactgcccgggccatcgggccgtggctgtcagcagccgctgtcatccatgagcccaagccgcccaagacccagggccactagaggcctgccccagccagaatggggggcggggtggagaggaggacccccattggctaattgtctgaaccgatatttctttttgttccttggtattgttgattcgtcgccgagtcaggctcatgtacaaaggcatgtttcgtgttgattgttcccatgtaagatatttttaaagccactgcttattctttgttaggaaaatgtaacagcagaaaaggaaagaaacaaagaacatgaacaaaaagcattaaactggctccatcggaagacgttgaagggcagtgaagagcacagactctgtgggcttcttagataagaaaacgtagcttcagtgggggctccagggttgcagagtatgagtgacacagaccgggactattccattagcctgtggtctgcagggtaggcccgcaggaaatgaggaatggccgagctggagagaagagctgattttggcattactaagcccagaacgcacataacccatagtgaaatgtgctggcctctggtgcattttgcaagatgagcacaaactttctgggcctccatcctaggacctgggcagacccacatggcctgggctctgaatgcccaccctgcgacggtgggttctgcatcagcaaacgctgaggagtgggcagattttctttgtcttttgcttgcattttctagatccacacctggatactgcccatgttgacgagacagcagcagggggagagggagggaaggaaggtgcggctgcaagaaggaaggcacgggacaggcatgtgacactaggccacaagcgataagcacaggcacctgacttttaagtttttgtttgtttgttgtttcccaaagtgctgataacaataacaacaacaataggattccaaccaggagcctcaagtgacagccaggaagagacctgaaggttggggccaccacaatgccaaatcgtttctaaaggaagctgaaaaatgggactgtcttttgcccacttcgttgtgttaaaaggggacatttgtccaaactccccaaccgagttctagaagctcctgacaaggaggcagcatccagccttgaccaggcctcccagttccctggaaccgtatcaggcattcgcctgcctctcacaaatgtttcagggaggccagttctgcagggtgtcagctccaggacccacagggccagaaccagctgggagaattggttatttgagatgtggtactgcttcctcacaagtctcccacaggccatgtaaagggtatttttttgtggcttgctgtgttgctgagatcatcgtatgcaacagctgggtaataagactagcatagctcaaactatcctgccaaacgctctcatctgatttttcctcccttctcccccaacctccaatcaccctgagtcacctgtaaattcatttgtcattcaaagcggaataacaagttgtccctagcaaaaccgctgagcgctttataattttgtggtgtatttttgtcagtaggtagcagaggcggaagtattttttggtgtaattcttgaaattttctgacaggaaacaaataaagatagatgtgtctgaga

SEQ ID NO: 733628 - DNA, 2342 bp, Homo sapiens
  misc_feature (2328)..(2328): n is a, c, g, or t
  misc_feature (2330)..(2330): n is a, c, g, or t
agcgcagaagctccgatccagacacacgcgaggcgctgtcctttcagcaccacaagctcgggctgaggagggaggactcctggccgtcctcctcctcttcaaattggcttgaatctgctctgaccccccacgagtgcagcacaccctctctttctgcctcacctcctgctgtaaccagaatcccactgcttgccttaggtctgggaagaaaggcgtaaggatggtgaagctgaacagtaaccccagcgagaagggaaccaagccgccttcagttgaggatggcttccagaccgtccctctcatcactcccttggaggttaatcacttacagctgcctgctccagaaaaggtgattgtgaagacaagaacggaatatcagccggaacagaagaacaaagggaagttccgggtgccgaaaatcgctgaatttacggtcaccatccttgtcagcctggccctagctttccttgcgtgcatcgtgttcctggtggtttacaaagccttcacctatgatcacagctgcccagagggattcgtctataagcacaaacgctgtatcccagcctccctggatgcttactactcctcccaggaccccaattccagaagccgcttctacacagtcatcagccactacagcgtggccaagcagagcactgcccgggccatcgggccgtggctgtcagcagccgctgtcatccatgagcccaagccgcccaagacccagggccactagaggcctgccccagccagaatggggggcggggtggagaggaggacccccattggctaattgtctgaaccgatatttctttttgttccttggtattgttgattcgtcgccgagtcaggctcatgtacaaaggcatgtttcgtgttgattgttcccatgtaagatatttttaaagccactgcttattctttgttaggaaaatgtaacagcagaaaaggaaagaaacaaagaacatgaacaaaaagcattaaactggctccatcggaagacgttgaagggcagtgaagagcacagactctgtgggcttcttagataagaaaacgtagcttcagtgggggctccagggttgcagagtatgagtgacacagaccgggactattccattagcctgtggtctgcagggtaggcccgcaggaaatgaggaatggccgagctggagagaagagctgattttggcattactaagcccagaacgcacataacccatagtgaaatgtgctggcctctggtgcattttgcaagatgagcacaaactttctgggcctccatcctaggacctgggcagacccacatggcctgggctctgaatgcccaccctgcgacggtgggttctgcatcagcaaacgctgaggagtgggcagattttctttgtcttttgcttgcattttctagatccacacctggatactgcccatgttgacgagacagcagcagggggagagggagggaaggaaggtgcggctgcaagaaggaaggcacgggacaggcatgtgacactaggccacaagcgataagcacaggcacctgacttttaagtttttgtttgtttgttgtttcccaaagtgctgataacaataacaacaacaataggattccaaccaggagcctcaagtgacagccaggaagagacctgaaggttggggccaccacaatgccaaatcgtttctaaaggaagctgaaaaatgggactgtcttttgcccacttcgttgtgttaaaaggggacatttgtccaaactccccaaccgagttctagaagctcctgacaaggaggcagcatccagccttgaccaggcctcccagttccctggaaccgtatcaggcattcgcctgcctctcacaaatgtttcagggaggccagttctgcagggtgtcagctccaggacccacagggccagaaccagctgggagaattggttatttgagatgtggtactgcttcctcacaagtctcccacaggccatgtaaagggtatttttttgtggcttgctgtgttgctgagatcatcgtatgcaacagctgggtaataagactagcatagctcaaactatcctgccaaacgctctcatctgatttttcctcccttctcccccaacctccaatcaccctgagtcacctgtaaattcatttgtcattcaaagcggaataacaagttgtccctagcaaaaccgctgagcgctttataattttgtggtgtatttttgtcagtaggtagcagaggcggaagtattttttggtgtaattcttgaaattttctgacaggaaacaaataaagatagatgtgtctgagaaaaaaaaaaaacagagagagagagananagagagagagag

SEQ ID NO: 733629 - DNA, 2283 bp, Homo sapiens
agcgcagaagctccgatccagacacacgcgaggcgctgtcctttcagcaccacaagctcgggctgaggagggaggactcctggccgtcctcctcctcttcaaattggcttgaatctgctctgaccccccacgagtgcagcacaccctctctttctgcctcacctcctgctgtaaccagaatcccactgcttgccttaggtctgggaagaaaggcgtaaggatggtgaagctgaacagtaaccccagcgagaagggaaccaagccgccttcagttgaggatggcttccagaccgtccctctcatcactcccttggaggttaatcacttacagctgcctgctccagaaaaggtgattgtgaagacaagaacggaatatcagccggaacagaagaacaaagggaagttccgggtgccgaaaatcgctgaatttacggtcaccatccttgtcagcctggccctagctttccttgcgtgcatcgtgttcctggtggtttacaaagccttcacctatgatcacagctgcccagagggattcgtctataagcacaaacgctgtatcccagcctccctggatgcttactactcctcccaggaccccaattccagaagccgcttctacacagtcatcagccactacagcgtggccaagcagagcactgcccgggccatcgggccgtggctgtcagcagccgctgtcatccatgagcccaagccgcccaagacccagggccaggtggggggaagaacgcaccaaaaacgtggtgtgtgctggagttgtctgaaccgatatttctttttgttccttggtattgttgattcgtcgccgagtcaggctcatgtacaaaggcatgtttcgtgttgattgttcccatgtaagatatttttaaagccactgcttattctttgttaggaaaatgtaacagcagaaaaggaaagaaacaaagaacatgaacaaaaagcattaaactggctccatcggaagacgttgaagggcagtgaagagcacagactctgtgggcttcttagataagaaaacgtagcttcagtgggggctccagggttgcagagtatgagtgacacagaccgggactattccattagcctgtggtctgcagggtaggcccgcaggaaatgaggaatggccgagctggagagaagagctgattttggcattactaagcccagaacgcacataacccatagtgaaatgtgctggcctctggtgcattttgcaagatgagcacaaactttctgggcctccatcctaggacctgggcagacccacatggcctgggctctgaatgcccaccctgcgacggtgggttctgcatcagcaaacgctgaggagtgggcagattttctttgtcttttgcttgcattttctagatccacacctggatactgcccatgttgacgagacagcagcagggggagagggagggaaggaaggtgcggctgcaagaaggaaggcacgggacaggcatgtgacactaggccacaagcgataagcacaggcacctgacttttaagtttttgtttgtttgttgtttcccaaagtgctgataacaataacaacaacaataggattccaaccaggagcctcaagtgacagccaggaagagacctgaaggttggggccaccacaatgccaaatcgtttctaaaggaagctgaaaaatgggactgtcttttgcccacttcgttgtgttaaaaggggacatttgtccaaactccccaaccgagttctagaagctcctgacaaggaggcagcatccagccttgaccaggcctcccagttccctggaaccgtatcaggcattcgcctgcctctcacaaatgtttcagggaggccagttctgcagggtgtcagctccaggacccacagggccagaaccagctgggagaattggttatttgagatgtggtactgcttcctcacaagtctcccacaggccatgtaaagggtatttttttgtggcttgctgtgttgctgagatcatcgtatgcaacagctgggtaataagactagcatagctcaaactatcctgccaaacgctctcatctgatttttcctcccttctcccccaacctccaatcaccctgagtcacctgtaaattcatttgtcattcaaagcggaataacaagttgtccctagcaaaaccgctgagcgctttataattttgtggtgtatttttgtcagtaggtagcagaggcggaagtattttttggtgtaattcttgaaattttctgacaggaaacaaataaagatagatgtgtctgaga

SEQ ID NO: 733630 - DNA, 2323 bp, Homo sapiens
  misc_feature (2309)..(2309): n is a, c, g, or t
  misc_feature (2311)..(2311): n is a, c, g, or t
agcgcagaagctccgatccagacacacgcgaggcgctgtcctttcagcaccacaagctcgggctgaggagggaggactcctggccgtcctcctcctcttcaaattggcttgaatctgctctgaccccccacgagtgcagcacaccctctctttctgcctcacctcctgctgtaaccagaatcccactgcttgccttaggtctgggaagaaaggcgtaaggatggtgaagctgaacagtaaccccagcgagaagggaaccaagccgccttcagttgaggatggcttccagaccgtccctctcatcactcccttggaggttaatcacttacagctgcctgctccagaaaaggtgattgtgaagacaagaacggaatatcagccggaacagaagaacaaagggaagttccgggtgccgaaaatcgctgaatttacggtcaccatccttgtcagcctggccctagctttccttgcgtgcatcgtgttcctggtggtttacaaagccttcacctatgatcacagctgcccagagggattcgtctataagcacaaacgctgtatcccagcctccctggatgcttactactcctcccaggaccccaattccagaagccgcttctacacagtcatcagccactacagcgtggccaagcagagcactgcccgggccatcgggccgtggctgtcagcagccgctgtcatccatgagcccaagccgcccaagacccagggccaggtggggggaagaacgcaccaaaaacgtggtgtgtgctggagttgtctgaaccgatatttctttttgttccttggtattgttgattcgtcgccgagtcaggctcatgtacaaaggcatgtttcgtgttgattgttcccatgtaagatatttttaaagccactgcttattctttgttaggaaaatgtaacagcagaaaaggaaagaaacaaagaacatgaacaaaaagcattaaactggctccatcggaagacgttgaagggcagtgaagagcacagactctgtgggcttcttagataagaaaacgtagcttcagtgggggctccagggttgcagagtatgagtgacacagaccgggactattccattagcctgtggtctgcagggtaggcccgcaggaaatgaggaatggccgagctggagagaagagctgattttggcattactaagcccagaacgcacataacccatagtgaaatgtgctggcctctggtgcattttgcaagatgagcacaaactttctgggcctccatcctaggacctgggcagacccacatggcctgggctctgaatgcccaccctgcgacggtgggttctgcatcagcaaacgctgaggagtgggcagattttctttgtcttttgcttgcattttctagatccacacctggatactgcccatgttgacgagacagcagcagggggagagggagggaaggaaggtgcggctgcaagaaggaaggcacgggacaggcatgtgacactaggccacaagcgataagcacaggcacctgacttttaagtttttgtttgtttgttgtttcccaaagtgctgataacaataacaacaacaataggattccaaccaggagcctcaagtgacagccaggaagagacctgaaggttggggccaccacaatgccaaatcgtttctaaaggaagctgaaaaatgggactgtcttttgcccacttcgttgtgttaaaaggggacatttgtccaaactccccaaccgagttctagaagctcctgacaaggaggcagcatccagccttgaccaggcctcccagttccctggaaccgtatcaggcattcgcctgcctctcacaaatgtttcagggaggccagttctgcagggtgtcagctccaggacccacagggccagaaccagctgggagaattggttatttgagatgtggtactgcttcctcacaagtctcccacaggccatgtaaagggtatttttttgtggcttgctgtgttgctgagatcatcgtatgcaacagctgggtaataagactagcatagctcaaactatcctgccaaacgctctcatctgatttttcctcccttctcccccaacctccaatcaccctgagtcacctgtaaattcatttgtcattcaaagcggaataacaagttgtccctagcaaaaccgctgagcgctttataattttgtggtgtatttttgtcagtaggtagcagaggcggaagtattttttggtgtaattcttgaaattttctgacaggaaacaaataaagatagatgtgtctgagaaaaaaaaaaaacagagagagagagananagagagagagag

SEQ ID NO: 733631 - DNA, 516 bp, Homo sapiens
  misc_feature (471)..(471): n is a, c, g, or t
tacttttcacagggacagcatgaccacagagaacggcaagatcagcaccacggatgtacccatgggtcagcataattttcaaaatcgcaccttaagaaccaagtcacaaaagaagagatttgaagaagaattgaatgaaaggatgattcaagcaattgatgggattaatgcacagaagcaatggctcaagtctgaagacattcagagaatctcactgcttttctataacaaagtactagaaaaagagtaccgggccacggcactgccagcgttcaagtattatgtgacttgtgcctgtctcatattcttctgcatcttcattgtgcagattctcgtgctgccaaaaacgtccgtcctgggcatctcctttggggctgcgtttctcttgctggccttcatcctcttcgtctgctttgctggacagctctgcaatgcagcaaaaaagcctctcccctgctcatgtggcttttnaagtcctcgggcatcattgccaaccggccctgggcacggatctct

SEQ ID NO: 733632 - DNA, 555 bp, Homo sapiens
agcgtccccgtcagctgagagcatcctcactcggtcagttcctcgggcgagttacggggacgacctgcgggagcacgcgggcagtggccggacgctgaagcccaggagagcgatggagacgtatgcggaggttgggaaggagggcaaggtagagaaaggatgaagacccccaccccagcctcccctcactccatgaaagcccgtgatgcccaatcatgcggtggtctgcctctgtgtgtttctgtgtgtgtctgtgtgtgtatagtctgcatgtgtctgtttctctgtgtgtctgtgtgtatgtcgatgtgcctgcatatgtctgtgtgtgtgtgtatctgtgtatgtctgtatttgtgtctctgtgtgtctgtgtgtctgtgtgtgtctcagtgtgtgtctgtgtctttgtgtgtctctgtgtatctgtgtgtgtgtctgtgtgtctccgtgtctctgtgtgtgtgtgtatggcctgtgtgtgtctgtgtgtgtgcacgtatgcgtccatgtgggtgtttgtgcgtgcatgtctgtgtctgtctctgtgtgtgt

SEQ ID NO: 733633 - DNA, 723 bp, Homo sapiens
agcgtccccgtcagctgagagcatcctcactcggtcagttcctcgggcgagttacggggacgacctgcgggagcacgcgggcagtggccggacgctgaagcccaggagagcgatggagacgtatgcggaggttgggaaggagggcaagccttcctgtgcatcggtggatctgcagggagacagctccttacaggtggagatttctgacgcagtgagtgagcgggacaaggtgaaattcactgttcaaacaaagagctgcctccctcacttcgcccagaccgagttctcagtcgtgcggcagcacgaggagttcatctggctgcatgatgcctacgtggagaatgaggagtacgccggcctcatcatccccccagcccctccgaggccagactttgaggcttcgagggaaaagctacagaaattgggcgagggggacagctctgtcactcgggaagagtttgccaagatgaagcaggagctggaagcggagtacctggccatctttaagaagacagttgcgatgcacgaagtctttctgcagcgcctggcggcccaccccaccctgcgtcgagaccacaacttctttgtgtttttggaatatggacaggatctgagtgtccgggggaagaacaggaaggagctcctcggagggtttctgaggaatattgtgaagtccgcggatgaagccctcatcacgggcatgtcagggctcaaggtaacccc

SEQ ID NO: 733634 - DNA, 2076 bp, Homo sapiens; identical to SEQ ID NO: 318923

SEQ ID NO: 733635 - DNA, 1107 bp, Homo sapiens
cagccggccacacaggcgcggagacccggctcggcgcgcgctcctcggcgcacacgctccccatccccgcgccgcgcgggccgcggacttgcaggctgcgcgtcctttgcggagtctgccccggccccacggacaggccccgcagtgagcagcccagagacacattggggctgacctgccgctgctgtcagtgggaggccagtggtgctggccaagaagtgtcatggctggtgtcgtgcacgtttccctggctgctctcctcctgctgcctatggcccctgccatgcattctgactgcatcttcaagaaggagcaagccatgtgcctggagaagatccagagggccaatgagctgatgggcttcaatgattcctctccaggctgtcctgggatgtgggacaacatcacgtgttggaagcccgcccatgtgggtgagatggtcctggtcagctgccctgagctcttccgaatcttcaacccagaccaagtctgggagaccgaaaccattggagagtctgattttggtgacagtaactccttagatctctcagacatgggagtggtgagccggaactgcacggaggatggctggtcggaacccttccctcattactttgatgcctgtgggtttgatgaatatgaatctgagactggggaccaggattattactacctgtcagtgaaggccctctacacggttggctacagcacatccctcgtcaccctcaccactgccatggtcatcctttgtcgcttccggaagctgcactgcacacgcaacttcatccacatgaacctgtttgtgtcgttcatgctgagggcgatctccgtcttcatcaaagactggattctgtatgcggagcaggacagcaaccactgcttcatctccactgtggaatgtaaggccgtcatggttttcttccactactgtgttgtgtccaactacttctggctgttcatcgagggcctgtacctcttcactctgctggtggagaccttcttccctgaaaggagatacttctactggtacaccatcattggctgggggaccccaactgtgtgtgtgacagtgtgggctacgctgagactctactttgatgacacagg

SEQ ID NO: 733636 - DNA, 598 bp, Homo sapiens
cagccggccacacaggcgcggagacccggctcggcgcgcgctcctcggcgcacacgctccccatccccgcgccgcgcgggccgcggacttgcaggctgcgcgtcctttgcggagtctgccccggccccacggacaggccccgcagtgagcagcccagagacacattggggctgacctgccgctgctgtcagtgggaggccagtggtgctggccaagaagtgtcatggctggtgtcgtgcacgtttccctggctgctctcctcctgctgcctatggcccctgccatgcattctgactgcatcttcaagaaggagcaagccatgtgcctggagaagatccagagggccaatgagctgatgggcttcaatgattcctctccaggctgtcctgggatgtgggacaacatcacgtgttggaagcccgcccatgtgggtgagatggtcctggtcagctgccctgagctcttccgaatcttcaacccagaccaagacatgggagtggtgagccggaactgcacggaggatggctggtcggaacccttccctcattactttgatgcctgtgggtttgatgaatatgaatctgagactggggaccag

SEQ ID NO: 733637 - DNA, 721 bp, Homo sapiens
ctctcaggcacagaggccaccgttactcctgatgattctgtctcagacccaacaacctggccttcccaggaggtctccatgtgtcaccccctccctgggtctcacccttctcacctgctcaaggaagggatgacctcagtgaggcccagggcctgcagcaaggccctccctggcaattgcagaccaaggattctgctcctccaccttgaactccagcctctttctctccatttttccctctctctcccctacccgtctctccctctctctcacacacacactcttccgggttcaagggccaagcgtctgcctaggctgagacacgtgctgagctccctgaagatggaccagctgccccctagaagggagactttcaggggcatcagggcccttgggatgctccgccctgaccagctttttggtggcagagggaggcacggggagagggagaggccatgtcgcagtccccctgccgtgggagaggcaacgcggaaatgtatagacccagtgctcagccagaaacagggccagcaagcggcagtgaacggaggcagcccggggctcgtcagggtgggcagagccatggcccaggggttgaaaacccccgagttccccgtgagacttggctggcccttcccacccctgggcctcagtctccccatcttgtgtgatgaggagagaccctgaggacagaggtcttcaggctgtgggtctcaacagg

SEQ ID NO: 733638 - DNA, 3101 bp, Homo sapiens
agcggcttctctgcctctctctcctccacgctgctttgatttcgctcttgcctctcttcttgcgctgctcagctgggaacatcgtctcaccaggggcagcagcgacgcgctgcacagccagacaggagctggttgcggggcatggaagcagcctccttggcagccgggagaggagcaagcgcacgccactgcccgtgacccaggcgtccggctgctgtcccctgccggggagctcatccacgcagaggtctctccctgtcctccctgcgagcttttcctctgcagagcccagtggagccagccatgtaccgcggcaacgcttgctgaccccagtgaggagagaggcctgaatccgagggccctggcacctgtgagctcttggctgtcacctgccccaagcctcgcacctccgctccacagcagtccccacaggagacaaccctgacgggagcatggagctgctgtccacgccccacagcattgagatcaacaacatcacctgcgactccttccgcatctcctgggccatggaggacagtgacctggagagggtcacccattacttcattgaccttaacaagaaggagaataagaattccaacaagttcaagcaccgggacgtccccaccaagctcgtggccaaggcagtgccgctgcccatgacggtgagaggccactggttcctgagcccccgcacggagtacagtgtggccgtgcagacggcagtgaagcagagcgatggggagtacctggtgtccggctggagcgagacggtggagttctgcactggggattatgccaaggagcacctggctcagcttcaggagaaagctgagcagatcgcaggccgcatgctccgcttctccgtcttctaccgcaaccatcacaaggagtacttccagcatgccaggacccactgcgggaacatgctgcagccttacctgaaggacaacagcggcagccacggctcccccaccagcggtatgctccacggggtcttcttcagctgcaacacggagttcaacacgggccagcccccgcaggactccccctacggccgctggcgcttccagatcccagctcagcgcctcttcaatcccagcaccaacctctactttgcggacttctactgcatgtacacggcctaccactacgccatcctggtgctggcgcccaaaggctccctgggggaccgcttctgccgcgaccgcctgcccctcctggacattgcttgcaacaagttcctgacctgcagcgtggaggatggggagctggtcttccgccacgcccaggacctcatcctggagatcatctacactgagcccgtcgacctgtccctgggcaccctgggggagatcagtgggcaccagctcatgagtctgtctactgccgatgccaagaaggaccccagctgcaagacctgcaacatcagcgtgggccgctagggactcctggggagctggggggcgagggagagatgagcggaaggtggaggtgggtagcccaggttcagggagctggctttctctctcctgcccccctgctccctccactctgcccagctgccctcccctcgccccttggcattggaggcaacagacggtggtcctcttggtaagtgtggcccacacccagcctggtggacatggaaaggcttctcagcctctgtagttggcagctgggctggacttctggagaacttcccctttcctctggtttccttgtcctactgttctttgcctcgtccaggtctctatctcccaaagacctgcccacctcctgggctctcccagggaagcccctctgggccaaagcccatgggtagcttggctgcctccagaagagatgcagagagctgtggggcgatctttcttagtcccactcaccccactcagggccaaccacagaatgccccctccctgctgagctgggtctctggggcttcccactccaggcctggatcccttccttctataaatagtctcctgcaccaccgtgactccctggctgctccttgccccaaagaaccctcttcctgcatgggagagctgtccctccttctccacctgcccaccgggacactccccctgctctctagaaaggaactctctttcttctcttggcactgggggcgtcaggctgtcggatgttccttccttccataccccagcataccttctccttgcttagagtgcaggggtctgagacagcagccactggggttgaggagggggaggagacccctgagacccagaggtgccccttcctcagctgggagtgggccgcctcatgctctgctggggcctggcatggaacgtgagacctgtaagctgtcccgcgggccccggcaccccgcccagctgtgcactttgctcactcgctctgccatggtgccatgactgtactgtgcccatgcgtgacctggactgtggaccctctgctgctccgcctctcccctccccactggctctgtctgctctcctgccaccctgctggccgggagcccctccccggggagttcttggtgaagtccttcccgggcctccttgtgtttttgcctcattcctactgtcacacaggtcacgagggtggactccctacaatcaacaaagcaaacagagagcctgtgggaggggctgacagcagcagccggctgtttgggggatgatggaggtgacatcaggcagaggagagtgcagcctcacagtgactttctcagaggtgacagagatgatggatgagcagctggattttcgtgatgaaggacggaagcagcagcgggccggcaaggccatacctcggtgagggacaggtggacaacggtcacctatctgtagccaggggcagttgtgtggccagctgtctctctgggatgagtcaggaggcctggaggcttggggagaggtgtggagaaggagagaacatggcccaggccctttccttccccctgtgctgacagcattgctgtgggggtggcccactgccctcccctggccctcatgtccccccggggctggggtccgcctgcctgtgctgtgcttgcgacgtgcatcaataaaccaccatggcctgagggccctgctcgtctcaaaaaaaaaaaa

SEQ ID NO: 733639 - DNA, 2979 bp, Homo sapiens
agcggcttctctgcctctctctcctccacgctgctttgatttcgctcttgcctctcttcttgcgctgctcagctgggaacatcgtctcaccaggggcagcagcgacgcgctgcacagccagacaggagctggttgcggggcatggaagcagcctccttggcagccgggagaggagcaagcgcacgccactgcccgtgacccaggcgtccggctgctgtcccctgccggggagctcatccacgcagaggtctctccctgtcctccctgcgagcttttcctctgcagagcccagtggagccagtccccacaggagacaaccctgacgggagcatggagctgctgtccacgccccacagcattgagatcaacaacatcacctgcgactccttccgcatctcctgggccatggaggacagtgacctggagagggtcacccattacttcattgaccttaacaagaaggagaataagaattccaacaagttcaagcaccgggacgtccccaccaagctcgtggccaaggcagtgccgctgcccatgacggtgagaggccactggttcctgagcccccgcacggagtacagtgtggccgtgcagacggcagtgaagcagagcgatggggagtacctggtgtccggctggagcgagacggtggagttctgcactggggattatgccaaggagcacctggctcagcttcaggagaaagctgagcagatcgcaggccgcatgctccgcttctccgtcttctaccgcaaccatcacaaggagtacttccagcatgccaggacccactgcgggaacatgctgcagccttacctgaaggacaacagcggcagccacggctcccccaccagcggtatgctccacggggtcttcttcagctgcaacacggagttcaacacgggccagcccccgcaggactccccctacggccgctggcgcttccagatcccagctcagcgcctcttcaatcccagcaccaacctctactttgcggacttctactgcatgtacacggcctaccactacgccatcctggtgctggcgcccaaaggctccctgggggaccgcttctgccgcgaccgcctgcccctcctggacattgcttgcaacaagttcctgacctgcagcgtggaggatggggagctggtcttccgccacgcccaggacctcatcctggagatcatctacactgagcccgtcgacctgtccctgggcaccctgggggagatcagtgggcaccagctcatgagtctgtctactgccgatgccaagaaggaccccagctgcaagacctgcaacatcagcgtgggccgctagggactcctggggagctggggggcgagggagagatgagcggaaggtggaggtgggtagcccaggttcagggagctggctttctctctcctgcccccctgctccctccactctgcccagctgccctcccctcgccccttggcattggaggcaacagacggtggtcctcttggtaagtgtggcccacacccagcctggtggacatggaaaggcttctcagcctctgtagttggcagctgggctggacttctggagaacttcccctttcctctggtttccttgtcctactgttctttgcctcgtccaggtctctatctcccaaagacctgcccacctcctgggctctcccagggaagcccctctgggccaaagcccatgggtagcttggctgcctccagaagagatgcagagagctgtggggcgatctttcttagtcccactcaccccactcagggccaaccacagaatgccccctccctgctgagctgggtctctggggcttcccactccaggcctggatcccttccttctataaatagtctcctgcaccaccgtgactccctggctgctccttgccccaaagaaccctcttcctgcatgggagagctgtccctccttctccacctgcccaccgggacactccccctgctctctagaaaggaactctctttcttctcttggcactgggggcgtcaggctgtcggatgttccttccttccataccccagcataccttctccttgcttagagtgcaggggtctgagacagcagccactggggttgaggagggggaggagacccctgagacccagaggtgccccttcctcagctgggagtgggccgcctcatgctctgctggggcctggcatggaacgtgagacctgtaagctgtcccgcgggccccggcaccccgcccagctgtgcactttgctcactcgctctgccatggtgccatgactgtactgtgcccatgcgtgacctggactgtggaccctctgctgctccgcctctcccctccccactggctctgtctgctctcctgccaccctgctggccgggagcccctccccggggagttcttggtgaagtccttcccgggcctccttgtgtttttgcctcattcctactgtcacacaggtcacgagggtggactccctacaatcaacaaagcaaacagagagcctgtgggaggggctgacagcagcagccggctgtttgggggatgatggaggtgacatcaggcagaggagagtgcagcctcacagtgactttctcagaggtgacagagatgatggatgagcagctggattttcgtgatgaaggacggaagcagcagcgggccggcaaggccatacctcggtgagggacaggtggacaacggtcacctatctgtagccaggggcagttgtgtggccagctgtctctctgggatgagtcaggaggcctggaggcttggggagaggtgtggagaaggagagaacatggcccaggccctttccttccccctgtgctgacagcattgctgtgggggtggcccactgccctcccctggccctcatgtccccccggggctggggtccgcctgcctgtgctgtgcttgcgacgtgcatcaataaaccaccatggcctgagggccctgctcgtctcaaaaaaaaaaaa

SEQ ID NO: 733640 - DNA, 2256 bp, Homo sapiens; identical to SEQ ID NO: 716300

SEQ ID NO: 733641 - DNA, 809 bp, Homo sapiens
ggtccatcaactccctgcgcagcgagcacaccaacggcacggcgctgcatcccgacgcctctccggcggtggccggcagcccggccgtgtcccgcgggggcttcgtgctcgtggcccacagtgactccgagatcctcaagagcaagaagaaggggctgtttcggcgctcgctgctgagtgggctgaagctgcgcaagtcggagtccaagagcagcctggccagccaacgcagcaagcagagctcctttcgcagcgaggcgggcatgagcaccgtcagctccacggccagcgacatccactccaccatcagcctgggcgaggctgaggccgagctggcggtcatcgaggacgacatcgacgccaccaccaccgagacctacgtgggcgagtggaagaacgacaaacgctccggcttcggcgtgagccagcgctcggacgggctcaagtacgagggcgagtgggccagcaaccggcgccatggctacggctgcatgaccttcccggacggcaccaaggaggagggcaagtacaagcagaacatcctcgtcggcggcaagcgcaagaacctcatccccctgcgggccagcaagatccgcgagaaggtgggaccgcgccgttgagggcgctgagcggggcgcaccatcgccaagcagaaggtgagatcgcggttccaggactcccactctcggggcaaagggccgaggaggcctcacaaggagtccagaaaagccccgagggagggcgcgggattcgcagggatcactggcaaaagaagtcttcccttccttccagacggggaaacgggtggg

SEQ ID NO: 733642 - DNA, 3297 bp, Homo sapiens
tggaggggggaggtttttgttgaggagagcgcggccggagagcagagctccgggacccaggtgaccgggaaagcaggcagccccagcggcgggagcagccggcagcagcccaggcccggggactggggtgggggtgggaggggggatgaggggaggacctgaaggggggcggcagggcaaaagggacccctggagccctgccgccatcagagatcaagcatctggcatcagggatcttcggacccagcagaaggatccgccacaggggaggtgtcctcccagggaagccaacgagagattcacctgccccacatcaggagtgggccccccttactgacgctgctggcaaccatagcaggccccttaacccctcagtctcctccccatcaccctcctcaggccctttccccgcctccagctctcatctcaactcccagttcccagccctctaagccctagcacccccggctaccacctaaccctccaggtcttggccatactcacccccatcctgggacatttgccagatctctgggagggagatcgtttgtttaggcgatgccccctggtggcatgacagcgtctgcctagacccctgacccctagcactcaactccctgggcctcctttgtgtgaagagccgcccctctgcttagcagcgtggttgggggccaaagggaaagccagccccagctgggcccccgggccccaccacttatctccttgctgggcagctccccttggcctttgggcctctccctgctcccctcggcccctcctcctgggccgcctcaatgaaggagccggatgccatcaagctgtttgtggggcagatcccgaggcatctggaggagaaggacctgaagcccatcttcgaacagtttggtcggatctttgagctgactgtcatcaaggacaagtacaccgggctgcacaagggatgtgccttcctgacatactgtgcccgggattcagccctgaaggcccagagcgccctgcacgaacagaagacgcttccagggatgaacaggccgatccaggtcaagccagccgacagcgagagccgaggagaagaccggaagctctttgtggggatgctagggaagcagcagacagatgaggacgtccggaagatgtttgagcccttcgggaccatcgacgagtgcactgtgctccgggggccagatggcaccagcaaaggctgcgccttcgtgaagttccagacccacgctgaggcccaggcggccatcaacacccttcacagcagccggaccctgccaggtgcctcgtccagcctggtggtgaagtttgctgacactgagaaggagcgaggtctccgccgcatgcagcaggtggccacccagttgggcatgttcagccccatcgccctccagtttggagcctacagcgcctacacccaggccctgatgcagcagcaggcggccctggtagcggctcacagtgcctacctcagccccatggccaccatggctgccgtgcagatgcagcacatggctgccatcaatgccaatggcctcatcgccacccccatcaccccatcctcaggaaccagcacccctcctgccatcgctgccacgcctgtctctgccattccggctgccctgggcgtcaacggctacagcccggtgcccacccagcccactgggcagcctgcccctgatgctctgtatcccaacggggttcacccctacccagcccagagccccgcggcccccgtggaccccctgcagcaggcctacgcggggatgcagcactacacagcagcctacccagcagcctacagcctggttgcacctgcgttcccgcagcctccagccctggtcgcccagcagcccccaccaccacctcaacagcagcagcagcagcagcagcagcaacagcagcagcagcaaagagaaggccctgatggctgcaacatcttcatctaccacctgccccaggagttcactgactcagagatcctccagatgtttgtcccctttggccacgtcatctcagccaaagtctttgttgaccgagccaccaatcaaagcaaatgttttggctttgtgagtttcgacaatccggccagtgcccaggctgccatccaggccatgaatggcttccagatcggcatgaagcgcctcaaagtccagctaaagcggcctaaggatgccaaccggccctactgagggcccccaggtctggagatcccagaggaaggggcgcctcacaccctcttcccacgactggccccggccctctccgcacacctgccctgggccttgactgggttctggggcaaacgctgcttcgtggcccccgggggcacaagacaccggcccctcccacccccctgcctctctgaagggccatggctatgcttccctggctccaagggcccatttcctcctagatgcccttttggcctttgtgagggagcgaggaacaggctcgaaggctccggggtatctgccttctgctgggctcctgtgacaggccttctgtgcccagcgtttgtacttgcctcccccaacagtgggcctgttctacccgtgcaggccccaggagagccgcaggggcctgccacacactcccagctcaccctcaccccagcctcttccccacattaggggtttcttggaagctggctctcactcccctccaccctcagctagaggtaggatatccctgattcctgggctcccagccctaaaactcactgcctcccccaagggccccctctaaggagggtgtgggggagccctgagggctgcctctctgccagtcagccacagagaccctcctcctttcacgaggaaaagaccttcccctgaacccctaaaaatgtttacagtctctgctggttccctctgtgtaaataccactaccacccgtgcgttatccagcccgcccggcctggcccggacgctgccatctctctttctgggagtttagacaatgttgcccttggatttttttctctctcttaatttctccctttgctttggggggtaattgggtattgggaggaggggtgtggggaggggtcaaggggtttattacctgatcattttctttaggaagaggttttagggaaaagaaaatggggtgggggtgggggtggtaaggggagaccggggagtcagtttcagacagttctctatgcttaacttatttatttattgcattttacttttaaagagttggtcttttctgtctaaataaagaaaaaagtttaaaagcatcaaataagagtcttggaaggttgagggtaggggattgttccctacccac

SEQ ID NO: 733643 - DNA, 3249 bp, Homo sapiens
tggaggggggaggtttttgttgaggagagcgcggccggagagcagagctccgggacccaggtgaccgggaaagcaggcagccccagcggcgggagcagccggcagcagcccaggcccggggactggggtgggggtgggaggggggatgaggggaggacctgaaggggggcggcagggcaaaagggacccctggagccctgccgccatcagagatcaagcatctggcatcagggatcttcggacccagcagaaggatccgccacaggggaggtgtcctcccagggaagccaacgagagattcacctgccccacatcaggagtgggccccccttactgacgctgctggcaaccatagcaggccccttaacccctcagtctcctccccatcaccctcctcaggccctttccccgcctccagctctcatctcaactcccagttcccagccctctaagccctagcacccccggctaccacctaaccctccaggtcttggccatactcacccccatcctgggacatttgccagatctctgggagggagatcgtttgtttaggcgatgccccctggtggcatgacagcgtctgcctagacccctgacccctagcactcaactccctgggcctcctttgtgtgaagagccgcccctctgcttagcagcgtggttgggggccaaagggaaagccagccccagctgggcccccgggccccaccacttatctccttgctgggcagctccccttggcctttgggcctctccctgctcccctcggcccctcctcctgggccgcctcaatgaaggagccggatgccatcaagctgtttgtggggcagatcccgaggcatctggaggagaaggacctgaagcccatcttcgaacagtttggtcggatctttgagctgactgtcatcaaggacaagtacaccgggctgcacaagggatgtgccttcctgacatactgtgcccgggattcagccctgaaggcccagagcgccctgcacgaacagaagacgcttccagggatgaacaggccgatccaggtcaagccagccgacagcgagagccgaggagaagaccggaagctctttgtggggatgctagggaagcagcagacagatgaggacgtccggaagatgtttgagcccttcgggaccatcgacgagtgcactgtgctccgggggccagatggcaccagcaaaggctgcgccttcgtgaagttccagacccacgctgaggcccaggcggccatcaacacccttcacagcagccggaccctgccaggtgcctcgtccagcctggtggtgaagtttgctgacactgagaaggagcgaggtctccgccgcatgcagcaggtggccacccagttgggcatgttcagccccatcgccctccagtttggagcctacagcgcctacacccaggccctgatgcagcagcaggcggccctggtagcggctcacagtgcctacctcagccccatggccaccatggctgccgtgcagatgcagcacatggctgccatcaatgccaatggcctcatcgccacccccatcaccccatcctcaggaaccagcacccctcctgccatcgctgccacgcctgtctctgccattccggctgccctgggcgtcaacggctacagcccggtgcccacccagcccactgggcagcctgcccctgatgctctgtatcccaacggggttcacccctacccagcccagagccccgcggcccccgtggaccccctgcagcaggcctacgcggggatgcagcactacacagcagcctacccagcagcctacagcctggttgcacctgcgttcccgcagcctccagccctggtcgcccagcagcccccaccaccacctcaacagcagcagcagcagcagcagcagcaacagcagcagcagcaaagagaaggccctgatggctgcaacatcttcatctaccacctgccccaggagttcactgactcagagatcctccagatgtttgtcccctttggccacgtcatctcagccaaagtctttgttgaccgagccaccaatcaaagcaaatgttttggctttgtgagtttcgacaatccggccagtgcccaggctgccatccaggccatgaatggcttccagatcggcatgaagcgcctcaaagtccagctaaagcggcctaaggatgccaaccggccctactgagggcccccaggtctggagatcccagaggaaggggcgcctcacaccctcttcccacgactggccccggccctctccgcacacctgccctgggccttgactgggttctggggcaaacgctgcttcgtggcccccgggggcacaagacaccggcccctcccacccccctgcctctctgaagggccatggctatgcttccctggctccaagggcccatttcctcctagatgcccttttggcctttgtgagggagcgaggaacaggctcgaaggctccggggtatctgccttctgctgggctcctgtgacaggccttctgtgcccagcgtttgtacttgcctcccccaacagtgggcctgttctacccgtgcaggccccaggagagccgcaggggcctgccacacactcccagctcaccctcaccccagcctcttccccacattaggggtttcttggaagctggctctcactcccctccaccctcagctagaggtaggatatccctgattcctgggctcccagccctaaaactcactgcctcccccaagggccccctctaaggagggtgtgggggagccctgagggctgcctctctgccagtcagccacagagaccctcctcctttcacgaggaaaagaccttcccctgaacccctaaaaatgtttacagtctctgctggttccctctgtgtaaataccactaccacccgtgcgttatccagcccgcccggcctggcccggacgctgccatctctctttctgggagtttagacaatgttgcccttggatttttttctctctcttaatttctccctttgctttggggggtaattgggtattgggaggaggggtgtggggaggggtcaaggggtttattacctgatcattttctttaggaagaggttttagggaaaagaaaatggggtgggggtgggggtggtaaggggagaccggggagtcagtttcagacagttctctatgcttaacttatttatttattgcattttacttttaaagagttggtcttttctgtctaaataaagaaaaaagtttaaaagcatc

SEQ ID NO: 733644 - DNA, 2455 bp, Homo sapiens
tggaggggggaggtttttgttgaggagagcgcggccggagagcagagctccgggacccaggtgaccgggaaagcaggcagccccagcggcgggagcagccggcagcagcccaggcccggggactggggtgggggtgggaggggggatgaggggaggacctgaaggggggcggcagggcaaaagggacccctggagccctgccgccatcagagatcaagcatctggcatcagggatcttcggacccagcagaaggatccgccacaggggaggtgtcctcccagggaagccaacgagagattcacctgccccacatcaggagtgggccccccttactgacgctgctggcaaccatagcaggccccttaacccctcagtctcctccccatcaccctcctcaggccctttccccgcctccagctctcatctcaactcccagttcccagccctctaagccctagcacccccggctaccacctaaccctccaggtcttggccatactcacccccatcctgggacatttgccagatctctgggagggagatcgtttgtttaggcgatgccccctggtggcatgacagcgtctgcctagacccctgacccctagcactcaactccctgggcctcctttgtgtgaagagccgcccctctgcttagcagcgtggttgggggccaaagggaaagccagccccagctgggcccccgggccccaccacttatctccttgctgggcagctccccttggcctttgggcctctccctgctcccctcggcccctcctcctgggccgcctcaatgaaggagccggatgccatcaagctgtttgtggggcagatcccgaggcatctggaggagaaggacctgaagcccatcttcgaacagtttggtcggatctttgagctgactgtcatcaaggacaagtacaccgggctgcacaagggatgtgccttcctgacatactgtgcccgggattcagccctgaaggcccagagcgccctgcacgaacagaagacgcttccagggatgaacaggccgatccaggtcaagccagccgacagcgagagccgaggagaagaccggaagctctttgtggggatgctagggaagcagcagacagatgaggacgtccggaagatgtttgagcccttcgggaccatcgacgagtgcactgtgctccgggggccagatggcaccagcaaaggctgcgccttcgtgaagttccagacccacgctgaggcccaggcggccatcaacacccttcacagcagccggaccctgccaggtgcctcgtccagcctggtggtgaagtttgctgacactgagaaggagcgaggtctccgccgcatgcagcaggtggccacccagttgggcatgttcagccccatcgccctccagtttggagcctacagcgcctacacccaggccctgatgcagcagcaggcggccctggtagcggctcacagtgcctacctcagccccatggccaccatggctgccgtgcagatgcagcacatggctgccatcaatgccaatggcctcatcgccacccccatcaccccatcctcagctctctgaagggccatggctatgcttccctggctccaagggcccatttcctcctagatgcccttttggcctttgtgagggagcgaggaacaggctcgaaggctccggggtatctgccttctgctgggctcctgtgacaggccttctgtgcccagcgtttgtacttgcctcccccaacagtgggcctgttctacccgtgcaggccccaggagagccgcaggggcctgccacacactcccagctcaccctcaccccagcctcttccccacattaggggtttcttggaagctggctctcactcccctccaccctcagctagaggtaggatatccctgattcctgggctcccagccctaaaactcactgcctcccccaagggccccctctaaggagggtgtgggggagccctgagggctgcctctctgccagtcagccacagagaccctcctcctttcacgaggaaaagaccttcccctgaacccctaaaaatgtttacagtctctgctggttccctctgtgtaaataccactaccacccgtgcgttatccagcccgcccggcctggcccggacgctgccatctctctttctgggagtttagacaatgttgcccttggatttttttctctctcttaatttctccctttgctttggggggtaattgggtattgggaggaggggtgtggggaggggtcaaggggtttattacctgatcattttctttaggaagaggttttagggaaaagaaaatggggtgggggtgggggtggtaaggggagaccggggagtcagtttcagacagttctctatgcttaacttatttatttattgcattttacttttaaagagttggtcttttctgtctaaataaagaaaaaagtttaaaagcatc

SEQ ID NO: 733645 - DNA, 2503 bp, Homo sapiens
tggaggggggaggtttttgttgaggagagcgcggccggagagcagagctccgggacccaggtgaccgggaaagcaggcagccccagcggcgggagcagccggcagcagcccaggcccggggactggggtgggggtgggaggggggatgaggggaggacctgaaggggggcggcagggcaaaagggacccctggagccctgccgccatcagagatcaagcatctggcatcagggatcttcggacccagcagaaggatccgccacaggggaggtgtcctcccagggaagccaacgagagattcacctgccccacatcaggagtgggccccccttactgacgctgctggcaaccatagcaggccccttaacccctcagtctcctccccatcaccctcctcaggccctttccccgcctccagctctcatctcaactcccagttcccagccctctaagccctagcacccccggctaccacctaaccctccaggtcttggccatactcacccccatcctgggacatttgccagatctctgggagggagatcgtttgtttaggcgatgccccctggtggcatgacagcgtctgcctagacccctgacccctagcactcaactccctgggcctcctttgtgtgaagagccgcccctctgcttagcagcgtggttgggggccaaagggaaagccagccccagctgggcccccgggccccaccacttatctccttgctgggcagctccccttggcctttgggcctctccctgctcccctcggcccctcctcctgggccgcctcaatgaaggagccggatgccatcaagctgtttgtggggcagatcccgaggcatctggaggagaaggacctgaagcccatcttcgaacagtttggtcggatctttgagctgactgtcatcaaggacaagtacaccgggctgcacaagggatgtgccttcctgacatactgtgcccgggattcagccctgaaggcccagagcgccctgcacgaacagaagacgcttccagggatgaacaggccgatccaggtcaagccagccgacagcgagagccgaggagaagaccggaagctctttgtggggatgctagggaagcagcagacagatgaggacgtccggaagatgtttgagcccttcgggaccatcgacgagtgcactgtgctccgggggccagatggcaccagcaaaggctgcgccttcgtgaagttccagacccacgctgaggcccaggcggccatcaacacccttcacagcagccggaccctgccaggtgcctcgtccagcctggtggtgaagtttgctgacactgagaaggagcgaggtctccgccgcatgcagcaggtggccacccagttgggcatgttcagccccatcgccctccagtttggagcctacagcgcctacacccaggccctgatgcagcagcaggcggccctggtagcggctcacagtgcctacctcagccccatggccaccatggctgccgtgcagatgcagcacatggctgccatcaatgccaatggcctcatcgccacccccatcaccccatcctcagctctctgaagggccatggctatgcttccctggctccaagggcccatttcctcctagatgcccttttggcctttgtgagggagcgaggaacaggctcgaaggctccggggtatctgccttctgctgggctcctgtgacaggccttctgtgcccagcgtttgtacttgcctcccccaacagtgggcctgttctacccgtgcaggccccaggagagccgcaggggcctgccacacactcccagctcaccctcaccccagcctcttccccacattaggggtttcttggaagctggctctcactcccctccaccctcagctagaggtaggatatccctgattcctgggctcccagccctaaaactcactgcctcccccaagggccccctctaaggagggtgtgggggagccctgagggctgcctctctgccagtcagccacagagaccctcctcctttcacgaggaaaagaccttcccctgaacccctaaaaatgtttacagtctctgctggttccctctgtgtaaataccactaccacccgtgcgttatccagcccgcccggcctggcccggacgctgccatctctctttctgggagtttagacaatgttgcccttggatttttttctctctcttaatttctccctttgctttggggggtaattgggtattgggaggaggggtgtggggaggggtcaaggggtttattacctgatcattttctttaggaagaggttttagggaaaagaaaatggggtgggggtgggggtggtaaggggagaccggggagtcagtttcagacagttctctatgcttaacttatttatttattgcattttacttttaaagagttggtcttttctgtctaaataaagaaaaaagtttaaaagcatcaaataagagtcttggaaggttgagggtaggggattgttccctacccac

SEQ ID NO: 733646 - DNA, 2889 bp, Homo sapiens
tggaggggggaggtttttgttgaggagagcgcggccggagagcagagctccgggacccaggtgaccgggaaagcaggcagccccagcggcgggagcagccggcagcagcccaggcccggggactggggtgggggtgggaggggggatgaggggaggacctgaaggggggcggcagggcaaaagggacccctggagccctgccgccatcagagatcaagcatctggcatcagggatcttcggacccagcagaaggatccgccacaggggaggtgtcctcccagggaagccaacgagagattcacctgccccacatcaggagtgggccccccttactgacgctgctggcaaccatagcaggccccttaacccctcagtctcctccccatcaccctcctcaggccctttccccgcctccagctctcatctcaactcccagttcccagccctctaagccctagcacccccggctaccacctaaccctccaggtcttggccatactcacccccatcctgggacatttgccagatctctgggagggagatcgtttgtttaggcgatgccccctggtggcatgacagcgtctgcctagacccctgacccctagcactcaactccctgggcctcctttgtgtgaagagccgcccctctgcttagcagcgtggttgggggccaaagggaaagccagccccagctgggcccccgggccccaccacttatctccttgctgggcagctccccttggcctttgggcctctccctgctcccctcggcccctcctcctgggccgcctcaatgaaggagccggatgccatcaagctgtttgtggggcagatcccgaggcatctggaggagaaggacctgaagcccatcttcgaacagtttggtcggatctttgagctgactgtcatcaaggacaagtacaccgggctgcacaagggatgtgccttcctgacatactgtgcccgggattcagccctgaaggcccagagcgccctgcacgaacagaagacgcttccagggatgaacaggccgatccaggtcaagccagccgacagcgagagccgaggagaagaccggaagctctttgtggggatgctagggaagcagcagacagatgaggacgtccggaagatgtttgagcccttcgggaccatcgacgagtgcactgtgctccgggggccagatggcaccagcaaaggctgcgccttcgtgaagttccagacccacgctgaggcccaggcggccatcaacacccttcacagcagccggaccctgccaggtgcctcgtccagcctggtggtgaagtttgctgacactgagaaggagcgaggtctccgccgcatgcagcaggtggccacccagttgggcatgttcagccccatcgccctccagtttggagcctacagcgcctacacccaggccctgatgcagcagcaggcggccctggtagcggctcacagtgcctacctcagccccatggccaccatggctgccgtgcagatgcagcacatggctgccatcaatgccaatggcctcatcgccacccccatcaccccatcctcaggaaccagcacccctcctgccatcgctgccacgcctgtctctgccattccggctgccctgggcgtcaacggctacagcccggtgcccacccagcccactgggcagcctgcccctgatgctctgtatcccaacggggttcacccctacccagcccagagccccgcggcccccgtggaccccctgcagcaggcctacgcggggatgcagcactacacagcagcctacccagcagcctacagcctggttgcacctgcgttcccgcagcctccagccctggtcgcccagcagcccccaccaccacctcaacagcagcagcagcagcagcagcagcaacagcagcagcagcaaagagaaggccctgatggctgcaacatcttcatctaccacctgccccaggagttcactgactcagagatcctccagatgtttgtcccctttggccacgtcatctcagccaaagtctttgttgaccgagccaccaatcaaagcaaatgttttggctttgtgagtttcgacaatccggccagtgcccaggctgccatccaggccatgaatggcttccagatcggcatgaagcgcctcaaagtccagctaaagcggcctaaggatgccaaccggccctactgagggcccccaggtctggagatcccagaggaaggggcgcctcacaccctcttcccacgactggccccggccctctccgcacacctgccctgggccttgactgggttctggggcaaacgctgcttcgtggcccccgggggcacaagacaccggcccctcccacccccctgcctctctgaagggccatggctatgcttccctggctccaagggcccatttcctcctagatgcccttttggcctttgtgagggagcgaggaacaggctcgaaggctccggggtatctgccttctgctgggctcctgtgacaggccttctgtgcccagcgtttgtacttgcctcccccaacagtgggcctgttctacccgtgcaggccccaggagagccgcaggggcctgccacacactcccagctcaccctcaccccagcctcttccccacattaggggtttcttggaagctggctctcactcccctccaccctcagctagaggtaggatatccctgattcctgggctcccagccctaaaactcactgcctcccccaagggccccctctaaggagggtgtgggggagccctgagggctgcctctctgccaagtttcagacagttctctatgcttaacttatttatttattgcattttacttttaaagagttggtcttttctgtctaaataaagaaaaaagtttaaaagcatc

SEQ ID NO: 733647 - DNA, 318 bp, Homo sapiens
cttccccacattaggggtttcttggaagctggctctcactcccctccaccctcagctagaggtaggatatccctgattcctgggctcccagccctaaaactcactgcctcccccaagggccccctctaaggagggtgtgggggagccctgagggctgcctctctgccaagtttcagacagttctctatgcttaacttatttatttattgcattttacttttaaagagttggtcttttctgtctaaataaagaaaaaagtttaaaagcatcaaataagagtcttggaaggttgagggtaggggattgttccctacccac

SEQ ID NO: 733648 - DNA, 2524 bp, Homo sapiens; identical to SEQ ID NO: 318327

SEQ ID NO: 733649 - DNA, 2476 bp, Homo sapiens
tggaggggggaggtttttgttgaggagagcgcggccggagagcagagctccgggacccagatcccgaggcatctggaggagaaggacctgaagcccatcttcgaacagtttggtcggatctttgagctgactgtcatcaaggacaagtacaccgggctgcacaagggatgtgccttcctgacatactgtgcccgggattcagccctgaaggcccagagcgccctgcacgaacagaagacgcttccagggatgaacaggccgatccaggtcaagccagccgacagcgagagccgaggagaagaccggaagctctttgtggggatgctagggaagcagcagacagatgaggacgtccggaagatgtttgagcccttcgggaccatcgacgagtgcactgtgctccgggggccagatggcaccagcaaaggctgcgccttcgtgaagttccagacccacgctgaggcccaggcggccatcaacacccttcacagcagccggaccctgccaggtgcctcgtccagcctggtggtgaagtttgctgacactgagaaggagcgaggtctccgccgcatgcagcaggtggccacccagttgggcatgttcagccccatcgccctccagtttggagcctacagcgcctacacccaggccctgatgcagcagcaggcggccctggtagcggctcacagtgcctacctcagccccatggccaccatggctgccgtgcagatgcagcacatggctgccatcaatgccaatggcctcatcgccacccccatcaccccatcctcaggaaccagcacccctcctgccatcgctgccacgcctgtctctgccattccggctgccctgggcgtcaacggctacagcccggtgcccacccagcccactgggcagcctgcccctgatgctctgtatcccaacggggttcacccctacccagcccagagccccgcggcccccgtggaccccctgcagcaggcctacgcggggatgcagcactacacagcagcctacccagcagcctacagcctggttgcacctgcgttcccgcagcctccagccctggtcgcccagcagcccccaccaccacctcaacagcagcagcagcagcagcagcagcaacagcagcagcagcaaagagaaggccctgatggctgcaacatcttcatctaccacctgccccaggagttcactgactcagagatcctccagatgtttgtcccctttggccacgtcatctcagccaaagtctttgttgaccgagccaccaatcaaagcaaatgttttggctttgtgagtttcgacaatccggccagtgcccaggctgccatccaggccatgaatggcttccagatcggcatgaagcgcctcaaagtccagctaaagcggcctaaggatgccaaccggccctactgagggcccccaggtctggagatcccagaggaaggggcgcctcacaccctcttcccacgactggccccggccctctccgcacacctgccctgggccttgactgggttctggggcaaacgctgcttcgtggcccccgggggcacaagacaccggcccctcccacccccctgcctctctgaagggccatggctatgcttccctggctccaagggcccatttcctcctagatgcccttttggcctttgtgagggagcgaggaacaggctcgaaggctccggggtatctgccttctgctgggctcctgtgacaggccttctgtgcccagcgtttgtacttgcctcccccaacagtgggcctgttctacccgtgcaggccccaggagagccgcaggggcctgccacacactcccagctcaccctcaccccagcctcttccccacattaggggtttcttggaagctggctctcactcccctccaccctcagctagaggtaggatatccctgattcctgggctcccagccctaaaactcactgcctcccccaagggccccctctaaggagggtgtgggggagccctgagggctgcctctctgccagtcagccacagagaccctcctcctttcacgaggaaaagaccttcccctgaacccctaaaaatgtttacagtctctgctggttccctctgtgtaaataccactaccacccgtgcgttatccagcccgcccggcctggcccggacgctgccatctctctttctgggagtttagacaatgttgcccttggatttttttctctctcttaatttctccctttgctttggggggtaattgggtattgggaggaggggtgtggggaggggtcaaggggtttattacctgatcattttctttaggaagaggttttagggaaaagaaaatggggtgggggtgggggtggtaaggggagaccggggagtcagtttcagacagttctctatgcttaacttatttatttattgcattttacttttaaagagttggtcttttctgtctaaataaagaaaaaagtttaaaagcatc

SEQ ID NO: 733650 - DNA, 1927 bp, Homo sapiens
tggaggggggaggtttttgttgaggagagcgcggccggagagcagagctccgggacccaggtgaccgggaaagcaggcagccccagcggcgggagcagccggcagcagcccaggcccggggactggggtgggggtgggaggggggatgaggggaggacctgaaggggggcggcagggcaaaagggacccctggagccctgccgccatcagagatcaagcatctggcatcagggatcttcggacccagcagaaggatccgccacaggggaggtgtcctcccagggaagccaacgagagattcacctgccccacatcaggagtgggccccccttactgacgctgctggcaaccatagcaggccccttaacccctcagtctcctccccatcaccctcctcaggccctttccccgcctccagctctcatctcaactcccagttcccagccctctaagccctagcacccccggctaccacctaaccctccaggtcttggccatactcacccccatcctgggacatttgccagatctctgggagggagatcgtttgtttaggcgatgccccctggtggcatgacagcgtctgcctagacccctgacccctagcactcaactccctgggcctcctttgtgtgaagagccgcccctctgcttagcagcgtggttgggggccaaagggaaagccagccccagctgggcccccgggccccaccacttatctccttgctgggcagctccccttggcctttgggcctctccctgctcccctcggcccctcctcctgggccgcctcaatgaaggagccggatgccatcaagctgtttgtggggcagatcccgaggcatctggaggagaaggacctgaagcccatcttcgaacagtttggtcggatctttgagctgactgtcatcaaggacaagtacaccgggctgcacaagggatgtgccttcctgacatactgtgcccgggattcagccctgaaggcccagagcgccctgcacgaacagaagacgcttccagggatgaacaggccgatccaggtcaagccagccgacagcgagagccgaggagaagaccggaagctctttgtggggatgctagggaagcagcagacagatgaggacgtccggaagatgtttgagcccttcgggaccatcgacgagtgcactgtgctccgggggccagatggcaccagcaaaggctgcgccttcgtgaagttccagacccacgctgaggcccaggcggccatcaacacccttcacagcagccggaccctgccaggtgcctcgtccagcctggtggtgaagtttgctgacactgagaaggagcgaggtctccgccgcatgcagcaggtggccacccagttgggcatgttcagccccatcgccctccagtttggagcctacagcgcctacacccaggccctgatgcagcagcaggcggccctggtagcggctcacagtgcctacctcagccccatggccaccatggctgccgtgcagatgcagcacatggctgccatcaatgccaatggcctcatcgccacccccatcaccccatcctcagctctctgaagggccatggctatgcttccctggctccaagggcccatttcctcctagatgcccttttggcctttgtgagggagcgaggaacaggctcgaaggctccggggtatctgccttctgctgggctcctgtgacaggccttctgtgcccagcgtttgtacttgcctcccccaacagtgggcctgttctacccgtgcaggccccaggagagccgcaggggcctgccacacactcccagctcaccctcaccccagcctagtttcagacagttctctatgcttaacttatttatttattgcattttacttttaaagagttggtcttttctgtctaaataaagaaaaaagtttaaaagcatc

SEQ ID NO: 733651 - DNA, 1359 bp, Homo sapiens; identical to SEQ ID NO: 318330

SEQ ID NO: 733652 - DNA, 1311 bp, Homo sapiens
tctcatgggctatctatttccttcctaataccgtttggtttcctgtatggtttgccccctccctcctgtctcctctatccctgctctcatggctgggggtgggggcagatgggtccgtttggactgaggcctgatgatctgccttcctcaggcagccccatcctagatgctgtcactcaccccagccccctcccctcccccagagcccgtgatccgcatcgggggtctcttccccatgcttcacccatgtttcttccttcacaggtctggagatcccagaggaaggggcgcctcacaccctcttcccacgactggccccggccctctccgcacacctgccctgggccttgactgggttctggggcaaacgctgcttcgtggcccccgggggcacaagacaccggcccctcccacccccctgcctctctgaagggccatggctatgcttccctggctccaagggcccatttcctcctagatgcccttttggcctttgtgagggagcgaggaacaggctcgaaggctccggggtatctgccttctgctgggctcctgtgacaggccttctgtgcccagcgtttgtacttgcctcccccaacagtgggcctgttctacccgtgcaggccccaggagagccgcaggggcctgccacacactcccagctcaccctcaccccagcctcttccccacattaggggtttcttggaagctggctctcactcccctccaccctcagctagaggtaggatatccctgattcctgggctcccagccctaaaactcactgcctcccccaagggccccctctaaggagggtgtgggggagccctgagggctgcctctctgccagtcagccacagagaccctcctcctttcacgaggaaaagaccttcccctgaacccctaaaaatgtttacagtctctgctggttccctctgtgtaaataccactaccacccgtgcgttatccagcccgcccggcctggcccggacgctgccatctctctttctgggagtttagacaatgttgcccttggatttttttctctctcttaatttctccctttgctttggggggtaattgggtattgggaggaggggtgtggggaggggtcaaggggtttattacctgatcattttctttaggaagaggttttagggaaaagaaaatggggtgggggtgggggtggtaaggggagaccggggagtcagtttcagacagttctctatgcttaacttatttatttattgcattttacttttaaagagttggtcttttctgtctaaataaagaaaaaagtttaaaagcatc

SEQ ID NO: 733653 - DNA, 2116 bp, Homo sapiens
tggaggggggaggtttttgttgaggagagcgcggccggagagcagagctccgggacccagatcccgaggcatctggaggagaaggacctgaagcccatcttcgaacagtttggtcggatctttgagctgactgtcatcaaggacaagtacaccgggctgcacaagggatgtgccttcctgacatactgtgcccgggattcagccctgaaggcccagagcgccctgcacgaacagaagacgcttccagggatgaacaggccgatccaggtcaagccagccgacagcgagagccgaggagaagaccggaagctctttgtggggatgctagggaagcagcagacagatgaggacgtccggaagatgtttgagcccttcgggaccatcgacgagtgcactgtgctccgggggccagatggcaccagcaaaggctgcgccttcgtgaagttccagacccacgctgaggcccaggcggccatcaacacccttcacagcagccggaccctgccaggtgcctcgtccagcctggtggtgaagtttgctgacactgagaaggagcgaggtctccgccgcatgcagcaggtggccacccagttgggcatgttcagccccatcgccctccagtttggagcctacagcgcctacacccaggccctgatgcagcagcaggcggccctggtagcggctcacagtgcctacctcagccccatggccaccatggctgccgtgcagatgcagcacatggctgccatcaatgccaatggcctcatcgccacccccatcaccccatcctcaggaaccagcacccctcctgccatcgctgccacgcctgtctctgccattccggctgccctgggcgtcaacggctacagcccggtgcccacccagcccactgggcagcctgcccctgatgctctgtatcccaacggggttcacccctacccagcccagagccccgcggcccccgtggaccccctgcagcaggcctacgcggggatgcagcactacacagcagcctacccagcagcctacagcctggttgcacctgcgttcccgcagcctccagccctggtcgcccagcagcccccaccaccacctcaacagcagcagcagcagcagcagcagcaacagcagcagcagcaaagagaaggccctgatggctgcaacatcttcatctaccacctgccccaggagttcactgactcagagatcctccagatgtttgtcccctttggccacgtcatctcagccaaagtctttgttgaccgagccaccaatcaaagcaaatgttttggctttgtgagtttcgacaatccggccagtgcccaggctgccatccaggccatgaatggcttccagatcggcatgaagcgcctcaaagtccagctaaagcggcctaaggatgccaaccggccctactgagggcccccaggtctggagatcccagaggaaggggcgcctcacaccctcttcccacgactggccccggccctctccgcacacctgccctgggccttgactgggttctggggcaaacgctgcttcgtggcccccgggggcacaagacaccggcccctcccacccccctgcctctctgaagggccatggctatgcttccctggctccaagggcccatttcctcctagatgcccttttggcctttgtgagggagcgaggaacaggctcgaaggctccggggtatctgccttctgctgggctcctgtgacaggccttctgtgcccagcgtttgtacttgcctcccccaacagtgggcctgttctacccgtgcaggccccaggagagccgcaggggcctgccacacactcccagctcaccctcaccccagcctcttccccacattaggggtttcttggaagctggctctcactcccctccaccctcagctagaggtaggatatccctgattcctgggctcccagccctaaaactcactgcctcccccaagggccccctctaaggagggtgtgggggagccctgagggctgcctctctgccaagtttcagacagttctctatgcttaacttatttatttattgcattttacttttaaagagttggtcttttctgtctaaataaagaaaaaagtttaaaagcatc

SEQ ID NO: 733654 - DNA, 206 bp, Homo sapiens
ccaggtcaagccagccgacagcgagagccgaggaggtaggttctgtgcctttggactctgtccctctcctcccaccccagcccagggcctggagttgtcgaggggtagcctttcttgagggagaaagcctgatgattctgaagagttcccagctgcggtgagataggagtcagtgtggccagagcgggtgagatctggggcgggta

SEQ ID NO: 733655 - DNA, 877 bp, Homo sapiens
ggggtacaggtgcttcctcctgccctgccatcctgggcggggatgatccttcctgttgggctcggccaggaagctgaggtgtagagcagtgaagcgacctgtccagggttgcaagacagtcagacccaagtcttcctaacgctgggctctttcccctcttcccactgctttgtgcatttctgccttctcacttcacaccccatgcccagagaagctctgctccccacctgcctggcctcggcccagaggcccagagaggcactgagggcccccactgtgtgccaggtccacgctcatagtctgtgctgctctccccagcccagagccccgcggcccccgtggaccccctgcagcaggcctacgcggggatgcagcactacacaggtgaggcgccctagccagggcccctgctcaggtgggagaggtggcaggaggaaaagaggcccagtaactgggtctgggcttcttggctccctgccaatcaccctcttcaggctttactgacaagcccaactgtggggaggggtctttaagggcagcacacccaggggtctgaggcagctccttccctgaccacctctcagccctgcaggtgccactggcctgggctaggggaagggagacagggttggctgggagggctcaagaagtcagggaagccccatcagcctctctcttctccccaccccagcagcctacccagcagcctacagcctggttgcacctgcgttcccgcagcctccagccctggtcgcccagcagcccccaccaccacctcaacagcagcagcagcagcagcagcagcaacagcagcagcagcaaagagaaggtgctggctggggccttgggagacaggaatgccctcgttatgggcttg

SEQ ID NO: 733656 - DNA, 627 bp, Homo sapiens
ctcctttcctgatctctctgttaagctgcctggctcatttgatatcacatccaaattatcagctgattgctctattgttttggacaatgccctgaagcataccaaaatgtgtctggaattggtgggttcttggtcttactgactttaagaatgaagttgcggacttttgcgtaagaagaaagcccaaagacaaaaccagaggcaactggctgctgcatcgcccacctagtggcagtagtgtgagctatggacaaaagatctaagtctccaggacaaagagttgtgcagctgctcattttcctgttgacttctgtctaagacttggagatgtttgtaagattgggacctacctacagagctccagagggaagtgagaaggatgttcacttgctggtgagagaaggagctggttccatccattacgcagtcccctgggagcgctaaatgcaactttatctcaacggggagtggacgatgagcaggacgtcgctagagggaaagagcctcacttcccgtttcctttggcagcgcccttttcccgacctaagggagcagaccttcgttggttggcgtgaggactggcgggagaggttttgtgccaggatccgcactgtctggggtgaacgc

SEQ ID NO: 733657 - DNA, 509 bp, Homo sapiens
tgcggtgatccaccctaccacatattgtctcctaatggccgtccagtttatcctggagcccttgcatgacacaggcctatcgaagcataggagatgccaatattttacctcttgggtactttctgtgtagaagattcataacaagaacaatacttattctgcaattctttatataaagtaagaagaaagcccaaagacaaaaccagaggcaactggctgctgcatcgcccacctagtggcagtagtgtgagctatggacaaaagatctaagtctccaggacaaagagttgtgcagctgctcattttcctgttgacttctgtctaagacttggagatgtttgtaagattgggacctacctacagagctccagagggaagtgagaaggatgttcacttgctggtgagagaaggagctggttccatccattacgcagtcccctgggagcgctaaatgcaactttatctcaacggggagtggacgatgagcaggacgtcgctagagggaaaga

SEQ ID NO: 733658 - DNA, 1028 bp, Homo sapiens; identical to SEQ ID NO: 458138

SEQ ID NO: 733659 - DNA, 2778 bp, Homo sapiens
ggcacccaccgcagcccagcgcgcgttcgtgctccgcagggcgcgcctctctccgccaatgccaggcgcgcgggggagccattaggaggcgaggagagaggagggcgcagctcccgcccagcccagccctgcccagccctgcccggaggcagacgcgccggaaccgggacgcgataaatatgcagagcggaggcttcgcgcagcagagcccgcgcgccgcccgctccgggtgctgaatccaggcgtggggacacgagccaggcgccgccgccggagccagcggagccggggccagagccggagcgcgtccgcgtccacgcagccgccggccggccagcacccagggccctgcatgccaggtcgttggaggtggcagcgagacatgcacccggcccggaagctcctcagcctcctcttcctcatcctgatgggcactgaactcactcaagtgctgcccaccaaccctgaggagagctggcaggtgtacagctctgcccaggacagcgagggcaggtgtatctgcacagtggtcgccccacagcagaccatgtgttcacgggatgcccgcacaaaacagctgaggcagctactggagaaggtgcagaacatgtctcaatccatagaggtcttggacaggcggacccagagagacttgcagtacgtggagaagatggagaaccaaatgaaaggactggagtccaagttcaaacaggtggaggagagtcataagcaacacctggccaggcagtttaaggcgataaaagcgaaaatggatgaacttaggcctttgatacctgtgttggaagagtacaaggccgatgccaaattggtattgcagtttaaagaggaggtccagaatctgacgtcagtgcttaacgagctgcaagaggaaattggcgcctatgactacgatgaacttcagagcagagtgtccaatcttgaagaaaggctccgtgcatgcatgcaaaaactagcttgcgggaagttgacgggcatcagtgaccccgtgactgtcaagacctccggctcgaggttcggatcctggatgacagaccctctcgcccctgaaggcgataaccgggtgtggtacatggacggctatcacaacaaccgcttcgtacgtgagtacaagtccatggttgacttcatgaacacggacaatttcacctcccaccgtctcccccacccctggtcgggcacggggcaggtggtctacaacggttctatctacttcaacaagttccagagccacatcatcatcaggtttgacctgaagacagagaccatcctcaagacccgcagcctggactatgccggttacaacaacatgtaccactacgcctggggtggccactcggacatcgacctcatggtggacgagagcgggctgtgggccgtgtacgccaccaaccagaacgctggcaacatcgtggtcagtaggctggaccccgtgtccctgcagaccctgcagacctgggaacacgagctaccccaagcgcagcgccggggaggccttcatcatctgcggcacgctgtacgtcaccaacggctactcagggggtaccaaggtccactatgcataccagaccaatgcctccacctatgaatacatcgacatcccattccagaacaaatactcccacatctccatgctggactacaaccccaaggaccgggccctgtatgcctggaacaacggccaccagatcctctacaacgtgaccctcttccacgtcatccgctccgacgagttgtagctccctcctcctggaagccaagggcccacgtcctcaccacaaagggactcctgtgaaactgctgccaaaaagataccaataacactaacaataccgatcttgaaaaatcatcagcagtgcggattctgacatcgagggatggcattacctccgtgtttctccctttcgagccggcgggccacagacgtcggaagaaactcccgtatttgcagctggaactgcagcccacggcgccccggttttcctccccgccctgtccctctctggtcaaacaacatactaaagaggcgaggcaatgactgttggcccagttctcaccggggaaaaaaccccactgttaggatggccatgaaacatttcccttagaatcgtggtcaagctcccgaggaatgtggcgtccccaggctctttgaagagccatgggctgcaccccggccgtaggcctagtgtaactcgcatccccattgcagtgcccgtttcttgactgtgttgctgtctcttagattaaccgtgctgaggctcccacatagctccctggacctgtgtcctagtacatactgaagcgatggtcagagtgtgtagagtgaagttgctgtgcccacattgtttgaactcgcgtaccccgtagatacattgtgcaacgttcttctgttattcccttgaggtggtaacttcgtatgttcagtttatgcgatgattgttgtaaatgcaatgccgtagtttggattaataagtggatggtttttgtttctaaaaagaaaaaaaaaatcagtgttcacccttatagagacatagtcaagttcatgttgataataatcaaaggaattactctcttcttgttaaattagctaaatcatgtaaccgcagataggaagggctcgcctggggaaactctggtttccgatgggacaggaaagtcatacgggcaacagtatgcggaaagtacgttttttaagtaaaaaacaaaggcaaactttgtactatccagttatctaaggaacaataaaaacattaggagatc

SEQ ID NO: 733660 - DNA, 1408 bp, Homo sapiens
ggcacccaccgcagcccagcgcgcgttcgtgctccgcagggcgcgcctctctccgccaatgccaggcgcgcgggggagccattaggaggcgaggagagaggagggcgcagctcccgcccagcccagccctgcccagccctgcccggaggcagacgcgccggaaccgggacgcgataaatatgcagagcggaggcttcgcgcagcagagcccgcgcgccgcccgctccgggtgctgaatccaggcgtggggacacgagccaggcgccgccgccggagccagcggagccggggccagagccggagcgcgtccgcgtccacgcagccgccggccggccagcacccagggccctgcatgccaggtcgttggaggtggcagcgagacatgcacccggcccggaagctcctcagcctcctcttcctcatcctgatgggcactgaactcactcaagtgctgcccaccaaccctgaggagagctggcaggtgtacagctctgcccaggacagcgagggcaggtgtatctgcacagtggtcgccccacagcagaccatgtgttcacgggatgcccgcacaaaacagctgaggcagctactggagaaggtgcagaacatgtctcaatccatagaggtcttggacaggcggacccagagagacttgcagtacgtggagaagatggagaaccaaatgaaaggactggagtccaagttcaaacaggtggaggagagtcataagcaacacctggccaggcagtttaagggctaacttaaaagagttttttcaatgctgcagtgactgaagaagcagtccactcccatgtaaccatgaaagagagccagagagctttttgcaccatgcatttttactattattttccaatacttagcaccatttcactaaggaaccttgaatacaaccaggatcctcctttgcatgcgactgtagctgcatttcatgaatagtttgaacccttgtcaatgcattttttgaaaaagaaagaaaaaaaaaacttcgtgtatgtgactcaaagcatgtaaccttaagatgttgcattctaaactgacaataaagacctttccccacaaacaccaaaagacacacaccaccaacaccatcaacaaccccattttgtgacgccagccacttacggcgccctgcgcaaaaagccttgccacaaacacgccatcgttggcagcgagccaggtgtggcccccacaaacggcggtacaggagcaaaacaggggcacaagacgggtggcgcaccaagcgaaacacgccggggacgacgacaaagggcgccgtagagtctccccagaacacaacaaagacgcacccgcggcgccaacacagcacggttgctgagaacaacccaacgaggaatcacgcgggcacagagggagccacaacacgagg

SEQ ID NO: 733661 - DNA, 613 bp, Homo sapiens; identical to SEQ ID NO: 458133

SEQ ID NO: 733662 - DNA, 1075 bp, Homo sapiens; identical to SEQ ID NO: 458132

SEQ ID NO: 733663 - DNA, 1107 bp, Homo sapiens
  misc_feature (245)..(245): n is a, c, g, or t
agcgctcagagccggacggcgcttcccggtggcggcggaggagcccggagggacgcagccgggcaaggcagggcgcggggcgggcggcgcgaggcgcagggcgcggcgggcagaggccagcctggccaccttccctggcgcccggggaaggcgcggcgatggccggggcgcgcggggcggcggcggcggcgggcgggcggcggcgggccgagggggcgcggggacacagccaggcgcccctgccncgcccggtgcccgccgcctgaaggccgcctgggcgcgggagccggtgccagctcggagcgggcgctggaggcagctcgaggcgcgatgtcggtgccgctgctcaagatcggggtcgtgctgagcaccatggccatgatcactaactggatgtcccagacgctgccctcgctggtgggcctcaacaccaccaagctctcggcggccggcggcgggacgctggaccgcagcaccggcgtgctgcccaccaaccctgaggagagctggcaggtgtacagctctgcccaggacagcgagggcaggtgtatctgcacagtggtcgccccacagcagaccatgtgttcacgggatgcccgcacaaaacagctgaggcagctactggagaaggtgcagaacatgtctcaatccatagaggtcttggacaggcggacccagagagacttgcagtacgtggagaagatggagaaccaaatgaaaggactggagtccaagttcaaacaggtggaggagagtcataagcaacacctggccaggcagtttaagggctaacttaaaagagttttttcaatgctgcagtgactgaagaagcagtccactcccatgtaaccatgaaagagagccagagagctttttgcaccatgcatttttactattattttccaatacttagcaccatttcactaaggaaccttgaatacaaccaggatcctcctttgcatgcgactgtagctgcatttcatgaatagtttgaacccttgtcaatgcattttttgaaaaagaaagaaaaaaaaaacttcgtgtatgtgactcaaagcatgtaaccttaagatgttgcattctaaactgacaataaagacctttccc

SEQ ID NO: 733664 - DNA, 841 bp, Homo sapiens; identical to SEQ ID NO: 458137

SEQ ID NO: 733665 - DNA, 1440 bp, Homo sapiens
  misc_feature (245)..(245): n is a, c, g, or t
agcgctcagagccggacggcgcttcccggtggcggcggaggagcccggagggacgcagccgggcaaggcagggcgcggggcgggcggcgcgaggcgcagggcgcggcgggcagaggccagcctggccaccttccctggcgcccggggaaggcgcggcgatggccggggcgcgcggggcggcggcggcggcgggcgggcggcggcgggccgagggggcgcggggacacagccaggcgcccctgccncgcccggtgcccgccgcctgaaggccgcctgggcgcgggagccggtgccagctcggagcgggcgctggaggcagctcgaggcgcgatgtcggtgccgctgctcaagatcggggtcgtgctgagcaccatggccatgatcactaactggatgtcccagacgctgccctcgctggtgggcctcaacaccaccaagctctcggcggccggcggcgggacgctggaccgcagcaccggcgtgctgcccaccaaccctgaggagagctggcaggtgtacagctctgcccaggacagcgagggcaggtgtatctgcacagtggtcgccccacagcagaccatgtgttcacgggatgcccgcacaaaacagctgaggcagctactggagaaggtgcagaacatgtctcaatccatagaggtcttggacaggcggacccagagagacttgcagtacgtggagaagatggagaaccaaatgaaaggactggagtccaagttcaaacaggtggaggagagtcataagcaacacctggccaggcagtttaagggctaacttaaaagagttttttcaatgctgcagtgactgaagaagcagtccactcccatgtaaccatgaaagagagccagagagctttttgcaccatgcatttttactattattttccaatacttagcaccatttcactaaggaaccttgaatacaaccaggatcctcctttgcatgcgactgtagctgcatttcatgaatagtttgaacccttgtcaatgcattttttgaaaaagaaagaaaaaaaaaacttcgtgtatgtgactcaaagcatgtaaccttaagatgttgcattctaaactgacaataaagacctttccccacaaacaccaaaagacacacaccaccaacaccatcaacaaccccattttgtgacgccagccacttacggcgccctgcgcaaaaagccttgccacaaacacgccatcgttggcagcgagccaggtgtggcccccacaaacggcggtacaggagcaaaacaggggcacaagacgggtggcgcaccaagcgaaacacgccggggacgacgacaaagggcgccgtagagtctccccagaacacaacaaagacgcacccgcggcgccaacacagcacggttgctgagaacaacccaacgaggaatcacgcgggcacagagggagccacaacacgagg

SEQ ID NO: 733666 - DNA, 1701 bp, Homo sapiens
ggcacccaccgcagcccagcgcgcgttcgtgctccgcagggcgcgcctctctccgccaatgccaggcgcgcgggggagccattaggaggcgaggagagaggagggcgcagctcccgcccagcccagccctgcccagccctgcccggaggcagacgcgccggaaccgggacgcgataaatatgcagagcggaggcttcgcgcagcagagcccgcgcgccgcccgctccgggtgctgaatccaggcgtggggacacgagccaggcgccgccgccggagccagcggagccggggccagagccggagcgcgtccgcgtccacgcagccgccggccggccagcacccagggccctgcatgccaggtcgttggaggtggcagcgagacatgcacccggcccggaagctcctcagcctcctcttcctcatcctgatgggcactgaactcactcaagtgctgcccaccaaccctgaggagagctggcaggtgtacagctctgcccaggacagcgagggcaggtgtatctgcacagtggtcgccccacagcagaccatgtgttcacgggatgcccgcacaaaacagctgaggcagctactggagaaggtgcagaacatgtctcaatccatagaggtcttggacaggcggacccagagagacttgcagtacgtggagaagatggagaaccaaatgaaaggactggagtccaagttcaaacaggtggaggagagtcataagcaacacctggccaggcagtttaaggcgataaaagcgaaaatggatgaacttaggcctttgatacctgtgttggaagagtacaaggccgatgccaaattggtattgcagtttaaagaggaggtccagaatctgacgtcagtgcttaacgagctgcaagaggaaattggcgcctatgactacgatgaacttcagagcagagtgtccaatcttgaagaaaggctccgtgcatgcatgcaaaaactagcttgcgggaagttgacgggcatcagtgaccccgtgactgtcaagacctccggctcgaggttcggatcctggatgacagaccctctcgcccctgaaggcgataaccgggtgtggtacatggacggctatcacaacaaccgcttcgtacgtgagtacaagtccatggttgacttcatgaacacggacaatttcacctcccaccgtctcccccacccctggtcgggcacggggcaggtggtctacaacggttctatctacttcaacaagttccagagccacatcatcatcaggtttgacctgaagacagagaccatcctcaagacccgcagcctggactatgccggttacaacaacatgtaccactacgcctggggtggccactcggacatcgacctcatggtggacgagagcgggctgtgggccgtagtttggattaataagtggatggtttttgtttctaaaaagaaaaaaaaaatcagtgttcacccttatagagacatagtcaagttcatgttgataataatcaaaggaattactctcttcttgttaaattagctaaatcatgtaaccgcagataggaagggctcgcctggggaaactctggtttccgatgggacaggaaagtcatacgggcaacagtatgcggaaagtacgttttttaagtaaaaaacaaaggcaaactttgtactatccagttatctaaggaacaataaaaacattaggagatc

SEQ ID NO: 733667 - DNA, 2829 bp, Homo sapiens; identical to SEQ ID NO: 293419

SEQ ID NO: 733668 - DNA, 795 bp, Homo sapiens
aggaatataaatagtttctggaaaggacactgacaacttcaaagcaaaatgaagttctttctgttgcttttcaccattgggttctgctgggctcagtattccccaaatacacaacaaggacggacatctattgttcatctgtttgaatggcgatgggttgatattgctcttgaatgtgagcgatatttagctccgaagggatttggaggggttcaggtctctccaccaaatgaaaatgttgcaatttacaaccctttcagaccttggtgggaaagataccaaccagttagctataaattatgcacaagatctggaaatgaagatgaatttagaaacatggtgactagatgtaacaatgttggggttcgtatttatgtggatgctgtaattaatcatatgtgtggtaacgctgtgagtgcaggaacaagcagtacctgtggaagttacttcaaccctggaagtagggactttccagcagtcccatattctggatgggatttcaatgatggtaaatgtaaaactggaagtggagatatcgagaactacaatgatgctactcaggtcagagattgtcgtctgactggtcttcttgatcttgcactggagaaggattacgtgcgttctaagattgccgaatatatgaaccatctcattgacattggtgttgcagggttcagacttgatgcttccaagcacatgtggcctggagacataaaggcaattttggacaaactgcataatctaaacagtaactggttccctgcaggaagtaaacctttcatttaccaggaggta

SEQ ID NO: 733669 - DNA, 783 bp, Homo sapiens
tctgtctgacctgacaagccacctcaagtggacaaggcacttaccaacagagattgctgatttgctccttaagcaagagattcactgccgctaagcatggctcagaccaactcgttcttcatgctgatctcctccctgatgttcctgtctctgagccaaggccaggagtcccagacagagctgcctaatccccgaatcagctgcccagaaggcaccaatgcctatcgctcctactgctactactttaatgaagaccctgagacctgggttgatgcagatctctattgccagaacatgaattcaggcaacctggtgtctgtgctcacccaggcggagggtgccttcgtggcctcactgattaaggagagtagcactgatgacagcaatgtctggattggcctccatgacccaaaaaagaaccgccgctggcactggagtagtgggtccctggtctcctacaagtcctgggacactggatccccgagcagtgctaatgctggctactgtgcaagcctgacttcatgctcaggattcaagaaatggaaggatgaatcttgtgagaagaagttctcctttgtttgcaagttcaaaaactagaggaagctgaaaaatggatgtctagaactggtcctgcaattactatgaagtcaaaaattaaactagactatgtctccaactcagttcagaccatctcctccctaatgagtttgcatcgctgatcttcagtaccttcacctgtctcagtctctagagccctgaaaaataaaaacaaacttattttta

SEQ ID NO: 733670 - DNA, 869 bp, Homo sapiens
tctgtctgacctgacaagccacctcaagtggacaaggcacttaccaacagagattgctgatttgctccttaagcaagagattcactgccgctaagcatggctcagaccaactcgttcttcatgctgatctcctccctgatgttcctgtctctgagccaaggccaggagtcccagacagagctgcctaatccccgaatcagctgcccagaaggcaccaatgcctatcgctcctactgctactactttaatgaagaccctgagacctgggttgatgcagatctctattgccagaacatgaattcaggcaacctggtgtctgtgctcacccaggcggagggtgccttcgtggcctcactgattaaggagagtagcactgatgacagcaatgtctggattggcctccatgacccaaaaaagaaccgccgctggcactggagtagtgggtccctggtctcctacaagtcctgggacactggatccccgagcagtgctaatgctggctactgtgcaagcctgacttcatgctcaggtgagaggcagacaatctatccacctgttgccatttccttcccacttatctctggggatgaacatggggactgggatagaggaaaggattcaagaaatggaaggatgaatcttgtgagaagaagttctcctttgtttgcaagttcaaaaactagaggaagctgaaaaatggatgtctagaactggtcctgcaattactatgaagtcaaaaattaaactagactatgtctccaactcagttcagaccatctcctccctaatgagtttgcatcgctgatcttcagtaccttcacctgtctcagtctctagagccctgaaaaataaaaacaaacttattttta

SEQ ID NO: 733671 - DNA, 212 bp, Homo sapiens; identical to SEQ ID NO: 305432

SEQ ID NO: 733672 - DNA, 870 bp, Homo sapiens
tgaccccaggagagctcggatcctccgcagggtacctagctatgtgccctgcaggcacagagacttgggagccacaggcagtgatgatcaccagggttgctgccccctttgatgatgatgacaagatcgttgggggctacaactgtgaggagaattctgtcccctaccaggtgtccctgaattctggctaccacttctgtggtggctccctcatcaacgaacagtgggtggtatcagcaggccactgctacaagtcccgcatccaggtgagactgggagagcacaacatcgaagtcctggaggggaatgagcagttcatcaatgcagccaagatcatccgccacccccaatacgacaggaagactctgaacaatgacatcatgttaatcaagctctcctcacgtgcagtaatcaacgcccgcgtgtccaccatctctctgcccaccgcccctccagccactggcacgaagtgcctcatctctggctggggcaacactgcgagctctggcgccgactacccagacgagctgcagtgcctggacgctcctgtgctgagccaggctaagtgtgaagcctcctaccctggaaagattaccagcaacatgttctgtgtgggcttccttgagggaggcaaggattcatgtcagggtgattctggtggccctgtggtctgcaatggacagctccaaggagttgtctcctggggtgatggctgtgcccagaagaacaagcctggagtctacaccaaggtctacaactatgtgaaatggattaagaacaccatagctgccaacagctaaagcccccagtatctcttcagtctctataccaataaagtgaccctgttctcactgtctgtgtctgtgcctg

SEQ ID NO: 733673 - DNA, 590 bp, Homo sapiens
ccgcatccaggtgagactgggagagcacaacatcgaagtcctggaggggaatgagcagttcatcaatgcagccaagatcatccgccacccccaatacgacaggaagactctgaacaatgacatcatgttaatcaaggcccgcgtgtccaccatctctctgcccaccgcccctccagccactggcacgaagtgcctcatctctggctggggcaacactgcgagctctggcgccgactacccagacgagctgcagtgcctggacgctcctgtgctgagccaggctaagtgtgaagcctcctaccctggaaagattaccagcaacatgttctgtgtgggcttccttgagggaggcaaggattcatgtcagggtgattctggtggccctgtggtctgcaatggacagctccaaggagttgtctcctggggtgatggctgtgcccagaagaacaagcctggagtctacaccaaggtctacaactatgtgaaatggattaagaacaccatagctgccaacagctaaagcccccagtatctcttcagtctctataccaataaagtgaccctgttctcactgtctgtgtctgtgcctg

SEQ ID NO: 733674 - DNA, 1075 bp, Homo sapiens
  misc_feature (1)..(1): n is a, c, g, or t
  misc_feature (4)..(4): n is a, c, g, or t
  misc_feature (39)..(39): n is a, c, g, or t
naanctcggatacacacaagcctcgcagaacatcaggancgtgggagcagaagtggcatattttgttgaatttcttcagtcggcgttcggttactcaccttccaacgtgcatgtcattggccacagcctgggtgcccacgctgctggggaggctggaaggagaaccaatgggaccattggacgcatcacagggttggacccagcagaaccttgctttcagggcacacctgaattagtccgattggaccccagcgatgccaaatttgtggatgtaattcacacggatggtgcccccatagtccccaatttggggtttggaatgagccaagtcgtgggccacctagatttctttccaaatggaggagtggaaatgcctggatgtaaaaagaacattctctctcagattgtggacatagacggaatctgggaagggactcgagactttgcggcctgtaatcacttaagaagctacaaatattacactgatagcatcgtcaaccctgatggctttgctggattcccctgtgcctcttacaacgtcttcactgcaaacaagtgtttcccttgtccaagtggaggctgcccacagatgggtcactatgctgatagatatcctgggaaaacaaatgatgtgggccagaaattttatctagacactggtgatgccagtaattttgcacgttggaggtataaggtatctgtcacactgtctggaaaaaaggttacaggacacatactagtttctttgttcggaaataaaggaaactctaagcagtatgaaattttcaagggcactctcaaaccagatagtactcattccaatgaatttgactcagatgtggatgttggggacttgcagatggttaaatttatttggtataacaatgtgatcaacccaactttacctagagtgggagcatccaagattatagtggagacaaatgttggaaaacagttcaacttctgtagtccagaaaccgtcagggaggaagttctgctcaccctcacaccgtgttaggagactactgttatttgaccaatgaattgacttctaataaaatctagtggtgatgca

SEQ ID NO: 733675 - DNA, 566 bp, Homo sapiens
  misc_feature (22)..(22): n is a, c, g, or t
ctagataaaatttctggcccanatcatttgttttcccaggatatctatcagcatagtgacccatctgtgggcagcctccacttggacaagggaaacacttgtttgcagtgaagacgttgtaagaggcacagaaattttatctagacactggtgatgccagtaattttgcacgttggaggtataaggtatctgtcacactgtctggaaaaaaggttacaggacacatactagtttctttgttcggaaataaaggaaactctaagcagtatgaaattttcaagggcactctcaaaccagatagtactcattccaatgaatttgactcagatgtggatgttggggacttgcagatggttaaatttatttggtataacaatgtgatcaacccaactttacctagagtgggagcatccaagattatagtggagacaaatgttggaaaacagttcaacttctgtagtccagaaaccgtcagggaggaagttctgctcaccctcacaccgtgttaggagactactgttatttgaccaatgaattgacttctaataaaatctagtggtgatgca

SEQ ID NO: 733676 - DNA, 198 bp, Homo sapiens
  misc_feature (16)..(16): n is a, c, g, or t
  misc_feature (19)..(19): n is a, c, g, or t
  misc_feature (42)..(42): n is a, c, g, or t
gtagatcccccggggngcnggaattcggcacgagtgggagcntccaacattcgtctccactataatgttggaaaacagttcaacttctgtagtccagaaaccgtcagggaggaagttctgctcaccctcacaccgtgttaggagactactgttatttgaccaatgaattgacttctaataaaatctagtggtgatgca

SEQ ID NO: 733677 - DNA, 144 bp, Homo sapiens
  misc_feature (36)..(36): n is a, c, g, or t
  misc_feature (58)..(58): n is a, c, g, or t
tttttttaatgcatcaccactaaattttattaaaantcaattcattggtcaaataacngtagtctgctcaccctcacaccgtgttaggagactactgttatttgaccaatgaattgacttctaataaaatctagtggtgatgca

SEQ ID NO: 733678 - DNA, 169 bp, Homo sapiens
  misc_feature (36)..(36): n is a, c, g, or t
  misc_feature (58)..(58): n is a, c, g, or t
tttttttaatgcatcaccactaaattttattaaaantcaattcattggtcaaataacngtagtccagaaaccgtcaggggaggaagttctgctcaccctcacaccgtgttaggagactactgttatttgaccaatgaattgacttctaataaaatctagtggtgatgca

SEQ ID NO: 733679 - DNA, 1756 bp, Homo sapiens
  misc_feature (1)..(1): n is a, c, g, or t
  misc_feature (4)..(4): n is a, c, g, or t
  misc_feature (39)..(39): n is a, c, g, or t
naanctcggatacacacaagcctcgcagaacatcaggancgtgggagcagaagtggcatattttgttgaatttcttcagtcggcgttcggttactcaccttccaacgtgcatgtcattggccacagcctgggtgcccacgctgctggggaggctggaaggagaaccaatgggaccattggacgcatcacagggttggacccagcagaaccttgctttcagggcacacctgaattagtccgattggaccccagcgatgccaaatttgtggatgtaattcacacggatggtgcccccatagtccccaatttggggtttggaatgagccaagtcgtgggccacctagatttctttccaaatggaggagtggaaatgcctggatgtaaaaagaacattctctctcagattgtggacatagacggaatctgggaagggactcgagactttgcggcctgtaatcacttaagaagctacaaatattacactgatagcatcgtcaaccctgatggctttgctggattcccctgtgcctcttacaacgtcttcactgcaaacaagtgtttcccttgtccaagtggaggctgcccacagatgggtcactatgctgatagatatcctgggaaaacaaatgatgtgggccagaaattttatctagacactggtgatgccagtaattttgcacgttggaggtataaggtatctgtcacactgtctggaaaaaaggttacaggacacatactagtttctttgttcggaaataaaggaaactctaagcagtatgaaattttcaagggcactctcaaaccagatagtactcattccaatgaatttgactcagatgtggatgttggggacttgcagatggttaaatttatttggtataacaatgtgatcaacccaactttacctagagtgggagcatccaagattatagtggagacaaatgttggaaaacagttcaacttctgtagtccagaaaccgtcagggaggaagttctgctcaccctcacaccgtgttaggagactactgttatttgaccaatgaattgacttctaataaaatctagtggtgatgcattaaaaaaaaaaaaaaaaaaaaaaaaaaaaaaaaaaaaaaaaaaaaaaaaaaaaaaaaaaaaaaaaaaaaaaaaaaaaaaaaaaaaaaaaaaaaaaaaaaaaagaaaaaaaaaaaaaaaaaaaaaaaaaaaaaaagtagggggggggcccgcgcgcacaacaaaagtgactgacaaacaacacaggtgggggggggcgcacccgcccgagatgacatccgcagagagagcaccgaaacagcaaaggccgcggcaccgaacagacggcgggtgacacacaacaaaaaagaaggggcgcagagacaggcgataccacaaccagacggcgacggagaaaggacggcatgaccagacgggagcgagcggcataaaaacaaaaaccgccggccggggggggaagacaaccagccaggcggagacggacaaaagacaccaagcggcgccacgccagaggagcgggcgaccacgaaaacaagcggagccggaaggggtgcagcgcgacaatacagggcagaccagccagccggggcggagcgagccacgaggacgacgacaagcggcaggcgacaacgcagggccgaccgagccgaaacaacaggcgactgccggcaaggcacgacagagtaaccaaagaggtgagagccaacgagaagcaccaaaccggcacaggtcacgtacacaa

SEQ ID NO: 733680 - DNA, 1446 bp, Homo sapiens
  misc_feature (1)..(1): n is a, c, g, or t
  misc_feature (4)..(4): n is a, c, g, or t
  misc_feature (39)..(39): n is a, c, g, or t
naanctcggatacacacaagcctcgcagaacatcaggancgtgggagcagaagtggcatattttgttgaatttcttcagtcggcgttcggttactcaccttccaacgtgcatgtcattggccacagcctgggtgcccacgctgctggggaggctggaaggagaaccaatgggaccattggacgcatcacagggttggacccagcagaaccttgctttcagggcacacctgaattagtccgattggaccccagcgatgccaaatttgtggatgtaattcacacggatggtgcccccatagtccccaatttggggtttggaatgagccaagtcgtgggccacctagatttctttccaaatggaggagtggaaatgcctggatgtaaaaagaacattctctctcagattgtggacatagacggaatctgggaagggactcgagactttgcggcctgtaatcacttaagaagctacaaatattacactgatagcatcgtcaaccctgatggctttgctggattcccctgtgcctcttacaacgtcttcactgcaaacaagtgtttcccttgtccaagtggaggctgcccacagatgggtcactatgctgatagatatcctgggaaaacaaatgatgtgggccagaaattttatctagacactggtgatgccagtaattttgcacgttggaggtataaggtatctgtcacactgtctggaaaaaaggttacaggacacatactagtttctttgttcggaaataaaggaaactctaagcagtatgaaattttcaagggcactctcaaaccagatagtactcattccaatgaatttgactcagatgtggatgttggggacttgcagatggttaaatttatttggtataacaatgtgatcaacccaactttacctagagtgggagcatccaagattatagtggagacaaatgttggaaaacagttcaacttctgtagtccagaaaccgtcagggaggaagttctgctcaccctcacaccgtgttaggagactactgttatttgaccaatgaattgacttctaataaaatctagtggtgatgcaacatgagacaatgtccctgataagaacggtaaggggcagatctcgacataaattcatcctccatctcaaaatgaacttggactcctatgtcccgatatgtataatgctgcccactttaaggggcgcctcaaagtttaaacctaaggtcatggactgtgtctctggcaccatactccctaattcgctgtccaggtttttctaacacataatcactgcctgctggaacactggtgtgccaaacaagggcaagatcttccacgtgtggcaacaaaagccgatgggaattagaaattccgccccggggtcctcgcaccttggcacgtccaggttccgtaacaaaccagcacaacctctcccagactcactttatg

SEQ ID NO: 733681 - DNA, 1247 bp, Homo sapiens
  misc_feature (22)..(22): n is a, c, g, or t
ctagataaaatttctggcccanatcatttgttttcccaggatatctatcagcatagtgacccatctgtgggcagcctccacttggacaagggaaacacttgtttgcagtgaagacgttgtaagaggcacagaaattttatctagacactggtgatgccagtaattttgcacgttggaggtataaggtatctgtcacactgtctggaaaaaaggttacaggacacatactagtttctttgttcggaaataaaggaaactctaagcagtatgaaattttcaagggcactctcaaaccagatagtactcattccaatgaatttgactcagatgtggatgttggggacttgcagatggttaaatttatttggtataacaatgtgatcaacccaactttacctagagtgggagcatccaagattatagtggagacaaatgttggaaaacagttcaacttctgtagtccagaaaccgtcagggaggaagttctgctcaccctcacaccgtgttaggagactactgttatttgaccaatgaattgacttctaataaaatctagtggtgatgcattaaaaaaaaaaaaaaaaaaaaaaaaaaaaaaaaaaaaaaaaaaaaaaaaaaaaaaaaaaaaaaaaaaaaaaaaaaaaaaaaaaaaaaaaaaaaaaaaaaaaagaaaaaaaaaaaaaaaaaaaaaaaaaaaaaaagtagggggggggcccgcgcgcacaacaaaagtgactgacaaacaacacaggtgggggggggcgcacccgcccgagatgacatccgcagagagagcaccgaaacagcaaaggccgcggcaccgaacagacggcgggtgacacacaacaaaaaagaaggggcgcagagacaggcgataccacaaccagacggcgacggagaaaggacggcatgaccagacgggagcgagcggcataaaaacaaaaaccgccggccggggggggaagacaaccagccaggcggagacggacaaaagacaccaagcggcgccacgccagaggagcgggcgaccacgaaaacaagcggagccggaaggggtgcagcgcgacaatacagggcagaccagccagccggggcggagcgagccacgaggacgacgacaagcggcaggcgacaacgcagggccgaccgagccgaaacaacaggcgactgccggcaaggcacgacagagtaaccaaagaggtgagagccaacgagaagcaccaaaccggcacaggtcacgtacacaa

SEQ ID NO: 733682 - DNA, 937 bp, Homo sapiens
  misc_feature (22)..(22): n is a, c, g, or t
ctagataaaatttctggcccanatcatttgttttcccaggatatctatcagcatagtgacccatctgtgggcagcctccacttggacaagggaaacacttgtttgcagtgaagacgttgtaagaggcacagaaattttatctagacactggtgatgccagtaattttgcacgttggaggtataaggtatctgtcacactgtctggaaaaaaggttacaggacacatactagtttctttgttcggaaataaaggaaactctaagcagtatgaaattttcaagggcactctcaaaccagatagtactcattccaatgaatttgactcagatgtggatgttggggacttgcagatggttaaatttatttggtataacaatgtgatcaacccaactttacctagagtgggagcatccaagattatagtggagacaaatgttggaaaacagttcaacttctgtagtccagaaaccgtcagggaggaagttctgctcaccctcacaccgtgttaggagactactgttatttgaccaatgaattgacttctaataaaatctagtggtgatgcaacatgagacaatgtccctgataagaacggtaaggggcagatctcgacataaattcatcctccatctcaaaatgaacttggactcctatgtcccgatatgtataatgctgcccactttaaggggcgcctcaaagtttaaacctaaggtcatggactgtgtctctggcaccatactccctaattcgctgtccaggtttttctaacacataatcactgcctgctggaacactggtgtgccaaacaagggcaagatcttccacgtgtggcaacaaaagccgatgggaattagaaattccgccccggggtcctcgcaccttggcacgtccaggttccgtaacaaaccagcacaacctctcccagactcactttatg

SEQ ID NO: 733683 - DNA, 892 bp, Homo sapiens; identical to SEQ ID NO: 46288

SEQ ID NO: 733684 - DNA, 1299 bp, Homo sapiens
gggaccggcagacaggcgtcctacacccctgccagcggcaccatggctttcctctggctcctctcctgctgggccctcctgggtaccaccttcggctgcggggtccccgccatccaccctgtgctcagcggcctgtccaggatcgtgaatggggaggacgccgtccccggctcctggccctggcaggtgtccctgcaggacaaaaccggcttccacttctgcgggggctccctcatcagcgaggactgggtggtcaccgctgcccactgcggggtcaggacctccgacgtggtcgtggctggggagtttgaccagggctctgacgaggagaacatccaggtcctgaagatcgccaaggtcttcaagaaccccaagttcagcattctgaccgtgaacaatgacatcaccctgctgaagctggccacacctgcccgcttctcccagacagtgtccgccgtgtgcctgcccagcgccgacgacgacttccccgcggggacactgtgtgccaccacaggctggggcaagaccaagtacaacgccaacaagacccctgacaagctgcagcaggcagccctgcccctcctgtccaatgccgaatgcaagaagtcctggggcaggaggatcaccgacgtgatgatctgtgccggggccagtggcgtctcctcctgcatgggcgactctggcggccccctggtctgccaaaaggatggagcctggaccctggtgggcattgtgtcctggggcagcgacacctgctccacctccagccctggcgtgtacgcccgtgtcaccaagctcataccttgggtgcagaagatcctggctgccaactgagcccgcggctccctccgaccctgctccccacagagcctcagtaaacccatggaacacaaaaaaaaaaaaaaaaaaaaaaaaaaaaaaacacgtggtgtgcgcgcgcgcgcgccccgcggcccccctgagaaaacccctttcctataaaccacactcgggtggggcgcgcgccgggccacccagttaggtaaagggaacaacggtggccaagcgagggggcatccccaagagggaacaccggggcgacgagtgcacaagagggcgcgcgggaattctcctaccacacattaaacaaaccgcgcgcgggggggagaacccccgagaccggtcctgtgagaaccaatactcccgaaagctgggagcagcctcagaagggccaactacagggggagatcatcctcaccagggagcgcgccccagggaggctcgacatatccaaatttaacagcccccgagtcaggggga

SEQ ID NO: 733685 - DNA, 421 bp, Homo sapiens
tctcttgctctgggccctgcaggagggcgtgggcagcgtgggggctgtggggggatgagctcactctggccccacagacctgtggctccaaggaatcttcccacggccactcctagggctgccagacatacgctggagccaggagcgttatcaacgcaaggactggtgatgagtagagacggggtttcaccgtgttaaccaggatggtctcgatctcctgacctcgtcatccgcccgccttggcctcccaaagtgctgcgattacaggcctgagccaccgcgcccagccctatggcaatgactcttaaaagttcgaggctcaggcaggccgggagccccaggtcaaacatgcccatccccagccccaaatgcccagaagcaaaaagcccgccgtgccatgtttcatcaaggcaccacatcc

SEQ ID NO: 733686 - DNA, 584 bp, Homo sapiens
gtgtcaccaagctcataccttgggtgcagaagatcctggctgccaactgagcccgcggctccctccgaccctgctccccacagagcctcagtaaacccatggaacacacgtcggcgctgtccgtcttctgttttggggcctccaaggcctcactccactccggaacctgggcccccactgggctggactgggctgggctaggcatgggcggcctctgggaggacccttccttagtcccctctcccaccactcaggctcctgcttcccagagagtggccaggaacacacgggcagatgaaaaggggtgcagagacagacgggggatctggctggtggggaccgggtggaccttggcccccatcctcagcacctgcccccaggcgacaggttcttgcacaacaccacccttgctctcttgctctgggccctgcaggagggcgtgggcagcgtgggggctgtggggggatgagctcactctggccccacagacctgtggctccaaggaatcttcccacggccactcctagggctgccagacatacgctggagccaggagcgttatcaacgcaaggactggtgatgag

SEQ ID NO: 733687 - DNA, 782 bp, Homo sapiens; identical to SEQ ID NO: 46361

SEQ ID NO: 733688 - DNA, 693 bp, Homo sapiens; identical to SEQ ID NO: 46360
  misc_feature (33)..(34): n is a, c, g, or t

SEQ ID NO: 733689 - DNA, 716 bp, Homo sapiens; identical to SEQ ID NO: 46362
  misc_feature (33)..(34): n is a, c, g, or t

SEQ ID NO: 733690 - DNA, 439 bp, Homo sapiens
  misc_feature (8)..(8): n is a, c, g, or t
  misc_feature (189)..(189): n is a, c, g, or t
  misc_feature (201)..(201): n is a, c, g, or t
  misc_feature (206)..(206): n is a, c, g, or t
  misc_feature (209)..(209): n is a, c, g, or t
  misc_feature (212)..(213): n is a, c, g, or t
  misc_feature (220)..(222): n is a, c, g, or t
  misc_feature (235)..(235): n is a, c, g, or t
  misc_feature (248)..(248): n is a, c, g, or t
  misc_feature (259)..(259): n is a, c, g, or t
  misc_feature (295)..(295): n is a, c, g, or t
  misc_feature (306)..(306): n is a, c, g, or t
  misc_feature (361)..(361): n is a, c, g, or t
  misc_feature (371)..(371): n is a, c, g, or t
  misc_feature (411)..(411): n is a, c, g, or t
ccggctgntcagttccctcctccttgtggccgttgcctcaggctatggcccaccttcctctcgcccttccagccgcgttgtcaatggtgaggatgcggtcccctacagctggccctggcaggtttccctgcagtatgagaaaagtggaagcttctaccacacgtgtggcggtagctcatcgcccccgantggttgtgactnccggncantgnntctgagnnnctgacctaccagnggtgttgggtgantacaaccttgntgtgaaggagggccccgagcaggtgatccccatcanctctgaggagntgtgtgtgcatccactctggaaccgctcgtgtgtggtctgtggtaatgacatcgncctcatcaanctctcacgcagcgcccagctgggagatgcgtccagttcgnctcactccctcccggtggtgacatcctc

SEQ ID NO: 733691 - DNA, 510 bp, Homo sapiens
  misc_feature (260)..(260): n is a, c, g, or t
  misc_feature (272)..(272): n is a, c, g, or t
  misc_feature (277)..(277): n is a, c, g, or t
  misc_feature (280)..(280): n is a, c, g, or t
  misc_feature (283)..(284): n is a, c, g, or t
  misc_feature (291)..(293): n is a, c, g, or t
  misc_feature (306)..(306): n is a, c, g, or t
  misc_feature (319)..(319): n is a, c, g, or t
  misc_feature (330)..(330): n is a, c, g, or t
  misc_feature (366)..(366): n is a, c, g, or t
  misc_feature (377)..(377): n is a, c, g, or t
  misc_feature (432)..(432): n is a, c, g, or t
  misc_feature (442)..(442): n is a, c, g, or t
  misc_feature (482)..(482): n is a, c, g, or t
cttgtggccgttgagatgaggtcttgctatgttgcccaggctggtctcaaactcgtgcgctcaagcgatcctcccgcctcggcctctcaaagcactaggattacagcctcaggctatggcccaccttcctctcgcccttccagccgcgttgtcaatggtgaggatgcggtcccctacagctggccctggcaggtttccctgcagtatgagaaaagtggaagcttctaccacacgtgtggcggtagctcatcgcccccgantggttgtgactnccggncantgnntctgagnnnctgacctaccagnggtgttgggtgantacaaccttgntgtgaaggagggccccgagcaggtgatccccatcanctctgaggagntgtgtgtgcatccactctggaaccgctcgtgtgtggtctgtggtaatgacatcgncctcatcaanctctcacgcagcgcccagctgggagatgcgtccagttcgnctcactccctcccggtggtgacatcctc

SEQ ID NO: 733692 - DNA, 960 bp, Homo sapiens
tattaaaataaagagaaagcctagccgggcgcgggggctcatgcctgtaatcccagcactttgggaggattgcaaacgtgcatgtgcaaaagctttgaaaaagaaaaagaagatgccaaagcttcgctttgccagtagaatccggaaaattcggaagaagcaattttaaacattcttaatatgtcatcttgtttgtctttatggcttatttgcctttatggttgtatctgaagaataatatgacagcatgaggaaacaaatcattggtgatttattcaccagtttttattaatacaagtcactttttcaaaaatttggatttttttatatataactagctgctattcaaatgtgagtctaccatttttaatttatggttcaactgtttgtgagactgaattcttgcaatgcataagatataaaagcaaatatgactcactcatttcttggggtcgtattcctgatttcagaagaggatcataactgaaacaacataagacaatataatcatgtgcttttaacatatttgagaataaaaaggactagcaaataaaaaaaaaaaaaaaaaaaactttgttggggggcttgggccttggaaaaagtttttaaaacccattcgttgttggggggggggccccagtattgtactgtggaccatgcgccaaaggcgtgcttcaaaaggaaaacccggcgccagtgacataggcggctgggggtgtctccccagataaataaaaccgccgggcgcgacacccggggcttttttagaccaatccccgaaggggagacgcggaggagcccaagacgggcgctctaacaaccaggggagtccagagggagcgcgaaataaaatagcggcgcgcgcgtgcggtgagaaacgaacacgtgcacgaccaacgaagaagacaagaggagaaaaacaaaagaacacaagaaaaagcggaaccatacacaacaaag

SEQ ID NO: 733693 - DNA, 589 bp, Homo sapiens
gaaaatgcgtattcatgtgaataagctttgattcactgcatatgtacaatcagagaacacccagagaaaacagagagtctttctactgaacttgaaagatacatcacagctgagtcagctctgaatacactgttagaaaaaaaaaaagtaaatatctggattcatgggagtattctgggtatttactatcccaacactaatacaacttctctccccccacaaaatgttgctgaaaatacagtgatggtttaataagaaggctacttttgactaacattgttctattaccctccttttcctagaagttcccaaagtttgccggctgcaagtgagtgtggacgaccagtgtgaggggtccacagaaaagtatttctttaatctaagttccatgacatgtgaaaaattcttttccggtgggtgtcaccggaaccggattgagaacaggtttccagatgaagctacttgtatgggcttctgcgcaccaaagaaaaagtaaatacgatttttatggtatttctatttcacttttttgaaaagacatttgggtggaaaaaactcaatttgatgcgaaattaacatgtgcattttc

SEQ ID NO: 733694 - DNA, 1703 bp, Homo sapiens
  misc_feature (1687)..(1687): n is a, c, g, or t
tttctttcgacggggtgtcaccgtgtaagccaggatggtcttgatctcctgacctcatgatctgcccacctcggcctcccaaaatgctgggattacaggtgtaagccaccacgcccagccctgaattgtttctttagaactatttctcagctactcaatttatgcataaaagattaaagtattcattaatgaatgttatgacctcagatttgtacacaataagttatacatgtgagatagtggaatatatacagaattaagatggtgaaacttgaaaatttctttctaaagttttcggttagatttctgtattcttcagtaattgcaaattgcagcacaaacatctccacacgtttctgtcctatccatttgttacctctcccaccaccacccctgaatccttgaaatgatagtctcttgagtagtatttaatgtttgcagagggagacaatacaggcatttcccccagacacagagatttttgaaaagttcaacaaacaaggaaaacttgctttggcagagaatttgataaagctttatagctgtactgtgttgaatatgcaaaatcttgagttaatgtggtgatggttactgtggatgttctcttgtttgtgtacatataaatgtttgctccagtggttacctggaaattagtatgcatatattattgattaataatggaatgagagctgttaaaaacattaaagcaaaactaccaacacgacaaaatttaccaaatcatgccacatattgtccttgaaacttaccccatttttacctaaccatatctggtatttgggtttaacttctttttacatttaaaggatacaaagatgtagcttcagaagaaattctatccagtttacaaaaatttagaattaccaaaatatagcatgtaagcttacctgcaatttgaagcacatctttttaaaggtttagtatgatattttggattcagactgaggcttctatgggattagattttcttcagttacttcagtaatcaccataatttaaaaattctggtattataacatttctaattttcttctcttttttataaagttccatcattttgctacagtccaaaagatgagggactgtgctctgccaatgtgactcgctattattttaatccaagatacagaacctgtgatgctttcacctatactggctgtggagggaatgacaataactttgttagcagggaggattgcaaacgtgcatgtgcaaaagctttgaaaaagaaaaagaagatgccaaagcttcgctttgccagtagaatccggaaaattcggaagaagcaattttaaacattcttaatatgtcatcttgtttgtctttatggcttatttgcctttatggttgtatctgaagaataatatgacagcatgaggaaacaaatcattggtgatttattcaccagtttttattaatacaagtcactttttcaaaaatttggatttttttatatataactagctgctattcaaatgtgagtctaccatttttaatttatggttcaactgtttgtgagactgaattcttgcaatgcataagatataaaagcaaatatgaaaaaaaaaaaaaaaaaaaaaaaaaaaaaacaaaaaaacaaaaaaaaaaaaaaaaaaaaaaaaaacaaacaaaaaaacaaacaaaacacaaacaacacaacaaagaaaanaaacaaaaaaaaagaa

SEQ ID NO: 733695 - DNA, 772 bp, Homo sapiens
cctcttacacagtttgcagcgcgggggcggcggggtgacagtccccgtgcatgaatcagccacccctcaggctccgccccggcgggggtcggccggacgctcgccccgcataaagcgggcacccgggccgcctggagcgagaaagccgcgcacctcctcccgccaggcgctttctcggacgccttgcccagcgggccgcccgaccccctgcaccatggaccccgctcgccccctggggctgtcgattctgctgcttttcctgacggaggctgcactgggcgatgctgctcaggagccaacaggaaataacgcggagatctgtctcctgcccctagactacggaccctgccgggccctacttctccgttactactacgacaggtacacgcagagctgccgccagttcctgtacgggggctgcgagggcaacgccaacaatttctacacctgggaggcttgcgacgatgcttgctggaggatagaaaaagttcccaaagtttgccggctgcaagtgagtgtggacgaccagtgtgaggggtccacagaaaagtatttctttaatctaagttccatgacatgtgaaaaattcttttccggtgggtgtcaccggaaccggattgagaacaggtttccagatgaagctacttgtatgggcttctgcgcaccaaagaaaaagtaaatacgatttttatggtatttctatttcacttttttgaaaagacatttgggtggaaaaaactcaatttgatgcgaaattaacatgtgcattttc

SEQ ID NO: 733696 - DNA, 3324 bp, Homo sapiens
cctcttacacagtttgcagcgcgggggcggcggggtgacagtccccgtgcatgaatcagccacccctcaggctccgccccggcgggggtcggccggacgctcgccccgcataaagcgggcacccgggccgcctggagcgagaaagccgcgcacctcctcccgccaggcgctttctcggacgccttgcccagcgggccgcccgaccccctgcaccatggaccccgctcgccccctggggctgtcgattctgctgcttttcctgacggaggctgcactgggcgatgctgctcaggagccaacaggaaataacgcggagatctgtctcctgcccctagactacggaccctgccgggccctacttctccgttactactacgacaggtacacgcagagctgccgccagttcctgtacgggggctgcgagggcaacgccaacaatttctacacctgggaggcttgcgacgatgcttgctggaggatagaaaaagttcccaaagtttgccggctgcaagtgagtgtggacgaccagtgtgaggggtccacagaaaagtatttctttaatctaagttccatgacatgtgaaaaattcttttccggtgggtgtcaccggaaccggattgagaacaggtttccagatgaagctacttgtatgggcttctgcgcaccaaagaaaaagtaaatacgatttttatgttccatcattttgctacagtccaaaagatgagggactgtgctctgccaatgtgactcgctattattttaatccaagatacagaacctgtgatgctttcacctatactggctgtggagggaatgacaataactttgttagcagggaggattgcaaacgtgcatgtgcaaaagctttgaaaaagaaaaagaagatgccaaagcttcgctttgccagtagaatccggaaaattcggaagaagcaattttaaacattcttaatatgtcatcttgtttgtctttatggcttatttgcctttatggttgtatctgaagaataatatgacagcatgaggaaacaaatcattggtgatttattcaccagtttttattaatacaagtcactttttcaaaaatttggatttttttatatataactagctgctattcaaatgtgagtctaccatttttaatttatggttcaactgtttgtgagactgaattcttgcaatgcataagatataaaagcaaatatgactcactcatttcttggggtcgtattcctgatttcagaagaggatcataactgaaacaacataagacaatataatcatgtgcttttaacatatttgagaataaaaaggactagcaaataaaactcattttgcatttaaaagttggattatattttagtcccaagaagacaaagtcgcagattaacaacactttaaaaatattactcccattttattgtgttagattgcagtacaatgaatgaataaggggatttatttaaaagatcttaactttcttgactgatttaaaaagctaatcaatttattaaagccagaaatgttctcctctgggaaagcaatttctatctatttatctaccaatccccactcacatgtatatgtttgtgtttacatagagatagatggttttaagggttttcctattgttaaattatttcctaagacattgtgggttggagaccactaaacttataaaaaaccaaggaaagtaaagtttttcaaatgtttatactgtttaaggtgtttatttatataaaccatgcatgagaaaccatgcataaatttaataatttaaatttcaccagtaaattatcattgattaaatatggtcataccaatgaaataggttttttctttctctgtaataaaacaatttttctaaattcttatgttttcatagcaagattaacatatttaattacaaattaaatatgcaaaatgacaaatgcgtttaccttttgcttgaacaatctttcatttaaaaatttatcccagttattttgacaaataggtatatgcctgagaactttgaatgatgctgaaagctagaagcaaaccaggtactcttcagtcagggactggttgaagattttatggatgaggagttagcaaaatatctatatatgcatatcttctgactcccaggatacataagaaacacagggcctagaacagtatgaataaacacacatatacacaaacatcacagaagatactaaagatattaaaaatgtttacctatagaggtttggagagaacagaggggtggacagttgtggagataatatttgtgtaaatataactgtgatatagtttttatcttggaccatgtaaatatttgacataattaataatcaaaattaaatcacaaaagaaaaagcatttctttaagcattcaaacccaaatgaataccaaatagtggcaaaactacacaaaagatatatacttattttcaatgacttcacaaattaatatgagaatgtctttgggggaatataaaggtgaaaaaattctgaagaaatctcaaaatgcatttttaaatttgttattactttttatttgaatagttttgggagttacaagtggttttttattacatggatgaattatattgcagtgaattctgagattttagtgcactgtgaaaatgcatttagtagtctcattgttaatggtaatactggtgttattttgaacctattgtatctagaatactatgttgtaagaaaacaagtagttacatttctttagaagtcaggattttcagtgttaagagaaaatgagatacaagtatacaatgaaagaaattaagtaaaaatctttgacttaaattggaattagaaatattcatataaattaataactgattttctctatcaaaaaatctgtatttcccacttttccattgaaaagtccttgaagtaatgacaactcagtagcagtagttacaatgaacatcaagactgtggtctctccatactattactcactggttcctaagaaccagtgctcttaggagaatagctgaatccaggtctggggcaggaaatatgtaaaataaacttgggccatcttactccagaaatcaaggaagctatcaaagactaatgaatcatgtcacaaaaacgggagcaatattaaggagctcccactaacctaaaatgagacaatatggccatcaaaacaaataatgaccacaatgtatataaatatatagaaatctgagtttatgattatatacacacactcacctccttggtaccttttggaggtttctagggcattatctcattcatttgaaaacgatgaattaacagaaagaataaagcatttatcctt

SEQ ID NO: 733697 - DNA, 1999 bp, Homo sapiens
  misc_feature (1983)..(1983): n is a, c, g, or t
cctcttacacagtttgcagcgcgggggcggcggggtgacagtccccgtgcatgaatcagccacccctcaggctccgccccggcgggggtcggccggacgctcgccccgcataaagcgggcacccgggccgcctggagcgagaaagccgcgcacctcctcccgccaggcgctttctcggacgccttgcccagcgggccgcccgaccccctgcaccatggaccccgctcgccccctggggctgtcgattctgctgcttttcctgacggaggctgcactgggcgatgctgctcaggagccaacaggaaataacgcggagatctgtctcctgcccctagactacggaccctgccgggccctacttctccgttactactacgacaggtacacgcagagctgccgccagttcctgtacgggggctgcgagggcaacgccaacaatttctacacctgggaggcttgcgacgatgcttgctggaggatagaaaaagttcccaaagtttgccggctgcaagtgagtgtggacgaccagtgtgaggggtccacagaaaagtatttctttaatctaagttccatgacatgtgaaaaattcttttccggtgggtgtcaccggaaccggattgagaacaggtttccagatgaagctacttgtatgggcttctgcgcaccaaagaaaaagtaaatacgatttttatgttccatcattttgctacagtccaaaagatgagggactgtgctctgccaatgtgactcgctattattttaatccaagatacagaacctgtgatgctttcacctatactggctgtggagggaatgacaataactttgttagcagggaggattgcaaacgtgcatgtgcaaaagctttgaaaaagaaaaagaagatgccaaagcttcgctttgccagtagaatccggaaaattcggaagaagcaattttaaacattcttaatatgtcatcttgtttgtctttatggcttatttgcctttatggttgtatctgaagaataatatgacagcatgaggaaacaaatcattggtgatttattcaccagtttttattaatacaagtcactttttcaaaaatttggatttttttatatataactagctgctattcaaatgtgagtctaccatttttaatttatggttcaactgtttgtgagactgaattcttgcaatgcataagatataaaagcaaatatgactcactcatttcttggggtcgtattcctgatttcagaagaggatcataactgaaacaacataagacaatataatcatgtgcttttaacatatttgagaataaaaaggactagcaaataaaactcattttgcatttaaaagttggattatattttagtcccaagaagacaaagtcgcagattaacaacactttaaaaatattactcccattttattgtgttagattgcagtacaatgaatgaataaggggatttatttaaaagatcttaactttcttgactgatttaaaaagctaatcaatttattaaagccagaaatgttctcctctgggaaagcaatttctatctatttatctaccaatccccactcacatgtatatgtttgtgtttacatagagatagatggttttaagggttttcctattgttaaattatttcctaagacattgtgggttggagaccactaaacttataaaaaaccaaggaaagtaaagtttttcaaatgtttatactgtttaaggtgtttatttatataaaccatgcatgagaaaccatgcataaatttaataatttaaatttcaccagtaaattatcattgattaaatatggtcataccaatgaaataggttttttctttctctgtaataaaacaatttttctaaattcttatgttttcatagcaagattaacatatttaattacaaattaaatatgcaaaatgaaaaaaaaaaaaaaaaacaaaaaaaaaaaaaaaacacaaacaacacaacaaagaaaanaaacaaaaaaaaagaa

SEQ ID NO: 733698 - DNA, 2084 bp, Homo sapiens
  misc_feature (1960)..(1960): n is a, c, g, or t
  misc_feature (1965)..(1965): n is a, c, g, or t
  misc_feature (1970)..(1970): n is a, c, g, or t
  misc_feature (2048)..(2048): n is a, c, g, or t
  misc_feature (2061)..(2061): n is a, c, g, or t
  misc_feature (2080)..(2080): n is a, c, g, or t
cctcttacacagtttgcagcgcgggggcggcggggtgacagtccccgtgcatgaatcagccacccctcaggctccgccccggcgggggtcggccggacgctcgccccgcataaagcgggcacccgggccgcctggagcgagaaagccgcgcacctcctcccgccaggcgctttctcggacgccttgcccagcgggccgcccgaccccctgcaccatggaccccgctcgccccctggggctgtcgattctgctgcttttcctgacggaggctgcactgggcgatgctgctcaggagccaacaggaaataacgcggagatctgtctcctgcccctagactacggaccctgccgggccctacttctccgttactactacgacaggtacacgcagagctgccgccagttcctgtacgggggctgcgagggcaacgccaacaatttctacacctgggaggcttgcgacgatgcttgctggaggatagaaaaagttcccaaagtttgccggctgcaagtgagtgtggacgaccagtgtgaggggtccacagaaaagtatttctttaatctaagttccatgacatgtgaaaaattcttttccggtgggtgtcaccggaaccggattgagaacaggtttccagatgaagctacttgtatgggcttctgcgcaccaaagaaaaagtaaatacgatttttatgttccatcattttgctacagtccaaaagatgagggactgtgctctgccaatgtgactcgctattattttaatccaagatacagaacctgtgatgctttcacctatactggctgtggagggaatgacaataactttgttagcagggaggattgcaaacgtgcatgtgcaaaagctttgaaaaagaaaaagaagatgccaaagcttcgctttgccagtagaatccggaaaattcggaagaagcaattttaaacattcttaatatgtcatcttgtttgtctttatggcttatttgcctttatggttgtatctgaagaataatatgacagcatgaggaaacaaatcattggtgatttattcaccagtttttattaatacaagtcactttttcaaaaatttggatttttttatatataactagctgctattcaaatgtgagtctaccatttttaatttatggttcaactgtttgtgagactgaattcttgcaatgcataagatataaaagcaaatatgactcactcatttcttggggtcgtattcctgatttcagaagaggatcataactgaaacaacataagacaatataatcatgtgcttttaacatatttgagaataaaaaggactagcaaataaaactcattttgcatttaaaagttggattatattttagtcccaagaagacaaagtcgcagattaacaacactttaaaaatattactcccattttattgtgttagattgcagtacaatgaatgaataaggggatttatttaaaagatcttaactttcttgactgatttaaaaagctaatcaatttattaaagccagaaatgttctcctctgggaaagcaatttctatctatttatctaccaatccccactcacatgtatatgtttgtgtttacatagagatagatggttttaagggttttcctattgttaaattatttcctaagacattgtgggttggagaccactaaacttataaaaaaccaaggaaagtaaagtttttcaaatgtttatactgtttaaggtgtttatttatataaaccatgcatgagaaaccatgcataaatttaataatttaaatttcaccagtaaattatcattgattaaatatggtcataccaatgaaataggttttttctttctctgtaataaaacaatttttctaaattcttatgttttcatagcaagattaacatatttaattacaaattaaatatgcaaaatgaaaaaaaaaaaaaaaaacaaaaaaaaaaaaaattncctgnggccncaggctttttccctttggtgggggttatttttggcttggccctggccgtccgttttccaccgtcgtgcctgggggaanccccggggggttnccccacctttttccccttnacgg

SEQ ID NO: 733699 - DNA, 2346 bp, Homo sapiens
cctcttacacagtttgcagcgcgggggcggcggggtgacagtccccgtgcatgaatcagccacccctcaggctccgccccggcgggggtcggccggacgctcgccccgcataaagcgggcacccgggccgcctggagcgagaaagccgcgcacctcctcccgccaggcgctttctcggacgccttgcccagcgggccgcccgaccccctgcaccatggaccccgctcgccccctggggctgtcgattctgctgcttttcctgacggaggctgcactgggcgatgctgctcaggagccaacaggaaataacgcggagatctgtctcctgcccctagactacggaccctgccgggccctacttctccgttactactacgacaggtacacgcagagctgccgccagttcctgtacgggggctgcgagggcaacgccaacaatttctacacctgggaggcttgcgacgatgcttgctggaggatagaaaaagttcccaaagtttgccggctgcaagtgagtgtggacgaccagtgtgaggggtccacagaaaagtatttctttaatctaagttccatgacatgtgaaaaattcttttccggtgggtgtcaccggaaccggattgagaacaggtttccagatgaagctacttgtatgggcttctgcgcaccaaagaaaaagtaaatacgatttttatgttccatcattttgctacagtccaaaagatgagggactgtgctctgccaatgtgactcgctattattttaatccaagatacagaacctgtgatgctttcacctatactggctgtggagggaatgacaataactttgttagcagggaggattgcaaacgtgcatgtgcaaaagctttgaaaaagaaaaagaagatgccaaagcttcgctttgccagtagaatccggaaaattcggaagaagcaattttaaacattcttaatatgtcatcttgtttgtctttatggcttatttgcctttatggttgtatctgaagaataatatgacagcatgaggaaacaaatcattggtgatttattcaccagtttttattaatacaagtcactttttcaaaaatttggatttttttatatataactagctgctattcaaatgtgagtctaccatttttaatttatggttcaactgtttgtgagactgaattcttgcaatgcataagatataaaagcaaatatgactcactcatttcttggggtcgtattcctgatttcagaagaggatcataactgaaacaacataagacaatataatcatgtgcttttaacatatttgagaataaaaaggactagcaaataaaactcattttgcatttaaaagttggattatattttagtcccaagaagacaaagtcgcagattaacaacactttaaaaatattactcccattttattgtgttagattgcagtacaatgaatgaataaggggatttatttaaaagatcttaactttcttgactgatttaaaaagctaatcaatttattaaagccagaaatgttctcctctgggaaagcaatttctatctatttatctaccaatccccactcacatgtatatgtttgtgtttacatagagatagatggttttaagggttttcctattgttaaattatttcctaagacattgtgggttggagaccactaaacttataaaaaaccaaggaaagtaaagtttttcaaatgtttatactgtttaaggtgtttatttatataaaccatgcatgagaaaccatgcataaatttaataatttaaatttcaccagtaaattatcattgattaaatatggtcataccaatgaaataggttttttctttctctgtaataaaacaatttttctaaattcttatgttttcatagcaagattaacatatttaattacaaattaaatatgcaaaatgaaaaaaaaaaaaaaaaacaaaaaaaaaaaaaactttgttggggggcttgggccttggaaaaagtttttaaaacccattcgttgttggggggggggccccagtattgtactgtggaccatgcgccaaaggcgtgcttcaaaaggaaaacccggcgccagtgacataggcggctgggggtgtctccccagataaataaaaccgccgggcgcgacacccggggcttttttagaccaatccccgaaggggagacgcggaggagcccaagacgggcgctctaacaaccaggggagtccagagggagcgcgaaataaaatagcggcgcgcgcgtgcggtgagaaacgaacacgtgcacgaccaacgaagaagacaagaggagaaaaacaaaagaacacaagaaaaagcggaaccatacacaacaaag

SEQ ID NO: 733700 - DNA, 2033 bp, Homo sapiens
  misc_feature (2017)..(2017): n is a, c, g, or t
cctcttacacagtttgcagcgcgggggcggcggggtgacagtccccgtgcatgaatcagccacccctcaggctccgccccggcgggggtcggccggacgctcgccccgcataaagcgggcacccgggccgcctggagcgagaaagccgcgcacctcctcccgccaggcgctttctcggacgccttgcccagcgggccgcccgaccccctgcaccatggaccccgctcgccccctggggctgtcgattctgctgcttttcctgacggaggctgcactgggcgatgctgctcaggagccaacaggaaataacgcggagatctgtctcctgcccctagactacggaccctgccgggccctacttctccgttactactacgacaggtacacgcagagctgccgccagttcctgtacgggggctgcgagggcaacgccaacaatttctacacctgggaggcttgcgacgatgcttgctggaggatagaaaaagttcccaaagtttgccggctgcaagtgagtgtggacgaccagtgtgaggggtccacagaaaagtatttctttaatctaagttccatgacatgtgaaaaattcttttccggtgggtgtcaccggaaccggattgagaacaggtttccagatgaagctacttgtatgggcttctgcgcaccaaagaaaaagtaaatacgatttttatgttccatcattttgctacagtccaaaagatgagggactgtgctctgccaatgtgactcgctattattttaatccaagatacagaacctgtgatgctttcacctatactggctgtggagggaatgacaataactttgttagcagggaggattgcaaacgtgcatgtgcaaaagctttgaaaaagaaaaagaagatgccaaagcttcgctttgccagtagaatccggaaaattcggaagaagcaattttaaacattcttaatatgtcatcttgtttgtctttatggcttatttgcctttatggttgtatctgaagaataatatgacagcatgaggaaacaaatcattggtgatttattcaccagtttttattaatacaagtcactttttcaaaaatttggatttttttatatataactagctgctattcaaatgtgagtctaccatttttaatttatggttcaactgtttgtgagactgaattcttgcaatgcataagatataaaagcaaatatgactcactcatttcttggggtcgtattcctgatttcagaagaggatcataactgaaacaacataagacaatataatcatgtgcttttaacatatttgagaataaaaaggactagcaaataaaactcattttgcatttaaaagttggattatattttagtcccaagaagacaaagtcgcagattaacaacactttaaaaatattactcccattttattgtgttagattgcagtacaatgaatgaataaggggatttatttaaaagatcttaactttcttgactgatttaaaaagctaatcaatttattaaagccagaaatgttctcctctgggaaagcaatttctatctatttatctaccaatccccactcacatgtatatgtttgtgtttacatagagatagatggttttaagggttttcctattgttaaattatttcctaagacattgtgggttggagaccactaaacttataaaaaaccaaggaaagtaaagtttttcaaatgtttatactgtttaaggtgtttatttatataaaccatgcatgagaaaccatgcataaatttaataatttaaatttcaccagtaaattatcattgattaaatatggtcataccaatgaaataggttttttctttctctgtaataaaacaatttttctaaattcttatgttttcatagcaagattaacatatttaattacaaattaaatatgcaaaatgaaaaaaaaaaaacaaaaaaacaaaaaaaaaaaaaaaaaaaaaaaaaacaaacaaaaaaacaaacaaaacacaaacaacacaacaaagaaaanaaacaaaaaaaaagaa

SEQ ID NO: 733701 - DNA, 1428 bp, Homo sapiens
  misc_feature (1412)..(1412): n is a, c, g, or t
cctcttacacagtttgcagcgcgggggcggcggggtgacagtccccgtgcatgaatcagccacccctcaggctccgccccggcgggggtcggccggacgctcgccccgcataaagcgggcacccgggccgcctggagcgagaaagccgcgcacctcctcccgccaggcgctttctcggacgccttgcccagcgggccgcccgaccccctgcaccatggaccccgctcgccccctggggctgtcgattctgctgcttttcctgacggaggctgcactgggcgatgctgctcaggagccaacaggaaataacgcggagatctgtctcctgcccctagactacggaccctgccgggccctacttctccgttactactacgacaggtacacgcagagctgccgccagttcctgtacgggggctgcgagggcaacgccaacaatttctacacctgggaggcttgcgacgatgcttgctggaggatagaaaaagttcccaaagtttgccggctgcaagtgagtgtggacgaccagtgtgaggggtccacagaaaagtatttctttaatctaagttccatgacatgtgaaaaattcttttccggtgggtgtcaccggaaccggattgagaacaggtttccagatgaagctacttgtatgggcttctgcgcaccaaagaaaaagtaaatacgatttttatgttccatcattttgctacagtccaaaagatgagggactgtgctctgccaatgtgactcgctattattttaatccaagatacagaacctgtgatgctttcacctatactggctgtggagggaatgacaataactttgttagcagggaggattgcaaacgtgcatgtgcaaaagctttgaaaaagaaaaagaagatgccaaagcttcgctttgccagtagaatccggaaaattcggaagaagcaattttaaacattcttaatatgtcatcttgtttgtctttatggcttatttgcctttatggttgtatctgaagaataatatgacagcatgaggaaacaaatcattggtgatttattcaccagtttttattaatacaagtcactttttcaaaaatttggatttttttatatataactagctgctattcaaatgtgagtctaccatttttaatttatggttcaactgtttgtgagactgaattcttgcaatgcataagatataaaagcaaatatgactcactcatttcttggggtcgtattcctgatttcagaagaggatcataactgaaacaacataagacaatataatcatgtgcttttaacatatttgagaataaaaaggactagcaaataaaaaaaaacaaaaaaaaaaaaaaaaaaaaaaaaaaaaaaaaaaaaaacaaaaaaaaaaaaaaaacacaaacaacacaacaaagaaaanaaacaaaaaaaaagaa

SEQ ID NO: 733702 - DNA, 1513 bp, Homo sapiens
  misc_feature (1389)..(1389): n is a, c, g, or t
  misc_feature (1394)..(1394): n is a, c, g, or t
  misc_feature (1399)..(1399): n is a, c, g, or t
  misc_feature (1477)..(1477): n is a, c, g, or t
  misc_feature (1490)..(1490): n is a, c, g, or t
  misc_feature (1509)..(1509): n is a, c, g, or t
cctcttacacagtttgcagcgcgggggcggcggggtgacagtccccgtgcatgaatcagccacccctcaggctccgccccggcgggggtcggccggacgctcgccccgcataaagcgggcacccgggccgcctggagcgagaaagccgcgcacctcctcccgccaggcgctttctcggacgccttgcccagcgggccgcccgaccccctgcaccatggaccccgctcgccccctggggctgtcgattctgctgcttttcctgacggaggctgcactgggcgatgctgctcaggagccaacaggaaataacgcggagatctgtctcctgcccctagactacggaccctgccgggccctacttctccgttactactacgacaggtacacgcagagctgccgccagttcctgtacgggggctgcgagggcaacgccaacaatttctacacctgggaggcttgcgacgatgcttgctggaggatagaaaaagttcccaaagtttgccggctgcaagtgagtgtggacgaccagtgtgaggggtccacagaaaagtatttctttaatctaagttccatgacatgtgaaaaattcttttccggtgggtgtcaccggaaccggattgagaacaggtttccagatgaagctacttgtatgggcttctgcgcaccaaagaaaaagtaaatacgatttttatgttccatcattttgctacagtccaaaagatgagggactgtgctctgccaatgtgactcgctattattttaatccaagatacagaacctgtgatgctttcacctatactggctgtggagggaatgacaataactttgttagcagggaggattgcaaacgtgcatgtgcaaaagctttgaaaaagaaaaagaagatgccaaagcttcgctttgccagtagaatccggaaaattcggaagaagcaattttaaacattcttaatatgtcatcttgtttgtctttatggcttatttgcctttatggttgtatctgaagaataatatgacagcatgaggaaacaaatcattggtgatttattcaccagtttttattaatacaagtcactttttcaaaaatttggatttttttatatataactagctgctattcaaatgtgagtctaccatttttaatttatggttcaactgtttgtgagactgaattcttgcaatgcataagatataaaagcaaatatgactcactcatttcttggggtcgtattcctgatttcagaagaggatcataactgaaacaacataagacaatataatcatgtgcttttaacatatttgagaataaaaaggactagcaaataaaaaaaaacaaaaaaaaaaaaaaaaaaaaaaaaaaaaaaaaaaaaaacaaaaaaaaaaaaaattncctgnggccncaggctttttccctttggtgggggttatttttggcttggccctggccgtccgttttccaccgtcgtgcctgggggaanccccggggggttnccccacctttttccccttnacgg

SEQ ID NO: 733703 - DNA, 1775 bp, Homo sapiens
cctcttacacagtttgcagcgcgggggcggcggggtgacagtccccgtgcatgaatcagccacccctcaggctccgccccggcgggggtcggccggacgctcgccccgcataaagcgggcacccgggccgcctggagcgagaaagccgcgcacctcctcccgccaggcgctttctcggacgccttgcccagcgggccgcccgaccccctgcaccatggaccccgctcgccccctggggctgtcgattctgctgcttttcctgacggaggctgcactgggcgatgctgctcaggagccaacaggaaataacgcggagatctgtctcctgcccctagactacggaccctgccgggccctacttctccgttactactacgacaggtacacgcagagctgccgccagttcctgtacgggggctgcgagggcaacgccaacaatttctacacctgggaggcttgcgacgatgcttgctggaggatagaaaaagttcccaaagtttgccggctgcaagtgagtgtggacgaccagtgtgaggggtccacagaaaagtatttctttaatctaagttccatgacatgtgaaaaattcttttccggtgggtgtcaccggaaccggattgagaacaggtttccagatgaagctacttgtatgggcttctgcgcaccaaagaaaaagtaaatacgatttttatgttccatcattttgctacagtccaaaagatgagggactgtgctctgccaatgtgactcgctattattttaatccaagatacagaacctgtgatgctttcacctatactggctgtggagggaatgacaataactttgttagcagggaggattgcaaacgtgcatgtgcaaaagctttgaaaaagaaaaagaagatgccaaagcttcgctttgccagtagaatccggaaaattcggaagaagcaattttaaacattcttaatatgtcatcttgtttgtctttatggcttatttgcctttatggttgtatctgaagaataatatgacagcatgaggaaacaaatcattggtgatttattcaccagtttttattaatacaagtcactttttcaaaaatttggatttttttatatataactagctgctattcaaatgtgagtctaccatttttaatttatggttcaactgtttgtgagactgaattcttgcaatgcataagatataaaagcaaatatgactcactcatttcttggggtcgtattcctgatttcagaagaggatcataactgaaacaacataagacaatataatcatgtgcttttaacatatttgagaataaaaaggactagcaaataaaaaaaaacaaaaaaaaaaaaaaaaaaaaaaaaaaaaaaaaaaaaaacaaaaaaaaaaaaaactttgttggggggcttgggccttggaaaaagtttttaaaacccattcgttgttggggggggggccccagtattgtactgtggaccatgcgccaaaggcgtgcttcaaaaggaaaacccggcgccagtgacataggcggctgggggtgtctccccagataaataaaaccgccgggcgcgacacccggggcttttttagaccaatccccgaaggggagacgcggaggagcccaagacgggcgctctaacaaccaggggagtccagagggagcgcgaaataaaatagcggcgcgcgcgtgcggtgagaaacgaacacgtgcacgaccaacgaagaagacaagaggagaaaaacaaaagaacacaagaaaaagcggaaccatacacaacaaag

SEQ ID NO: 733704 - DNA, 1744 bp, Homo sapiens
cctcttacacagtttgcagcgcgggggcggcggggtgacagtccccgtgcatgaatcagccacccctcaggctccgccccggcgggggtcggccggacgctcgccccgcataaagcgggcacccgggccgcctggagcgagaaagccgcgcacctcctcccgccaggcgctttctcggacgccttgcccagcgggccgcccgaccccctgcaccatggaccccgctcgccccctggggctgtcgattctgctgcttttcctgacggaggctgcactgggcgatgctgctcaggagccaacaggaaataacgcggagatctgtctcctgcccctagactacggaccctgccgggccctacttctccgttactactacgacaggtacacgcagagctgccgccagttcctgtacgggggctgcgagggcaacgccaacaatttctacacctgggaggcttgcgacgatgcttgctggaggatagaaaaagttcccaaagtttgccggctgcaagtgagtgtggacgaccagtgtgaggggtccacagaaaagtatttctttaatctaagttccatgacatgtgaaaaattcttttccggtgggtgtcaccggaaccggattgagaacaggtttccagatgaagctacttgtatgggcttctgcgcaccaaagaaaaagtaaatacgatttttatgttccatcattttgctacagtccaaaagatgagggactgtgctctgccaatgtgactcgctattattttaatccaagatacagaacctgtgatgctttcacctatactggctgtggagggaatgacaataactttgttagcagggaggattgcaaacgtgcatgtgcaaaagctttgaaaaagaaaaagaagatgccaaagcttcgctttgccagtagaatccggaaaattcggaagaagcaattttaaacattcttaatatgtcatcttgtttgtctttatggcttatttgcctttatggttgtatctgaagaataatatgacagcatgaggaaacaaatcattggtgatttattcaccagtttttattaatacaagtcactttttcaaaaatttggatttttttatatataactagctgctattcaaatgtgagtctaccatttttaatttatggttcaactgtttgtgagactgaattcttgcaatgcataagatataaaagcaaatatgactcactcatttcttggggtcgtattcctgatttcagaagaggatcataactgaaacaacataagacaatataatcatgtgcttttaacatatttgagaataaaaaggactagcaaataaaaaaaaacaaaaaaaaaaaaaaaaaaaaaactttgttggggggcttgggccttggaaaaagtttttaaaacccattcgttgttggggggggggccccagtattgtactgtggaccatgcgccaaaggcgtgcttcaaaaggaaaacccggcgccagtgacataggcggctgggggtgtctccccagataaataaaaccgccgggcgcgacacccggggcttttttagaccaatccccgaaggggagacgcggaggagcccaagacgggcgctctaacaaccaggggagtccagagggagcgcgaaataaaatagcggcgcgcgcgtgcggtgagaaacgaacacgtgcacgaccaacgaagaagacaagaggagaaaaacaaaagaacacaagaaaaagcggaaccatacacaacaaag

SEQ ID NO: 733705 - DNA, 1481 bp, Homo sapiens
  misc_feature (1465)..(1465): n is a, c, g, or t
cctcttacacagtttgcagcgcgggggcggcggggtgacagtccccgtgcatgaatcagccacccctcaggctccgccccggcgggggtcggccggacgctcgccccgcataaagcgggcacccgggccgcctggagcgagaaagccgcgcacctcctcccgccaggcgctttctcggacgccttgcccagcgggccgcccgaccccctgcaccatggaccccgctcgccccctggggctgtcgattctgctgcttttcctgacggaggctgcactgggcgatgctgctcaggagccaacaggaaataacgcggagatctgtctcctgcccctagactacggaccctgccgggccctacttctccgttactactacgacaggtacacgcagagctgccgccagttcctgtacgggggctgcgagggcaacgccaacaatttctacacctgggaggcttgcgacgatgcttgctggaggatagaaaaagttcccaaagtttgccggctgcaagtgagtgtggacgaccagtgtgaggggtccacagaaaagtatttctttaatctaagttccatgacatgtgaaaaattcttttccggtgggtgtcaccggaaccggattgagaacaggtttccagatgaagctacttgtatgggcttctgcgcaccaaagaaaaagtaaatacgatttttatgttccatcattttgctacagtccaaaagatgagggactgtgctctgccaatgtgactcgctattattttaatccaagatacagaacctgtgatgctttcacctatactggctgtggagggaatgacaataactttgttagcagggaggattgcaaacgtgcatgtgcaaaagctttgaaaaagaaaaagaagatgccaaagcttcgctttgccagtagaatccggaaaattcggaagaagcaattttaaacattcttaatatgtcatcttgtttgtctttatggcttatttgcctttatggttgtatctgaagaataatatgacagcatgaggaaacaaatcattggtgatttattcaccagtttttattaatacaagtcactttttcaaaaatttggatttttttatatataactagctgctattcaaatgtgagtctaccatttttaatttatggttcaactgtttgtgagactgaattcttgcaatgcataagatataaaagcaaatatgactcactcatttcttggggtcgtattcctgatttcagaagaggatcataactgaaacaacataagacaatataatcatgtgcttttaacatatttgagaataaaaaggactagcaaataaaaaaaaacaaaaaaaaaaaaaaaaaaaaaaaaaaaaaaaaaaaaaaaaaaaaaaaaaaaacaaaaaaacaaaaaaaaaaaaaaaaaaaaaaaaaacaaacaaaaaaacaaacaaaacacaaacaacacaacaaagaaaanaaacaaaaaaaaagaa

SEQ ID NO: 733706 - DNA, 1763 bp, Homo sapiens
cctcttacacagtttgcagcgcgggggcggcggggtgacagtccccgtgcatgaatcagccacccctcaggctccgccccggcgggggtcggccggacgctcgccccgcataaagcgggcacccgggccgcctggagcgagaaagccgcgcacctcctcccgccaggcgctttctcggacgccttgcccagcgggccgcccgaccccctgcaccatggaccccgctcgccccctggggctgtcgattctgctgcttttcctgacggaggctgcactgggcgatgctgctcaggagccaacaggaaataacgcggagatctgtctcctgcccctagactacggaccctgccgggccctacttctccgttactactacgacaggtacacgcagagctgccgccagttcctgtacgggggctgcgagggcaacgccaacaatttctacacctgggaggcttgcgacgatgcttgctggaggatagaaaaagttcccaaagtttgccggctgcaagtgagtgtggacgaccagtgtgaggggtccacagaaaagtatttctttaatctaagttccatgacatgtgaaaaattcttttccggtgggtgtcaccggaaccggattgagaacaggtttccagatgaagctacttgtatgggcttctgcgcaccaaagaaaaagtaaatacgatttttatgttccatcattttgctacagtccaaaagatgagggactgtgctctgccaatgtgactcgctattattttaatccaagatacagaacctgtgatgctttcacctatactggctgtggagggaatgacaataactttgttagcagggaggattgcaaacgtgcatgtgcaaaagctttgaaaaagaaaaagaagatgccaaagcttcgctttgccagtagaatccggaaaattcggaagaagcaattttaaacattcttaatatgtcatcttgtttgtctttatggcttatttgcctttatggttgtatctgaagaataatatgacagcatgaggaaacaaatcattggtgatttattcaccagtttttattaatacaagtcactttttcaaaaatttggatttttttatatataactagctgctattcaaatgtgagtctaccatttttaatttatggttcaactgtttgtgagactgaattcttgcaatgcataagatataaaagcaaatatgactcactcatttcttggggtcgtattcctgatttcagaagaggatcataactgaaacaacataagacaatataatcatgtgcttttaacatatttgagaataaaaaggactagcaaataaaaaaaaacaaaaaaaaaaaaaaaaaaaaaaaaaaaaaaaaaaaaaaaaactttgttggggggcttgggccttggaaaaagtttttaaaacccattcgttgttggggggggggccccagtattgtactgtggaccatgcgccaaaggcgtgcttcaaaaggaaaacccggcgccagtgacataggcggctgggggtgtctccccagataaataaaaccgccgggcgcgacacccggggcttttttagaccaatccccgaaggggagacgcggaggagcccaagacgggcgctctaacaaccaggggagtccagagggagcgcgaaataaaatagcggcgcgcgcgtgcggtgagaaacgaacacgtgcacgaccaacgaagaagacaagaggagaaaaacaaaagaacacaagaaaaagcggaaccatacacaacaaag

SEQ ID NO: 733707 - DNA, 1462 bp, Homo sapiens
cctcttacacagtttgcagcgcgggggcggcggggtgacagtccccgtgcatgaatcagccacccctcaggctccgccccggcgggggtcggccggacgctcgccccgcataaagcgggcacccgggccgcctggagcgagaaagccgcgcacctcctcccgccaggcgctttctcggacgccttgcccagcgggccgcccgaccccctgcaccatggaccccgctcgccccctggggctgtcgattctgctgcttttcctgacggaggctgcactgggcgatgctgctcaggagccaacaggaaataacgcggagatctgtctcctgcccctagactacggaccctgccgggccctacttctccgttactactacgacaggtacacgcagagctgccgccagttcctgtacgggggctgcgagggcaacgccaacaatttctacacctgggaggcttgcgacgatgcttgctggaggatagaaaaagttcccaaagtttgccggctgcaagtgagtgtggacgaccagtgtgaggggtccacagaaaagtatttctttaatctaagttccatgacatgtgaaaaattcttttccggtgggtgtcaccggaaccggattgagaacaggtttccagatgaagctacttgtatgggcttctgcgcaccaaagaaaaagtaaatacgatttttatgttccatcattttgctacagtccaaaagatgagggactgtgctctgccaatgtgactcgctattattttaatccaagatacagaacctgtgatgctttcacctatactggctgtggagggaatgacaataactttgttagcagggaggattgcaaacgtgcatgtgcaaaagctttgaaaaagaaaaagaagatgccaaagcttcgctttgccagtagaatccggaaaattcggaagaagcaattttaaacattcttaatatgtcatcttgtttgtctttatggcttatttgcctttatggttgtatctgaagaataatatgacagcatgaggaaacaaatcattggtgatttattcaccagtttttattaatacaagtcactttttcaaaaatttggatttttttatatataactagctgctattcaaatgtgagtctaccatttttaatttatggttcaactgtttgtgagactgaattcttgcaatgcataagatataaaagcaaatatgactcactcatttcttggggtcgtattcctgatttcagaagaggatcataactgaaacaacataagacaatataatcatgtgcttttaacatatttgagaataaaaaggactagcaaatagggttgcaataaccctttggttaaagtgggtatttttgccagaaaaagggggtaaaattaaattccctttggtggttgggagagaaagggggtaacaactcggggagagaataaaaggtgggggatttacccactggg

SEQ ID NO: 733708 - DNA, 1397 bp, Homo sapiens
  misc_feature (1381)..(1381): n is a, c, g, or t
cctcttacacagtttgcagcgcgggggcggcggggtgacagtccccgtgcatgaatcagccacccctcaggctccgccccggcgggggtcggccggacgctcgccccgcataaagcgggcacccgggccgcctggagcgagaaagccgcgcacctcctcccgccaggcgctttctcggacgccttgcccagcgggccgcccgaccccctgcaccatggaccccgctcgccccctggggctgtcgattctgctgcttttcctgacggaggctgcactgggcgatgctgctcaggagccaacaggaaataacgcggagatctgtctcctgcccctagactacggaccctgccgggccctacttctccgttactactacgacaggtacacgcagagctgccgccagttcctgtacgggggctgcgagggcaacgccaacaatttctacacctgggaggcttgcgacgatgcttgctggaggatagaaaaagttcccaaagtttgccggctgcaagtgagtgtggacgaccagtgtgaggggtccacagaaaagtatttctttaatctaagttccatgacatgtgaaaaattcttttccggtgggtgtcaccggaaccggattgagaacaggtttccagatgaagctacttgtatgggcttctgcgcaccaaagaaaaagtaaatacgatttttatgttccatcattttgctacagtccaaaagatgagggactgtgctctgccaatgtgactcgctattattttaatccaagatacagaacctgtgatgctttcacctatactggctgtggagggaatgacaataactttgttagcagggaggattgcaaacgtgcatgtgcaaaagctttgaaaaagaaaaagaagatgccaaagcttcgctttgccagtagaatccggaaaattcggaagaagcaattttaaacattcttaatatgtcatcttgtttgtctttatggcttatttgcctttatggttgtatctgaagaataatatgacagcatgaggaaacaaatcattggtgatttattcaccagtttttattaatacaagtcactttttcaaaaatttggatttttttatatataactagctgctattcaaatgtgagtctaccatttttaatttatggttcaactgtttgtgagactgaattcttgcaatgcataagatataaaagcaaatatgactcactcatttcttggggtcgtattcctgatttcagaagaggatcataactgaaacaacataagacaatataatcatgtgcttttaacatatttgagaataaaaaggactagcaaataaaaaaaaaaaaaaaaacaaaaaaaaaaaaaaaacacaaacaacacaacaaagaaaanaaacaaaaaaaaagaa

SEQ ID NO: 733709 - DNA, 1482 bp, Homo sapiens
  misc_feature (1358)..(1358): n is a, c, g, or t
  misc_feature (1363)..(1363): n is a, c, g, or t
  misc_feature (1368)..(1368): n is a, c, g, or t
  misc_feature (1446)..(1446): n is a, c, g, or t
  misc_feature (1459)..(1459): n is a, c, g, or t
  misc_feature (1478)..(1478): n is a, c, g, or t
cctcttacacagtttgcagcgcgggggcggcggggtgacagtccccgtgcatgaatcagccacccctcaggctccgccccggcgggggtcggccggacgctcgccccgcataaagcgggcacccgggccgcctggagcgagaaagccgcgcacctcctcccgccaggcgctttctcggacgccttgcccagcgggccgcccgaccccctgcaccatggaccccgctcgccccctggggctgtcgattctgctgcttttcctgacggaggctgcactgggcgatgctgctcaggagccaacaggaaataacgcggagatctgtctcctgcccctagactacggaccctgccgggccctacttctccgttactactacgacaggtacacgcagagctgccgccagttcctgtacgggggctgcgagggcaacgccaacaatttctacacctgggaggcttgcgacgatgcttgctggaggatagaaaaagttcccaaagtttgccggctgcaagtgagtgtggacgaccagtgtgaggggtccacagaaaagtatttctttaatctaagttccatgacatgtgaaaaattcttttccggtgggtgtcaccggaaccggattgagaacaggtttccagatgaagctacttgtatgggcttctgcgcaccaaagaaaaagtaaatacgatttttatgttccatcattttgctacagtccaaaagatgagggactgtgctctgccaatgtgactcgctattattttaatccaagatacagaacctgtgatgctttcacctatactggctgtggagggaatgacaataactttgttagcagggaggattgcaaacgtgcatgtgcaaaagctttgaaaaagaaaaagaagatgccaaagcttcgctttgccagtagaatccggaaaattcggaagaagcaattttaaacattcttaatatgtcatcttgtttgtctttatggcttatttgcctttatggttgtatctgaagaataatatgacagcatgaggaaacaaatcattggtgatttattcaccagtttttattaatacaagtcactttttcaaaaatttggatttttttatatataactagctgctattcaaatgtgagtctaccatttttaatttatggttcaactgtttgtgagactgaattcttgcaatgcataagatataaaagcaaatatgactcactcatttcttggggtcgtattcctgatttcagaagaggatcataactgaaacaacataagacaatataatcatgtgcttttaacatatttgagaataaaaaggactagcaaataaaaaaaaaaaaaaaaacaaaaaaaaaaaaaattncctgnggccncaggctttttccctttggtgggggttatttttggcttggccctggccgtccgttttccaccgtcgtgcctgggggaanccccggggggttnccccacctttttccccttnacgg

SEQ ID NO: 733710 - DNA, 1744 bp, Homo sapiens
cctcttacacagtttgcagcgcgggggcggcggggtgacagtccccgtgcatgaatcagccacccctcaggctccgccccggcgggggtcggccggacgctcgccccgcataaagcgggcacccgggccgcctggagcgagaaagccgcgcacctcctcccgccaggcgctttctcggacgccttgcccagcgggccgcccgaccccctgcaccatggaccccgctcgccccctggggctgtcgattctgctgcttttcctgacggaggctgcactgggcgatgctgctcaggagccaacaggaaataacgcggagatctgtctcctgcccctagactacggaccctgccgggccctacttctccgttactactacgacaggtacacgcagagctgccgccagttcctgtacgggggctgcgagggcaacgccaacaatttctacacctgggaggcttgcgacgatgcttgctggaggatagaaaaagttcccaaagtttgccggctgcaagtgagtgtggacgaccagtgtgaggggtccacagaaaagtatttctttaatctaagttccatgacatgtgaaaaattcttttccggtgggtgtcaccggaaccggattgagaacaggtttccagatgaagctacttgtatgggcttctgcgcaccaaagaaaaagtaaatacgatttttatgttccatcattttgctacagtccaaaagatgagggactgtgctctgccaatgtgactcgctattattttaatccaagatacagaacctgtgatgctttcacctatactggctgtggagggaatgacaataactttgttagcagggaggattgcaaacgtgcatgtgcaaaagctttgaaaaagaaaaagaagatgccaaagcttcgctttgccagtagaatccggaaaattcggaagaagcaattttaaacattcttaatatgtcatcttgtttgtctttatggcttatttgcctttatggttgtatctgaagaataatatgacagcatgaggaaacaaatcattggtgatttattcaccagtttttattaatacaagtcactttttcaaaaatttggatttttttatatataactagctgctattcaaatgtgagtctaccatttttaatttatggttcaactgtttgtgagactgaattcttgcaatgcataagatataaaagcaaatatgactcactcatttcttggggtcgtattcctgatttcagaagaggatcataactgaaacaacataagacaatataatcatgtgcttttaacatatttgagaataaaaaggactagcaaataaaaaaaaaaaaaaaaacaaaaaaaaaaaaaactttgttggggggcttgggccttggaaaaagtttttaaaacccattcgttgttggggggggggccccagtattgtactgtggaccatgcgccaaaggcgtgcttcaaaaggaaaacccggcgccagtgacataggcggctgggggtgtctccccagataaataaaaccgccgggcgcgacacccggggcttttttagaccaatccccgaaggggagacgcggaggagcccaagacgggcgctctaacaaccaggggagtccagagggagcgcgaaataaaatagcggcgcgcgcgtgcggtgagaaacgaacacgtgcacgaccaacgaagaagacaagaggagaaaaacaaaagaacacaagaaaaagcggaaccatacacaacaaag

SEQ ID NO: 733711 - DNA, 1450 bp, Homo sapiens
  misc_feature (1434)..(1434): n is a, c, g, or t
cctcttacacagtttgcagcgcgggggcggcggggtgacagtccccgtgcatgaatcagccacccctcaggctccgccccggcgggggtcggccggacgctcgccccgcataaagcgggcacccgggccgcctggagcgagaaagccgcgcacctcctcccgccaggcgctttctcggacgccttgcccagcgggccgcccgaccccctgcaccatggaccccgctcgccccctggggctgtcgattctgctgcttttcctgacggaggctgcactgggcgatgctgctcaggagccaacaggaaataacgcggagatctgtctcctgcccctagactacggaccctgccgggccctacttctccgttactactacgacaggtacacgcagagctgccgccagttcctgtacgggggctgcgagggcaacgccaacaatttctacacctgggaggcttgcgacgatgcttgctggaggatagaaaaagttcccaaagtttgccggctgcaagtgagtgtggacgaccagtgtgaggggtccacagaaaagtatttctttaatctaagttccatgacatgtgaaaaattcttttccggtgggtgtcaccggaaccggattgagaacaggtttccagatgaagctacttgtatgggcttctgcgcaccaaagaaaaagtaaatacgatttttatgttccatcattttgctacagtccaaaagatgagggactgtgctctgccaatgtgactcgctattattttaatccaagatacagaacctgtgatgctttcacctatactggctgtggagggaatgacaataactttgttagcagggaggattgcaaacgtgcatgtgcaaaagctttgaaaaagaaaaagaagatgccaaagcttcgctttgccagtagaatccggaaaattcggaagaagcaattttaaacattcttaatatgtcatcttgtttgtctttatggcttatttgcctttatggttgtatctgaagaataatatgacagcatgaggaaacaaatcattggtgatttattcaccagtttttattaatacaagtcactttttcaaaaatttggatttttttatatataactagctgctattcaaatgtgagtctaccatttttaatttatggttcaactgtttgtgagactgaattcttgcaatgcataagatataaaagcaaatatgactcactcatttcttggggtcgtattcctgatttcagaagaggatcataactgaaacaacataagacaatataatcatgtgcttttaacatatttgagaataaaaaggactagcaaataaaaaaaaaaaaaaaaaaaaaaaaaaaaaaacaaaaaaacaaaaaaaaaaaaaaaaaaaaaaaaaacaaacaaaaaaacaaacaaaacacaaacaacacaacaaagaaaanaaacaaaaaaaaagaa

SEQ ID NO: 733712 - DNA, 1732 bp, Homo sapiens
cctcttacacagtttgcagcgcgggggcggcggggtgacagtccccgtgcatgaatcagccacccctcaggctccgccccggcgggggtcggccggacgctcgccccgcataaagcgggcacccgggccgcctggagcgagaaagccgcgcacctcctcccgccaggcgctttctcggacgccttgcccagcgggccgcccgaccccctgcaccatggaccccgctcgccccctggggctgtcgattctgctgcttttcctgacggaggctgcactgggcgatgctgctcaggagccaacaggaaataacgcggagatctgtctcctgcccctagactacggaccctgccgggccctacttctccgttactactacgacaggtacacgcagagctgccgccagttcctgtacgggggctgcgagggcaacgccaacaatttctacacctgggaggcttgcgacgatgcttgctggaggatagaaaaagttcccaaagtttgccggctgcaagtgagtgtggacgaccagtgtgaggggtccacagaaaagtatttctttaatctaagttccatgacatgtgaaaaattcttttccggtgggtgtcaccggaaccggattgagaacaggtttccagatgaagctacttgtatgggcttctgcgcaccaaagaaaaagtaaatacgatttttatgttccatcattttgctacagtccaaaagatgagggactgtgctctgccaatgtgactcgctattattttaatccaagatacagaacctgtgatgctttcacctatactggctgtggagggaatgacaataactttgttagcagggaggattgcaaacgtgcatgtgcaaaagctttgaaaaagaaaaagaagatgccaaagcttcgctttgccagtagaatccggaaaattcggaagaagcaattttaaacattcttaatatgtcatcttgtttgtctttatggcttatttgcctttatggttgtatctgaagaataatatgacagcatgaggaaacaaatcattggtgatttattcaccagtttttattaatacaagtcactttttcaaaaatttggatttttttatatataactagctgctattcaaatgtgagtctaccatttttaatttatggttcaactgtttgtgagactgaattcttgcaatgcataagatataaaagcaaatatgactcactcatttcttggggtcgtattcctgatttcagaagaggatcataactgaaacaacataagacaatataatcatgtgcttttaacatatttgagaataaaaaggactagcaaataaaaaaaaaaaaaaaaaaaactttgttggggggcttgggccttggaaaaagtttttaaaacccattcgttgttggggggggggccccagtattgtactgtggaccatgcgccaaaggcgtgcttcaaaaggaaaacccggcgccagtgacataggcggctgggggtgtctccccagataaataaaaccgccgggcgcgacacccggggcttttttagaccaatccccgaaggggagacgcggaggagcccaagacgggcgctctaacaaccaggggagtccagagggagcgcgaaataaaatagcggcgcgcgcgtgcggtgagaaacgaacacgtgcacgaccaacgaagaagacaagaggagaaaaacaaaagaacacaagaaaaagcggaaccatacacaacaaag

SEQ ID NO: 733713 - DNA, 1431 bp, Homo sapiens
  misc_feature (1415)..(1415): n is a, c, g, or t
cctcttacacagtttgcagcgcgggggcggcggggtgacagtccccgtgcatgaatcagccacccctcaggctccgccccggcgggggtcggccggacgctcgccccgcataaagcgggcacccgggccgcctggagcgagaaagccgcgcacctcctcccgccaggcgctttctcggacgccttgcccagcgggccgcccgaccccctgcaccatggaccccgctcgccccctggggctgtcgattctgctgcttttcctgacggaggctgcactgggcgatgctgctcaggagccaacaggaaataacgcggagatctgtctcctgcccctagactacggaccctgccgggccctacttctccgttactactacgacaggtacacgcagagctgccgccagttcctgtacgggggctgcgagggcaacgccaacaatttctacacctgggaggcttgcgacgatgcttgctggaggatagaaaaagttcccaaagtttgccggctgcaagtgagtgtggacgaccagtgtgaggggtccacagaaaagtatttctttaatctaagttccatgacatgtgaaaaattcttttccggtgggtgtcaccggaaccggattgagaacaggtttccagatgaagctacttgtatgggcttctgcgcaccaaagaaaaagtaaatacgatttttatgttccatcattttgctacagtccaaaagatgagggactgtgctctgccaatgtgactcgctattattttaatccaagatacagaacctgtgatgctttcacctatactggctgtggagggaatgacaataactttgttagcagggaggattgcaaacgtgcatgtgcaaaagctttgaaaaagaaaaagaagatgccaaagcttcgctttgccagtagaatccggaaaattcggaagaagcaattttaaacattcttaatatgtcatcttgtttgtctttatggcttatttgcctttatggttgtatctgaagaataatatgacagcatgaggaaacaaatcattggtgatttattcaccagtttttattaatacaagtcactttttcaaaaatttggatttttttatatataactagctgctattcaaatgtgagtctaccatttttaatttatggttcaactgtttgtgagactgaattcttgcaatgcataagatataaaagcaaatatgactcactcatttcttggggtcgtattcctgatttcagaagaggatcataactgaaacaacataagacaatataatcatgtgcttttaacatatttgagaataaaaaggactagcaaataaaaaaaaaaaacaaaaaaacaaaaaaaaaaaaaaaaaaaaaaaaaacaaacaaaaaaacaaacaaaacacaaacaacacaacaaagaaaanaaacaaaaaaaaagaa

SEQ ID NO: 733714 - DNA, 1319 bp, Homo sapiens
cctcttacacagtttgcagcgcgggggcggcggggtgacagtccccgtgcatgaatcagccacccctcaggctccgccccggcgggggtcggccggacgctcgccccgcataaagcgggcacccgggccgcctggagcgagaaagccgcgcacctcctcccgccaggcgctttctcggacgccttgcccagcgggccgcccgaccccctgcaccatggaccccgctcgccccctggggctgtcgattctgctgcttttcctgacggaggctgcactgggcgatgctgctcaggagccaacaggaaataacgcggagatctgtctcctgcccctagactacggaccctgccgggccctacttctccgttactactacgacaggtacacgcagagctgccgccagttcctgtacgggggctgcgagggcaacgccaacaatttctacacctgggaggcttgcgacgatgcttgctggaggatagaaaaagttcccaaagtttgccggctgcaagtgagtgtggacgaccagtgtgaggggtccacagaaaagtatttctttaatctaagttccatgacatgtgaaaaattcttttccggtgggtgtcaccggaaccggattgagaacaggtttccagatgaagctacttgtatgggcttctgcgcaccaaagaaaaagtaaatacgatttttatgttccatcattttgctacagtccaaaagatgagggactgtgctctgccaatgtgactcgctattattttaatccaagatacagaacctgtgatgctttcacctatactggctgtggagggaatgacaataactttgttagcagggaggattgcaaacgtgcatgtgcaaaagctttgaaaaagaaaaagaagatgccaaagcttcgctttgccagtagaatccggaaaattcggaagaagcaattttaaacattcttaatatgtcatcttgtttgtctttatggcttatttgcctttatggttgtatctgaagaataatatgacagcatgaggaaacaaatcattggtgatttattcaccagtttttattaatacaagtcactttttcaaaaatttggatttttttatatataactagctgctattcaaatgtgagtctaccatttttaatttatggttcaactgtttgtgagactgaattcttgcaatgcataagatataaaagcaaatatgactcactcatttcttggggtcgtattcctgatttcagaagaggatcataactgaaacaacattaactttcaggatcacgatgtcactcaaggaacagctatgccatagtacgtc

SEQ ID NO: 733715 - DNA, 1309 bp, Homo sapiens
  misc_feature (1293)..(1293): n is a, c, g, or t
cctcttacacagtttgcagcgcgggggcggcggggtgacagtccccgtgcatgaatcagccacccctcaggctccgccccggcgggggtcggccggacgctcgccccgcataaagcgggcacccgggccgcctggagcgagaaagccgcgcacctcctcccgccaggcgctttctcggacgccttgcccagcgggccgcccgaccccctgcaccatggaccccgctcgccccctggggctgtcgattctgctgcttttcctgacggaggctgcactgggcgatgctgctcaggagccaacaggaaataacgcggagatctgtctcctgcccctagactacggaccctgccgggccctacttctccgttactactacgacaggtacacgcagagctgccgccagttcctgtacgggggctgcgagggcaacgccaacaatttctacacctgggaggcttgcgacgatgcttgctggaggatagaaaaagttcccaaagtttgccggctgcaagtgagtgtggacgaccagtgtgaggggtccacagaaaagtatttctttaatctaagttccatgacatgtgaaaaattcttttccggtgggtgtcaccggaaccggattgagaacaggtttccagatgaagctacttgtatgggcttctgcgcaccaaagaaaaagtaaatacgatttttatgttccatcattttgctacagtccaaaagatgagggactgtgctctgccaatgtgactcgctattattttaatccaagatacagaacctgtgatgctttcacctatactggctgtggagggaatgacaataactttgttagcagggaggattgcaaacgtgcatgtgcaaaagctttgaaaaagaaaaagaagatgccaaagcttcgctttgccagtagaatccggaaaattcggaagaagcaattttaaacattcttaatatgtcatcttgtttgtctttatggcttatttgcctttatggttgtatctgaagaataatatgacagcatgaggaaacaaatcattggtgatttattcaccagtttttattaatacaagtcactttttcaaaaatttggatttttttatatataactagctgctattcaaatgtgagtctaccatttttaatttatggttcaactgtttgtgagactgaattcttgcaatgcataagatataaaagcaaatatgaaaaaaaacaaaaaaaaaaaaaaaaaaaaaaaaaaaaaaaaaaaaaacaaaaaaaaaaaaaaaacacaaacaacacaacaaagaaaanaaacaaaaaaaaagaa

SEQ ID NO: 733716 - DNA, 1394 bp, Homo sapiens
  misc_feature (1270)..(1270): n is a, c, g, or t
  misc_feature (1275)..(1275): n is a, c, g, or t
  misc_feature (1280)..(1280): n is a, c, g, or t
  misc_feature (1358)..(1358): n is a, c, g, or t
  misc_feature (1371)..(1371): n is a, c, g, or t
  misc_feature (1390)..(1390): n is a, c, g, or t
cctcttacacagtttgcagcgcgggggcggcggggtgacagtccccgtgcatgaatcagccacccctcaggctccgccccggcgggggtcggccggacgctcgccccgcataaagcgggcacccgggccgcctggagcgagaaagccgcgcacctcctcccgccaggcgctttctcggacgccttgcccagcgggccgcccgaccccctgcaccatggaccccgctcgccccctggggctgtcgattctgctgcttttcctgacggaggctgcactgggcgatgctgctcaggagccaacaggaaataacgcggagatctgtctcctgcccctagactacggaccctgccgggccctacttctccgttactactacgacaggtacacgcagagctgccgccagttcctgtacgggggctgcgagggcaacgccaacaatttctacacctgggaggcttgcgacgatgcttgctggaggatagaaaaagttcccaaagtttgccggctgcaagtgagtgtggacgaccagtgtgaggggtccacagaaaagtatttctttaatctaagttccatgacatgtgaaaaattcttttccggtgggtgtcaccggaaccggattgagaacaggtttccagatgaagctacttgtatgggcttctgcgcaccaaagaaaaagtaaatacgatttttatgttccatcattttgctacagtccaaaagatgagggactgtgctctgccaatgtgactcgctattattttaatccaagatacagaacctgtgatgctttcacctatactggctgtggagggaatgacaataactttgttagcagggaggattgcaaacgtgcatgtgcaaaagctttgaaaaagaaaaagaagatgccaaagcttcgctttgccagtagaatccggaaaattcggaagaagcaattttaaacattcttaatatgtcatcttgtttgtctttatggcttatttgcctttatggttgtatctgaagaataatatgacagcatgaggaaacaaatcattggtgatttattcaccagtttttattaatacaagtcactttttcaaaaatttggatttttttatatataactagctgctattcaaatgtgagtctaccatttttaatttatggttcaactgtttgtgagactgaattcttgcaatgcataagatataaaagcaaatatgaaaaaaaacaaaaaaaaaaaaaaaaaaaaaaaaaaaaaaaaaaaaaacaaaaaaaaaaaaaattncctgnggccncaggctttttccctttggtgggggttatttttggcttggccctggccgtccgttttccaccgtcgtgcctgggggaanccccggggggttnccccacctttttccccttnacgg

SEQ ID NO: 733717 - DNA, 1656 bp, Homo sapiens
cctcttacacagtttgcagcgcgggggcggcggggtgacagtccccgtgcatgaatcagccacccctcaggctccgccccggcgggggtcggccggacgctcgccccgcataaagcgggcacccgggccgcctggagcgagaaagccgcgcacctcctcccgccaggcgctttctcggacgccttgcccagcgggccgcccgaccccctgcaccatggaccccgctcgccccctggggctgtcgattctgctgcttttcctgacggaggctgcactgggcgatgctgctcaggagccaacaggaaataacgcggagatctgtctcctgcccctagactacggaccctgccgggccctacttctccgttactactacgacaggtacacgcagagctgccgccagttcctgtacgggggctgcgagggcaacgccaacaatttctacacctgggaggcttgcgacgatgcttgctggaggatagaaaaagttcccaaagtttgccggctgcaagtgagtgtggacgaccagtgtgaggggtccacagaaaagtatttctttaatctaagttccatgacatgtgaaaaattcttttccggtgggtgtcaccggaaccggattgagaacaggtttccagatgaagctacttgtatgggcttctgcgcaccaaagaaaaagtaaatacgatttttatgttccatcattttgctacagtccaaaagatgagggactgtgctctgccaatgtgactcgctattattttaatccaagatacagaacctgtgatgctttcacctatactggctgtggagggaatgacaataactttgttagcagggaggattgcaaacgtgcatgtgcaaaagctttgaaaaagaaaaagaagatgccaaagcttcgctttgccagtagaatccggaaaattcggaagaagcaattttaaacattcttaatatgtcatcttgtttgtctttatggcttatttgcctttatggttgtatctgaagaataatatgacagcatgaggaaacaaatcattggtgatttattcaccagtttttattaatacaagtcactttttcaaaaatttggatttttttatatataactagctgctattcaaatgtgagtctaccatttttaatttatggttcaactgtttgtgagactgaattcttgcaatgcataagatataaaagcaaatatgaaaaaaaacaaaaaaaaaaaaaaaaaaaaaaaaaaaaaaaaaaaaaacaaaaaaaaaaaaaactttgttggggggcttgggccttggaaaaagtttttaaaacccattcgttgttggggggggggccccagtattgtactgtggaccatgcgccaaaggcgtgcttcaaaaggaaaacccggcgccagtgacataggcggctgggggtgtctccccagataaataaaaccgccgggcgcgacacccggggcttttttagaccaatccccgaaggggagacgcggaggagcccaagacgggcgctctaacaaccaggggagtccagagggagcgcgaaataaaatagcggcgcgcgcgtgcggtgagaaacgaacacgtgcacgaccaacgaagaagacaagaggagaaaaacaaaagaacacaagaaaaagcggaaccatacacaacaaag

SEQ ID NO: 733718 - DNA, 1625 bp, Homo sapiens
cctcttacacagtttgcagcgcgggggcggcggggtgacagtccccgtgcatgaatcagccacccctcaggctccgccccggcgggggtcggccggacgctcgccccgcataaagcgggcacccgggccgcctggagcgagaaagccgcgcacctcctcccgccaggcgctttctcggacgccttgcccagcgggccgcccgaccccctgcaccatggaccccgctcgccccctggggctgtcgattctgctgcttttcctgacggaggctgcactgggcgatgctgctcaggagccaacaggaaataacgcggagatctgtctcctgcccctagactacggaccctgccgggccctacttctccgttactactacgacaggtacacgcagagctgccgccagttcctgtacgggggctgcgagggcaacgccaacaatttctacacctgggaggcttgcgacgatgcttgctggaggatagaaaaagttcccaaagtttgccggctgcaagtgagtgtggacgaccagtgtgaggggtccacagaaaagtatttctttaatctaagttccatgacatgtgaaaaattcttttccggtgggtgtcaccggaaccggattgagaacaggtttccagatgaagctacttgtatgggcttctgcgcaccaaagaaaaagtaaatacgatttttatgttccatcattttgctacagtccaaaagatgagggactgtgctctgccaatgtgactcgctattattttaatccaagatacagaacctgtgatgctttcacctatactggctgtggagggaatgacaataactttgttagcagggaggattgcaaacgtgcatgtgcaaaagctttgaaaaagaaaaagaagatgccaaagcttcgctttgccagtagaatccggaaaattcggaagaagcaattttaaacattcttaatatgtcatcttgtttgtctttatggcttatttgcctttatggttgtatctgaagaataatatgacagcatgaggaaacaaatcattggtgatttattcaccagtttttattaatacaagtcactttttcaaaaatttggatttttttatatataactagctgctattcaaatgtgagtctaccatttttaatttatggttcaactgtttgtgagactgaattcttgcaatgcataagatataaaagcaaatatgaaaaaaaacaaaaaaaaaaaaaaaaaaaaaactttgttggggggcttgggccttggaaaaagtttttaaaacccattcgttgttggggggggggccccagtattgtactgtggaccatgcgccaaaggcgtgcttcaaaaggaaaacccggcgccagtgacataggcggctgggggtgtctccccagataaataaaaccgccgggcgcgacacccggggcttttttagaccaatccccgaaggggagacgcggaggagcccaagacgggcgctctaacaaccaggggagtccagagggagcgcgaaataaaatagcggcgcgcgcgtgcggtgagaaacgaacacgtgcacgaccaacgaagaagacaagaggagaaaaacaaaagaacacaagaaaaagcggaaccatacacaacaaag

SEQ ID NO: 733719 - DNA, 1362 bp, Homo sapiens
  misc_feature (1346)..(1346): n is a, c, g, or t
cctcttacacagtttgcagcgcgggggcggcggggtgacagtccccgtgcatgaatcagccacccctcaggctccgccccggcgggggtcggccggacgctcgccccgcataaagcgggcacccgggccgcctggagcgagaaagccgcgcacctcctcccgccaggcgctttctcggacgccttgcccagcgggccgcccgaccccctgcaccatggaccccgctcgccccctggggctgtcgattctgctgcttttcctgacggaggctgcactgggcgatgctgctcaggagccaacaggaaataacgcggagatctgtctcctgcccctagactacggaccctgccgggccctacttctccgttactactacgacaggtacacgcagagctgccgccagttcctgtacgggggctgcgagggcaacgccaacaatttctacacctgggaggcttgcgacgatgcttgctggaggatagaaaaagttcccaaagtttgccggctgcaagtgagtgtggacgaccagtgtgaggggtccacagaaaagtatttctttaatctaagttccatgacatgtgaaaaattcttttccggtgggtgtcaccggaaccggattgagaacaggtttccagatgaagctacttgtatgggcttctgcgcaccaaagaaaaagtaaatacgatttttatgttccatcattttgctacagtccaaaagatgagggactgtgctctgccaatgtgactcgctattattttaatccaagatacagaacctgtgatgctttcacctatactggctgtggagggaatgacaataactttgttagcagggaggattgcaaacgtgcatgtgcaaaagctttgaaaaagaaaaagaagatgccaaagcttcgctttgccagtagaatccggaaaattcggaagaagcaattttaaacattcttaatatgtcatcttgtttgtctttatggcttatttgcctttatggttgtatctgaagaataatatgacagcatgaggaaacaaatcattggtgatttattcaccagtttttattaatacaagtcactttttcaaaaatttggatttttttatatataactagctgctattcaaatgtgagtctaccatttttaatttatggttcaactgtttgtgagactgaattcttgcaatgcataagatataaaagcaaatatgaaaaaaaacaaaaaaaaaaaaaaaaaaaaaaaaaaaaaaaaaaaaaaaaaaaaaaaaaaaacaaaaaaacaaaaaaaaaaaaaaaaaaaaaaaaaacaaacaaaaaaacaaacaaaacacaaacaacacaacaaagaaaanaaacaaaaaaaaagaa

SEQ ID NO: 733720 - DNA, 1644 bp, Homo sapiens
cctcttacacagtttgcagcgcgggggcggcggggtgacagtccccgtgcatgaatcagccacccctcaggctccgccccggcgggggtcggccggacgctcgccccgcataaagcgggcacccgggccgcctggagcgagaaagccgcgcacctcctcccgccaggcgctttctcggacgccttgcccagcgggccgcccgaccccctgcaccatggaccccgctcgccccctggggctgtcgattctgctgcttttcctgacggaggctgcactgggcgatgctgctcaggagccaacaggaaataacgcggagatctgtctcctgcccctagactacggaccctgccgggccctacttctccgttactactacgacaggtacacgcagagctgccgccagttcctgtacgggggctgcgagggcaacgccaacaatttctacacctgggaggcttgcgacgatgcttgctggaggatagaaaaagttcccaaagtttgccggctgcaagtgagtgtggacgaccagtgtgaggggtccacagaaaagtatttctttaatctaagttccatgacatgtgaaaaattcttttccggtgggtgtcaccggaaccggattgagaacaggtttccagatgaagctacttgtatgggcttctgcgcaccaaagaaaaagtaaatacgatttttatgttccatcattttgctacagtccaaaagatgagggactgtgctctgccaatgtgactcgctattattttaatccaagatacagaacctgtgatgctttcacctatactggctgtggagggaatgacaataactttgttagcagggaggattgcaaacgtgcatgtgcaaaagctttgaaaaagaaaaagaagatgccaaagcttcgctttgccagtagaatccggaaaattcggaagaagcaattttaaacattcttaatatgtcatcttgtttgtctttatggcttatttgcctttatggttgtatctgaagaataatatgacagcatgaggaaacaaatcattggtgatttattcaccagtttttattaatacaagtcactttttcaaaaatttggatttttttatatataactagctgctattcaaatgtgagtctaccatttttaatttatggttcaactgtttgtgagactgaattcttgcaatgcataagatataaaagcaaatatgaaaaaaaacaaaaaaaaaaaaaaaaaaaaaaaaaaaaaaaaaaaaaaaaactttgttggggggcttgggccttggaaaaagtttttaaaacccattcgttgttggggggggggccccagtattgtactgtggaccatgcgccaaaggcgtgcttcaaaaggaaaacccggcgccagtgacataggcggctgggggtgtctccccagataaataaaaccgccgggcgcgacacccggggcttttttagaccaatccccgaaggggagacgcggaggagcccaagacgggcgctctaacaaccaggggagtccagagggagcgcgaaataaaatagcggcgcgcgcgtgcggtgagaaacgaacacgtgcacgaccaacgaagaagacaagaggagaaaaacaaaagaacacaagaaaaagcggaaccatacacaacaaag

SEQ ID NO: 733721 - DNA, 1332 bp, Homo sapiens
  misc_feature (1316)..(1316): n is a, c, g, or t
cctcttacacagtttgcagcgcgggggcggcggggtgacagtccccgtgcatgaatcagccacccctcaggctccgccccggcgggggtcggccggacgctcgccccgcataaagcgggcacccgggccgcctggagcgagaaagccgcgcacctcctcccgccaggcgctttctcggacgccttgcccagcgggccgcccgaccccctgcaccatggaccccgctcgccccctggggctgtcgattctgctgcttttcctgacggaggctgcactgggcgatgctgctcaggagccaacaggaaataacgcggagatctgtctcctgcccctagactacggaccctgccgggccctacttctccgttactactacgacaggtacacgcagagctgccgccagttcctgtacgggggctgcgagggcaacgccaacaatttctacacctgggaggcttgcgacgatgcttgctggaggatagaaaaagttcccaaagtttgccggctgcaagtgagtgtggacgaccagtgtgaggggtccacagaaaagtatttctttaatctaagttccatgacatgtgaaaaattcttttccggtgggtgtcaccggaaccggattgagaacaggtttccagatgaagctacttgtatgggcttctgcgcaccaaagaaaaagtaaatacgatttttatgttccatcattttgctacagtccaaaagatgagggactgtgctctgccaatgtgactcgctattattttaatccaagatacagaacctgtgatgctttcacctatactggctgtggagggaatgacaataactttgttagcagggaggattgcaaacgtgcatgtgcaaaagctttgaaaaagaaaaagaagatgccaaagcttcgctttgccagtagaatccggaaaattcggaagaagcaattttaaacattcttaatatgtcatcttgtttgtctttatggcttatttgcctttatggttgtatctgaagaataatatgacagcatgaggaaacaaatcattggtgatttattcaccagtttttattaatacaagtcactttttcaaaaatttggatttttttatatataactagctgctattcaaatgtgagtctaccatttttaatttatggttcaactgtttgtgagactgaattcttgcaatgcataagatataaaagcaaatatgacaaaaaaaaaaaaaaaaaaaaaaaaaaaaacaaaaaaaaaaaaaaaaaaaaaaaaaaaaaaaaaaaaaacaaaaaaaaaaaaaaaacacaaacaacacaacaaagaaaanaaacaaaaaaaaagaa

SEQ ID NO: 733722 - DNA, 1417 bp, Homo sapiens
  misc_feature (1293)..(1293): n is a, c, g, or t
  misc_feature (1298)..(1298): n is a, c, g, or t
  misc_feature (1303)..(1303): n is a, c, g, or t
  misc_feature (1381)..(1381): n is a, c, g, or t
  misc_feature (1394)..(1394): n is a, c, g, or t
  misc_feature (1413)..(1413): n is a, c, g, or t
cctcttacacagtttgcagcgcgggggcggcggggtgacagtccccgtgcatgaatcagccacccctcaggctccgccccggcgggggtcggccggacgctcgccccgcataaagcgggcacccgggccgcctggagcgagaaagccgcgcacctcctcccgccaggcgctttctcggacgccttgcccagcgggccgcccgaccccctgcaccatggaccccgctcgccccctggggctgtcgattctgctgcttttcctgacggaggctgcactgggcgatgctgctcaggagccaacaggaaataacgcggagatctgtctcctgcccctagactacggaccctgccgggccctacttctccgttactactacgacaggtacacgcagagctgccgccagttcctgtacgggggctgcgagggcaacgccaacaatttctacacctgggaggcttgcgacgatgcttgctggaggatagaaaaagttcccaaagtttgccggctgcaagtgagtgtggacgaccagtgtgaggggtccacagaaaagtatttctttaatctaagttccatgacatgtgaaaaattcttttccggtgggtgtcaccggaaccggattgagaacaggtttccagatgaagctacttgtatgggcttctgcgcaccaaagaaaaagtaaatacgatttttatgttccatcattttgctacagtccaaaagatgagggactgtgctctgccaatgtgactcgctattattttaatccaagatacagaacctgtgatgctttcacctatactggctgtggagggaatgacaataactttgttagcagggaggattgcaaacgtgcatgtgcaaaagctttgaaaaagaaaaagaagatgccaaagcttcgctttgccagtagaatccggaaaattcggaagaagcaattttaaacattcttaatatgtcatcttgtttgtctttatggcttatttgcctttatggttgtatctgaagaataatatgacagcatgaggaaacaaatcattggtgatttattcaccagtttttattaatacaagtcactttttcaaaaatttggatttttttatatataactagctgctattcaaatgtgagtctaccatttttaatttatggttcaactgtttgtgagactgaattcttgcaatgcataagatataaaagcaaatatgacaaaaaaaaaaaaaaaaaaaaaaaaaaaaacaaaaaaaaaaaaaaaaaaaaaaaaaaaaaaaaaaaaaacaaaaaaaaaaaaaattncctgnggccncaggctttttccctttggtgggggttatttttggcttggccctggccgtccgttttccaccgtcgtgcctgggggaanccccggggggttnccccacctttttccccttnacgg

SEQ ID NO: 733723 - DNA, 1679 bp, Homo sapiens
cctcttacacagtttgcagcgcgggggcggcggggtgacagtccccgtgcatgaatcagccacccctcaggctccgccccggcgggggtcggccggacgctcgccccgcataaagcgggcacccgggccgcctggagcgagaaagccgcgcacctcctcccgccaggcgctttctcggacgccttgcccagcgggccgcccgaccccctgcaccatggaccccgctcgccccctggggctgtcgattctgctgcttttcctgacggaggctgcactgggcgatgctgctcaggagccaacaggaaataacgcggagatctgtctcctgcccctagactacggaccctgccgggccctacttctccgttactactacgacaggtacacgcagagctgccgccagttcctgtacgggggctgcgagggcaacgccaacaatttctacacctgggaggcttgcgacgatgcttgctggaggatagaaaaagttcccaaagtttgccggctgcaagtgagtgtggacgaccagtgtgaggggtccacagaaaagtatttctttaatctaagttccatgacatgtgaaaaattcttttccggtgggtgtcaccggaaccggattgagaacaggtttccagatgaagctacttgtatgggcttctgcgcaccaaagaaaaagtaaatacgatttttatgttccatcattttgctacagtccaaaagatgagggactgtgctctgccaatgtgactcgctattattttaatccaagatacagaacctgtgatgctttcacctatactggctgtggagggaatgacaataactttgttagcagggaggattgcaaacgtgcatgtgcaaaagctttgaaaaagaaaaagaagatgccaaagcttcgctttgccagtagaatccggaaaattcggaagaagcaattttaaacattcttaatatgtcatcttgtttgtctttatggcttatttgcctttatggttgtatctgaagaataatatgacagcatgaggaaacaaatcattggtgatttattcaccagtttttattaatacaagtcactttttcaaaaatttggatttttttatatataactagctgctattcaaatgtgagtctaccatttttaatttatggttcaactgtttgtgagactgaattcttgcaatgcataagatataaaagcaaatatgacaaaaaaaaaaaaaaaaaaaaaaaaaaaaacaaaaaaaaaaaaaaaaaaaaaaaaaaaaaaaaaaaaaacaaaaaaaaaaaaaactttgttggggggcttgggccttggaaaaagtttttaaaacccattcgttgttggggggggggccccagtattgtactgtggaccatgcgccaaaggcgtgcttcaaaaggaaaacccggcgccagtgacataggcggctgggggtgtctccccagataaataaaaccgccgggcgcgacacccggggcttttttagaccaatccccgaaggggagacgcggaggagcccaagacgggcgctctaacaaccaggggagtccagagggagcgcgaaataaaatagcggcgcgcgcgtgcggtgagaaacgaacacgtgcacgaccaacgaagaagacaagaggagaaaaacaaaagaacacaagaaaaagcggaaccatacacaacaaag

SEQ ID NO: 733724 - DNA, 1648 bp, Homo sapiens
cctcttacacagtttgcagcgcgggggcggcggggtgacagtccccgtgcatgaatcagccacccctcaggctccgccccggcgggggtcggccggacgctcgccccgcataaagcgggcacccgggccgcctggagcgagaaagccgcgcacctcctcccgccaggcgctttctcggacgccttgcccagcgggccgcccgaccccctgcaccatggaccccgctcgccccctggggctgtcgattctgctgcttttcctgacggaggctgcactgggcgatgctgctcaggagccaacaggaaataacgcggagatctgtctcctgcccctagactacggaccctgccgggccctacttctccgttactactacgacaggtacacgcagagctgccgccagttcctgtacgggggctgcgagggcaacgccaacaatttctacacctgggaggcttgcgacgatgcttgctggaggatagaaaaagttcccaaagtttgccggctgcaagtgagtgtggacgaccagtgtgaggggtccacagaaaagtatttctttaatctaagttccatgacatgtgaaaaattcttttccggtgggtgtcaccggaaccggattgagaacaggtttccagatgaagctacttgtatgggcttctgcgcaccaaagaaaaagtaaatacgatttttatgttccatcattttgctacagtccaaaagatgagggactgtgctctgccaatgtgactcgctattattttaatccaagatacagaacctgtgatgctttcacctatactggctgtggagggaatgacaataactttgttagcagggaggattgcaaacgtgcatgtgcaaaagctttgaaaaagaaaaagaagatgccaaagcttcgctttgccagtagaatccggaaaattcggaagaagcaattttaaacattcttaatatgtcatcttgtttgtctttatggcttatttgcctttatggttgtatctgaagaataatatgacagcatgaggaaacaaatcattggtgatttattcaccagtttttattaatacaagtcactttttcaaaaatttggatttttttatatataactagctgctattcaaatgtgagtctaccatttttaatttatggttcaactgtttgtgagactgaattcttgcaatgcataagatataaaagcaaatatgacaaaaaaaaaaaaaaaaaaaaaaaaaaaaacaaaaaaaaaaaaaaaaaaaaaactttgttggggggcttgggccttggaaaaagtttttaaaacccattcgttgttggggggggggccccagtattgtactgtggaccatgcgccaaaggcgtgcttcaaaaggaaaacccggcgccagtgacataggcggctgggggtgtctccccagataaataaaaccgccgggcgcgacacccggggcttttttagaccaatccccgaaggggagacgcggaggagcccaagacgggcgctctaacaaccaggggagtccagagggagcgcgaaataaaatagcggcgcgcgcgtgcggtgagaaacgaacacgtgcacgaccaacgaagaagacaagaggagaaaaacaaaagaacacaagaaaaagcggaaccatacacaacaaag

SEQ ID NO: 733725 - DNA, 1385 bp, Homo sapiens
  misc_feature (1369)..(1369): n is a, c, g, or t
cctcttacacagtttgcagcgcgggggcggcggggtgacagtccccgtgcatgaatcagccacccctcaggctccgccccggcgggggtcggccggacgctcgccccgcataaagcgggcacccgggccgcctggagcgagaaagccgcgcacctcctcccgccaggcgctttctcggacgccttgcccagcgggccgcccgaccccctgcaccatggaccccgctcgccccctggggctgtcgattctgctgcttttcctgacggaggctgcactgggcgatgctgctcaggagccaacaggaaataacgcggagatctgtctcctgcccctagactacggaccctgccgggccctacttctccgttactactacgacaggtacacgcagagctgccgccagttcctgtacgggggctgcgagggcaacgccaacaatttctacacctgggaggcttgcgacgatgcttgctggaggatagaaaaagttcccaaagtttgccggctgcaagtgagtgtggacgaccagtgtgaggggtccacagaaaagtatttctttaatctaagttccatgacatgtgaaaaattcttttccggtgggtgtcaccggaaccggattgagaacaggtttccagatgaagctacttgtatgggcttctgcgcaccaaagaaaaagtaaatacgatttttatgttccatcattttgctacagtccaaaagatgagggactgtgctctgccaatgtgactcgctattattttaatccaagatacagaacctgtgatgctttcacctatactggctgtggagggaatgacaataactttgttagcagggaggattgcaaacgtgcatgtgcaaaagctttgaaaaagaaaaagaagatgccaaagcttcgctttgccagtagaatccggaaaattcggaagaagcaattttaaacattcttaatatgtcatcttgtttgtctttatggcttatttgcctttatggttgtatctgaagaataatatgacagcatgaggaaacaaatcattggtgatttattcaccagtttttattaatacaagtcactttttcaaaaatttggatttttttatatataactagctgctattcaaatgtgagtctaccatttttaatttatggttcaactgtttgtgagactgaattcttgcaatgcataagatataaaagcaaatatgacaaaaaaaaaaaaaaaaaaaaaaaaaaaaacaaaaaaaaaaaaaaaaaaaaaaaaaaaaaaaaaaaaaaaaaaaaaaaaaaaacaaaaaaacaaaaaaaaaaaaaaaaaaaaaaaaaacaaacaaaaaaacaaacaaaacacaaacaacacaacaaagaaaanaaacaaaaaaaaagaa

SEQ ID NO: 733726 - DNA, 1667 bp, Homo sapiens
cctcttacacagtttgcagcgcgggggcggcggggtgacagtccccgtgcatgaatcagccacccctcaggctccgccccggcgggggtcggccggacgctcgccccgcataaagcgggcacccgggccgcctggagcgagaaagccgcgcacctcctcccgccaggcgctttctcggacgccttgcccagcgggccgcccgaccccctgcaccatggaccccgctcgccccctggggctgtcgattctgctgcttttcctgacggaggctgcactgggcgatgctgctcaggagccaacaggaaataacgcggagatctgtctcctgcccctagactacggaccctgccgggccctacttctccgttactactacgacaggtacacgcagagctgccgccagttcctgtacgggggctgcgagggcaacgccaacaatttctacacctgggaggcttgcgacgatgcttgctggaggatagaaaaagttcccaaagtttgccggctgcaagtgagtgtggacgaccagtgtgaggggtccacagaaaagtatttctttaatctaagttccatgacatgtgaaaaattcttttccggtgggtgtcaccggaaccggattgagaacaggtttccagatgaagctacttgtatgggcttctgcgcaccaaagaaaaagtaaatacgatttttatgttccatcattttgctacagtccaaaagatgagggactgtgctctgccaatgtgactcgctattattttaatccaagatacagaacctgtgatgctttcacctatactggctgtggagggaatgacaataactttgttagcagggaggattgcaaacgtgcatgtgcaaaagctttgaaaaagaaaaagaagatgccaaagcttcgctttgccagtagaatccggaaaattcggaagaagcaattttaaacattcttaatatgtcatcttgtttgtctttatggcttatttgcctttatggttgtatctgaagaataatatgacagcatgaggaaacaaatcattggtgatttattcaccagtttttattaatacaagtcactttttcaaaaatttggatttttttatatataactagctgctattcaaatgtgagtctaccatttttaatttatggttcaactgtttgtgagactgaattcttgcaatgcataagatataaaagcaaatatgacaaaaaaaaaaaaaaaaaaaaaaaaaaaaacaaaaaaaaaaaaaaaaaaaaaaaaaaaaaaaaaaaaaaaaactttgttggggggcttgggccttggaaaaagtttttaaaacccattcgttgttggggggggggccccagtattgtactgtggaccatgcgccaaaggcgtgcttcaaaaggaaaacccggcgccagtgacataggcggctgggggtgtctccccagataaataaaaccgccgggcgcgacacccggggcttttttagaccaatccccgaaggggagacgcggaggagcccaagacgggcgctctaacaaccaggggagtccagagggagcgcgaaataaaatagcggcgcgcgcgtgcggtgagaaacgaacacgtgcacgaccaacgaagaagacaagaggagaaaaacaaaagaacacaagaaaaagcggaaccatacacaacaaag

SEQ ID NO: 733727 - DNA, 1331 bp, Homo sapiens
  misc_feature (1315)..(1315): n is a, c, g, or t
cctcttacacagtttgcagcgcgggggcggcggggtgacagtccccgtgcatgaatcagccacccctcaggctccgccccggcgggggtcggccggacgctcgccccgcataaagcgggcacccgggccgcctggagcgagaaagccgcgcacctcctcccgccaggcgctttctcggacgccttgcccagcgggccgcccgaccccctgcaccatggaccccgctcgccccctggggctgtcgattctgctgcttttcctgacggaggctgcactgggcgatgctgctcaggagccaacaggaaataacgcggagatctgtctcctgcccctagactacggaccctgccgggccctacttctccgttactactacgacaggtacacgcagagctgccgccagttcctgtacgggggctgcgagggcaacgccaacaatttctacacctgggaggcttgcgacgatgcttgctggaggatagaaaaagttcccaaagtttgccggctgcaagtgagtgtggacgaccagtgtgaggggtccacagaaaagtatttctttaatctaagttccatgacatgtgaaaaattcttttccggtgggtgtcaccggaaccggattgagaacaggtttccagatgaagctacttgtatgggcttctgcgcaccaaagaaaaagtaaatacgatttttatgttccatcattttgctacagtccaaaagatgagggactgtgctctgccaatgtgactcgctattattttaatccaagatacagaacctgtgatgctttcacctatactggctgtggagggaatgacaataactttgttagcagggaggattgcaaacgtgcatgtgcaaaagctttgaaaaagaaaaagaagatgccaaagcttcgctttgccagtagaatccggaaaattcggaagaagcaattttaaacattcttaatatgtcatcttgtttgtctttatggcttatttgcctttatggttgtatctgaagaataatatgacagcatgaggaaacaaatcattggtgatttattcaccagtttttattaatacaagtcactttttcaaaaatttggatttttttatatataactagctgctattcaaatgtgagtctaccatttttaatttatggttcaactgtttgtgagactgaattcttgcaatgcataagatataaaagcaaatatgaaaaaaaaaaaaaaaaaaaaaaaaaaaaaacaaaaaaacaaaaaaaaaaaaaaaaaaaaaaaaaacaaacaaaaaaacaaacaaaacacaaacaacacaacaaagaaaanaaacaaaaaaaaagaa

SEQ ID NO: 733728 - DNA, 1613 bp, Homo sapiens
cctcttacacagtttgcagcgcgggggcggcggggtgacagtccccgtgcatgaatcagccacccctcaggctccgccccggcgggggtcggccggacgctcgccccgcataaagcgggcacccgggccgcctggagcgagaaagccgcgcacctcctcccgccaggcgctttctcggacgccttgcccagcgggccgcccgaccccctgcaccatggaccccgctcgccccctggggctgtcgattctgctgcttttcctgacggaggctgcactgggcgatgctgctcaggagccaacaggaaataacgcggagatctgtctcctgcccctagactacggaccctgccgggccctacttctccgttactactacgacaggtacacgcagagctgccgccagttcctgtacgggggctgcgagggcaacgccaacaatttctacacctgggaggcttgcgacgatgcttgctggaggatagaaaaagttcccaaagtttgccggctgcaagtgagtgtggacgaccagtgtgaggggtccacagaaaagtatttctttaatctaagttccatgacatgtgaaaaattcttttccggtgggtgtcaccggaaccggattgagaacaggtttccagatgaagctacttgtatgggcttctgcgcaccaaagaaaaagtaaatacgatttttatgttccatcattttgctacagtccaaaagatgagggactgtgctctgccaatgtgactcgctattattttaatccaagatacagaacctgtgatgctttcacctatactggctgtggagggaatgacaataactttgttagcagggaggattgcaaacgtgcatgtgcaaaagctttgaaaaagaaaaagaagatgccaaagcttcgctttgccagtagaatccggaaaattcggaagaagcaattttaaacattcttaatatgtcatcttgtttgtctttatggcttatttgcctttatggttgtatctgaagaataatatgacagcatgaggaaacaaatcattggtgatttattcaccagtttttattaatacaagtcactttttcaaaaatttggatttttttatatataactagctgctattcaaatgtgagtctaccatttttaatttatggttcaactgtttgtgagactgaattcttgcaatgcataagatataaaagcaaatatgaaaaaaaaaaaaaaaaaaactttgttggggggcttgggccttggaaaaagtttttaaaacccattcgttgttggggggggggccccagtattgtactgtggaccatgcgccaaaggcgtgcttcaaaaggaaaacccggcgccagtgacataggcggctgggggtgtctccccagataaataaaaccgccgggcgcgacacccggggcttttttagaccaatccccgaaggggagacgcggaggagcccaagacgggcgctctaacaaccaggggagtccagagggagcgcgaaataaaatagcggcgcgcgcgtgcggtgagaaacgaacacgtgcacgaccaacgaagaagacaagaggagaaaaacaaaagaacacaagaaaaagcggaaccatacacaacaaag

SEQ ID NO: 733729 - DNA, 1312 bp, Homo sapiens
  misc_feature (1296)..(1296): n is a, c, g, or t
cctcttacacagtttgcagcgcgggggcggcggggtgacagtccccgtgcatgaatcagccacccctcaggctccgccccggcgggggtcggccggacgctcgccccgcataaagcgggcacccgggccgcctggagcgagaaagccgcgcacctcctcccgccaggcgctttctcggacgccttgcccagcgggccgcccgaccccctgcaccatggaccccgctcgccccctggggctgtcgattctgctgcttttcctgacggaggctgcactgggcgatgctgctcaggagccaacaggaaataacgcggagatctgtctcctgcccctagactacggaccctgccgggccctacttctccgttactactacgacaggtacacgcagagctgccgccagttcctgtacgggggctgcgagggcaacgccaacaatttctacacctgggaggcttgcgacgatgcttgctggaggatagaaaaagttcccaaagtttgccggctgcaagtgagtgtggacgaccagtgtgaggggtccacagaaaagtatttctttaatctaagttccatgacatgtgaaaaattcttttccggtgggtgtcaccggaaccggattgagaacaggtttccagatgaagctacttgtatgggcttctgcgcaccaaagaaaaagtaaatacgatttttatgttccatcattttgctacagtccaaaagatgagggactgtgctctgccaatgtgactcgctattattttaatccaagatacagaacctgtgatgctttcacctatactggctgtggagggaatgacaataactttgttagcagggaggattgcaaacgtgcatgtgcaaaagctttgaaaaagaaaaagaagatgccaaagcttcgctttgccagtagaatccggaaaattcggaagaagcaattttaaacattcttaatatgtcatcttgtttgtctttatggcttatttgcctttatggttgtatctgaagaataatatgacagcatgaggaaacaaatcattggtgatttattcaccagtttttattaatacaagtcactttttcaaaaatttggatttttttatatataactagctgctattcaaatgtgagtctaccatttttaatttatggttcaactgtttgtgagactgaattcttgcaatgcataagatataaaagcaaatatgaaaaaaaaaaacaaaaaaacaaaaaaaaaaaaaaaaaaaaaaaaaacaaacaaaaaaacaaacaaaacacaaacaacacaacaaagaaaanaaacaaaaaaaaagaa

SEQ ID NO: 733730 - DNA, 966 bp, Homo sapiens
  misc_feature (950)..(950): n is a, c, g, or t
cctcttacacagtttgcagcgcgggggcggcggggtgacagtccccgtgcatgaatcagccacccctcaggctccgccccggcgggggtcggccggacgctcgccccgcataaagcgggcacccgggccgcctggagcgagaaagccgcgcacctcctcccgccaggcgctttctcggacgccttgcccagcgggccgcccgaccccctgcaccatggaccccgctcgccccctggggctgtcgattctgctgcttttcctgacggaggctgcactgggcgatgctgctcaggagccaacaggaaataacgcggagatctgtctcctgcccctagactacggaccctgccgggccctacttctccgttactactacgacaggtacacgcagagctgccgccagttcctgtacgggggctgcgagggcaacgccaacaatttctacacctgggaggcttgcgacgatgcttgctggaggatagaaaaagttcccaaagtttgccggctgcaagtgagtgtggacgaccagtgtgaggggtccacagaaaagtatttctttaatctaagttccatgacatgtgaaaaattcttttccggtgggtgtcaccggaaccggattgagaacaggtttccagatgaagctacttgtatgggcttctgcgcaccaaagaaaaagtaaatacgatttttatgttccatcattttgctacagtccaaaagatgagggactgtgctctgccaatgtgactcgctattattttaatccaagatacagaacctgtgatgctttcacctatactggctgtggagggaatgacaataactttgttagcagggaggattgcaaacgtgcatgtgcaaaaaaaaaaacaaaaaaaaaaaaaaaaaaaaaaaaaaaaaaaaaaaaaacaaaaaaaaaaaaaaaacacaaacaacacaacaaagaaaanaaacaaaaaaaaagaa

SEQ ID NO: 733731 - DNA, 1051 bp, Homo sapiens
  misc_feature (927)..(927): n is a, c, g, or t
  misc_feature (932)..(932): n is a, c, g, or t
  misc_feature (937)..(937): n is a, c, g, or t
  misc_feature (1015)..(1015): n is a, c, g, or t
  misc_feature (1028)..(1028): n is a, c, g, or t
  misc_feature (1047)..(1047): n is a, c, g, or t
cctcttacacagtttgcagcgcgggggcggcggggtgacagtccccgtgcatgaatcagccacccctcaggctccgccccggcgggggtcggccggacgctcgccccgcataaagcgggcacccgggccgcctggagcgagaaagccgcgcacctcctcccgccaggcgctttctcggacgccttgcccagcgggccgcccgaccccctgcaccatggaccccgctcgccccctggggctgtcgattctgctgcttttcctgacggaggctgcactgggcgatgctgctcaggagccaacaggaaataacgcggagatctgtctcctgcccctagactacggaccctgccgggccctacttctccgttactactacgacaggtacacgcagagctgccgccagttcctgtacgggggctgcgagggcaacgccaacaatttctacacctgggaggcttgcgacgatgcttgctggaggatagaaaaagttcccaaagtttgccggctgcaagtgagtgtggacgaccagtgtgaggggtccacagaaaagtatttctttaatctaagttccatgacatgtgaaaaattcttttccggtgggtgtcaccggaaccggattgagaacaggtttccagatgaagctacttgtatgggcttctgcgcaccaaagaaaaagtaaatacgatttttatgttccatcattttgctacagtccaaaagatgagggactgtgctctgccaatgtgactcgctattattttaatccaagatacagaacctgtgatgctttcacctatactggctgtggagggaatgacaataactttgttagcagggaggattgcaaacgtgcatgtgcaaaaaaaaaaacaaaaaaaaaaaaaaaaaaaaaaaaaaaaaaaaaaaaaacaaaaaaaaaaaaaattncctgnggccncaggctttttccctttggtgggggttatttttggcttggccctggccgtccgttttccaccgtcgtgcctgggggaanccccggggggttnccccacctttttccccttnacgg

SEQ ID NO: 733732 - DNA, 1313 bp, Homo sapiens
cctcttacacagtttgcagcgcgggggcggcggggtgacagtccccgtgcatgaatcagccacccctcaggctccgccccggcgggggtcggccggacgctcgccccgcataaagcgggcacccgggccgcctggagcgagaaagccgcgcacctcctcccgccaggcgctttctcggacgccttgcccagcgggccgcccgaccccctgcaccatggaccccgctcgccccctggggctgtcgattctgctgcttttcctgacggaggctgcactgggcgatgctgctcaggagccaacaggaaataacgcggagatctgtctcctgcccctagactacggaccctgccgggccctacttctccgttactactacgacaggtacacgcagagctgccgccagttcctgtacgggggctgcgagggcaacgccaacaatttctacacctgggaggcttgcgacgatgcttgctggaggatagaaaaagttcccaaagtttgccggctgcaagtgagtgtggacgaccagtgtgaggggtccacagaaaagtatttctttaatctaagttccatgacatgtgaaaaattcttttccggtgggtgtcaccggaaccggattgagaacaggtttccagatgaagctacttgtatgggcttctgcgcaccaaagaaaaagtaaatacgatttttatgttccatcattttgctacagtccaaaagatgagggactgtgctctgccaatgtgactcgctattattttaatccaagatacagaacctgtgatgctttcacctatactggctgtggagggaatgacaataactttgttagcagggaggattgcaaacgtgcatgtgcaaaaaaaaaaacaaaaaaaaaaaaaaaaaaaaaaaaaaaaaaaaaaaaaacaaaaaaaaaaaaaactttgttggggggcttgggccttggaaaaagtttttaaaacccattcgttgttggggggggggccccagtattgtactgtggaccatgcgccaaaggcgtgcttcaaaaggaaaacccggcgccagtgacataggcggctgggggtgtctccccagataaataaaaccgccgggcgcgacacccggggcttttttagaccaatccccgaaggggagacgcggaggagcccaagacgggcgctctaacaaccaggggagtccagagggagcgcgaaataaaatagcggcgcgcgcgtgcggtgagaaacgaacacgtgcacgaccaacgaagaagacaagaggagaaaaacaaaagaacacaagaaaaagcggaaccatacacaacaaag

SEQ ID NO: 733733 - DNA, 1282 bp, Homo sapiens
cctcttacacagtttgcagcgcgggggcggcggggtgacagtccccgtgcatgaatcagccacccctcaggctccgccccggcgggggtcggccggacgctcgccccgcataaagcgggcacccgggccgcctggagcgagaaagccgcgcacctcctcccgccaggcgctttctcggacgccttgcccagcgggccgcccgaccccctgcaccatggaccccgctcgccccctggggctgtcgattctgctgcttttcctgacggaggctgcactgggcgatgctgctcaggagccaacaggaaataacgcggagatctgtctcctgcccctagactacggaccctgccgggccctacttctccgttactactacgacaggtacacgcagagctgccgccagttcctgtacgggggctgcgagggcaacgccaacaatttctacacctgggaggcttgcgacgatgcttgctggaggatagaaaaagttcccaaagtttgccggctgcaagtgagtgtggacgaccagtgtgaggggtccacagaaaagtatttctttaatctaagttccatgacatgtgaaaaattcttttccggtgggtgtcaccggaaccggattgagaacaggtttccagatgaagctacttgtatgggcttctgcgcaccaaagaaaaagtaaatacgatttttatgttccatcattttgctacagtccaaaagatgagggactgtgctctgccaatgtgactcgctattattttaatccaagatacagaacctgtgatgctttcacctatactggctgtggagggaatgacaataactttgttagcagggaggattgcaaacgtgcatgtgcaaaaaaaaaaacaaaaaaaaaaaaaaaaaaaaaactttgttggggggcttgggccttggaaaaagtttttaaaacccattcgttgttggggggggggccccagtattgtactgtggaccatgcgccaaaggcgtgcttcaaaaggaaaacccggcgccagtgacataggcggctgggggtgtctccccagataaataaaaccgccgggcgcgacacccggggcttttttagaccaatccccgaaggggagacgcggaggagcccaagacgggcgctctaacaaccaggggagtccagagggagcgcgaaataaaatagcggcgcgcgcgtgcggtgagaaacgaacacgtgcacgaccaacgaagaagacaagaggagaaaaacaaaagaacacaagaaaaagcggaaccatacacaacaaag

SEQ ID NO: 733734 - DNA, 1019 bp, Homo sapiens
  misc_feature (1003)..(1003): n is a, c, g, or t
cctcttacacagtttgcagcgcgggggcggcggggtgacagtccccgtgcatgaatcagccacccctcaggctccgccccggcgggggtcggccggacgctcgccccgcataaagcgggcacccgggccgcctggagcgagaaagccgcgcacctcctcccgccaggcgctttctcggacgccttgcccagcgggccgcccgaccccctgcaccatggaccccgctcgccccctggggctgtcgattctgctgcttttcctgacggaggctgcactgggcgatgctgctcaggagccaacaggaaataacgcggagatctgtctcctgcccctagactacggaccctgccgggccctacttctccgttactactacgacaggtacacgcagagctgccgccagttcctgtacgggggctgcgagggcaacgccaacaatttctacacctgggaggcttgcgacgatgcttgctggaggatagaaaaagttcccaaagtttgccggctgcaagtgagtgtggacgaccagtgtgaggggtccacagaaaagtatttctttaatctaagttccatgacatgtgaaaaattcttttccggtgggtgtcaccggaaccggattgagaacaggtttccagatgaagctacttgtatgggcttctgcgcaccaaagaaaaagtaaatacgatttttatgttccatcattttgctacagtccaaaagatgagggactgtgctctgccaatgtgactcgctattattttaatccaagatacagaacctgtgatgctttcacctatactggctgtggagggaatgacaataactttgttagcagggaggattgcaaacgtgcatgtgcaaaaaaaaaaacaaaaaaaaaaaaaaaaaaaaaaaaaaaaaaaaaaaaaaaaaaaaaaaaaaaacaaaaaaacaaaaaaaaaaaaaaaaaaaaaaaaaacaaacaaaaaaacaaacaaaacacaaacaacacaacaaagaaaanaaacaaaaaaaaagaa

SEQ ID NO: 733735 - DNA, 1301 bp, Homo sapiens
cctcttacacagtttgcagcgcgggggcggcggggtgacagtccccgtgcatgaatcagccacccctcaggctccgccccggcgggggtcggccggacgctcgccccgcataaagcgggcacccgggccgcctggagcgagaaagccgcgcacctcctcccgccaggcgctttctcggacgccttgcccagcgggccgcccgaccccctgcaccatggaccccgctcgccccctggggctgtcgattctgctgcttttcctgacggaggctgcactgggcgatgctgctcaggagccaacaggaaataacgcggagatctgtctcctgcccctagactacggaccctgccgggccctacttctccgttactactacgacaggtacacgcagagctgccgccagttcctgtacgggggctgcgagggcaacgccaacaatttctacacctgggaggcttgcgacgatgcttgctggaggatagaaaaagttcccaaagtttgccggctgcaagtgagtgtggacgaccagtgtgaggggtccacagaaaagtatttctttaatctaagttccatgacatgtgaaaaattcttttccggtgggtgtcaccggaaccggattgagaacaggtttccagatgaagctacttgtatgggcttctgcgcaccaaagaaaaagtaaatacgatttttatgttccatcattttgctacagtccaaaagatgagggactgtgctctgccaatgtgactcgctattattttaatccaagatacagaacctgtgatgctttcacctatactggctgtggagggaatgacaataactttgttagcagggaggattgcaaacgtgcatgtgcaaaaaaaaaaacaaaaaaaaaaaaaaaaaaaaaaaaaaaaaaaaaaaaaaaaactttgttggggggcttgggccttggaaaaagtttttaaaacccattcgttgttggggggggggccccagtattgtactgtggaccatgcgccaaaggcgtgcttcaaaaggaaaacccggcgccagtgacataggcggctgggggtgtctccccagataaataaaaccgccgggcgcgacacccggggcttttttagaccaatccccgaaggggagacgcggaggagcccaagacgggcgctctaacaaccaggggagtccagagggagcgcgaaataaaatagcggcgcgcgcgtgcggtgagaaacgaacacgtgcacgaccaacgaagaagacaagaggagaaaaacaaaagaacacaagaaaaagcggaaccatacacaacaaag

SEQ ID NO: 733736 - DNA, 868 bp, Homo sapiens
cctcttacacagtttgcagcgcgggggcggcggggtgacagtccccgtgcatgaatcagccacccctcaggctccgccccggcgggggtcggccggacgctcgccccgcataaagcgggcacccgggccgcctggagcgagaaagccgcgcacctcctcccgccaggcgctttctcggacgccttgcccagcgggccgcccgaccccctgcaccatggaccccgctcgccccctggggctgtcgattctgctgcttttcctgacggaggctgcactgggcgatgctgctcaggagccaacaggaaataacgcggagatctgtctcctgcccctagactacggaccctgccgggccctacttctccgttactactacgacaggtacacgcagagctgccgccagttcctgtacgggggctgcgagggcaacgccaacaatttctacacctgggaggcttgcgacgatgcttgctggaggatagaaaaagttcccaaagtttgccggctgcaagtgagtgtggacgaccagtgtgaggggtccacagaaaagtatttctttaatctaagttccatgacatgtgaaaaattcttttccggtgggtgtcaccggaaccggattgagaacaggtttccagatgaagctacttgtatgggcttctgcgcaccaaagaaaaagtaaatacgatttttatgttccatcattttgctacagtccaaaagatgagggactgtgctctgccaatgtgactcgctattattttaatccaagatacagaacctgtgatgctttcacctatactggctgtggagggaatgacaataactttgttagcagtgaaatggaaactgggatcctctagacgccacc

SEQ ID NO: 733737 - DNA, 3446 bp, Homo sapiens
cctcttacacagtttgcagcgcgggggcggcggggtgacagtccccgtgcatgaatcagccacccctcaggctccgccccggcgggggtcggccggacgctcgccccgcataaagcgggcacccgggccgcctggagcgagaaagccgcgcacctcctcccgccaggcgctttctcggacgccttgcccagcgggccgcccgaccccctgcaccatggaccccgctcgccccctggggctgtcgattctgctgcttttcctgacggaggctgcactgggcgatgctgctcaggagccaacaggaaataacgcggagatctgtctcctgcccctagactacggaccctgccgggccctacttctccgttactactacgacaggtacacgcagagctgccgccagttcctgtacgggggctgcgagggcaacgccaacaatttctacacctgggaggcttgcgacgatgcttgctggaggatagaaaaagttcccaaagtttgccggctgcaagtgagtgtggacgaccagtgtgaggggtccacagaaaagtatttctttaatctaagttccatgacatgtgaaaaattcttttccggtgggtgtcaccggaaccggattgagaacaggtttccagatgaagctacttgtatgggcttctgcgcaccaaagaaaaagtaaatacgatttttatgttccatcattttgctacagtccaaaagatgagggactgtgctctgccaatgtgactcgctattattttaatccaagatacagaacctgtgatgctttcacctatactggctgtggagggaatgacaataactttgttacagtccaaaagatgagggactgtgctctgccaatgtgactcgctattattttaatccaagatacagaacctgtgatactttcacctatactggctgtggagggaatgacaataactttgttagcagggaggattgcaaacgtgcatgtgcaaaagctttgaaaaagaaaaagaagatgccaaagcttcgctttgccagtagaatccggaaaattcggaagaagcaattttaaacattcttaatatgtcatcttgtttgtctttatggcttatttgcctttatggttgtatctgaagaataatatgacagcatgaggaaacaaatcattggtgatttattcaccagtttttattaatacaagtcactttttcaaaaatttggatttttttatatataactagctgctattcaaatgtgagtctaccatttttaatttatggttcaactgtttgtgagactgaattcttgcaatgcataagatataaaagcaaatatgactcactcatttcttggggtcgtattcctgatttcagaagaggatcataactgaaacaacataagacaatataatcatgtgcttttaacatatttgagaataaaaaggactagcaaataaaactcattttgcatttaaaagttggattatattttagtcccaagaagacaaagtcgcagattaacaacactttaaaaatattactcccattttattgtgttagattgcagtacaatgaatgaataaggggatttatttaaaagatcttaactttcttgactgatttaaaaagctaatcaatttattaaagccagaaatgttctcctctgggaaagcaatttctatctatttatctaccaatccccactcacatgtatatgtttgtgtttacatagagatagatggttttaagggttttcctattgttaaattatttcctaagacattgtgggttggagaccactaaacttataaaaaaccaaggaaagtaaagtttttcaaatgtttatactgtttaaggtgtttatttatataaaccatgcatgagaaaccatgcataaatttaataatttaaatttcaccagtaaattatcattgattaaatatggtcataccaatgaaataggttttttctttctctgtaataaaacaatttttctaaattcttatgttttcatagcaagattaacatatttaattacaaattaaatatgcaaaatgacaaatgcgtttaccttttgcttgaacaatctttcatttaaaaatttatcccagttattttgacaaataggtatatgcctgagaactttgaatgatgctgaaagctagaagcaaaccaggtactcttcagtcagggactggttgaagattttatggatgaggagttagcaaaatatctatatatgcatatcttctgactcccaggatacataagaaacacagggcctagaacagtatgaataaacacacatatacacaaacatcacagaagatactaaagatattaaaaatgtttacctatagaggtttggagagaacagaggggtggacagttgtggagataatatttgtgtaaatataactgtgatatagtttttatcttggaccatgtaaatatttgacataattaataatcaaaattaaatcacaaaagaaaaagcatttctttaagcattcaaacccaaatgaataccaaatagtggcaaaactacacaaaagatatatacttattttcaatgacttcacaaattaatatgagaatgtctttgggggaatataaaggtgaaaaaattctgaagaaatctcaaaatgcatttttaaatttgttattactttttatttgaatagttttgggagttacaagtggttttttattacatggatgaattatattgcagtgaattctgagattttagtgcactgtgaaaatgcatttagtagtctcattgttaatggtaatactggtgttattttgaacctattgtatctagaatactatgttgtaagaaaacaagtagttacatttctttagaagtcaggattttcagtgttaagagaaaatgagatacaagtatacaatgaaagaaattaagtaaaaatctttgacttaaattggaattagaaatattcatataaattaataactgattttctctatcaaaaaatctgtatttcccacttttccattgaaaagtccttgaagtaatgacaactcagtagcagtagttacaatgaacatcaagactgtggtctctccatactattactcactggttcctaagaaccagtgctcttaggagaatagctgaatccaggtctggggcaggaaatatgtaaaataaacttgggccatcttactccagaaatcaaggaagctatcaaagactaatgaatcatgtcacaaaaacgggagcaatattaaggagctcccactaacctaaaatgagacaatatggccatcaaaacaaataatgaccacaatgtatataaatatatagaaatctgagtttatgattatatacacacactcacctccttggtaccttttggaggtttctagggcattatctcattcatttgaaaacgatgaattaacagaaagaataaagcatttatcctt

SEQ ID NO: 733738 - DNA, 2121 bp, Homo sapiens
  misc_feature (2105)..(2105): n is a, c, g, or t
cctcttacacagtttgcagcgcgggggcggcggggtgacagtccccgtgcatgaatcagccacccctcaggctccgccccggcgggggtcggccggacgctcgccccgcataaagcgggcacccgggccgcctggagcgagaaagccgcgcacctcctcccgccaggcgctttctcggacgccttgcccagcgggccgcccgaccccctgcaccatggaccccgctcgccccctggggctgtcgattctgctgcttttcctgacggaggctgcactgggcgatgctgctcaggagccaacaggaaataacgcggagatctgtctcctgcccctagactacggaccctgccgggccctacttctccgttactactacgacaggtacacgcagagctgccgccagttcctgtacgggggctgcgagggcaacgccaacaatttctacacctgggaggcttgcgacgatgcttgctggaggatagaaaaagttcccaaagtttgccggctgcaagtgagtgtggacgaccagtgtgaggggtccacagaaaagtatttctttaatctaagttccatgacatgtgaaaaattcttttccggtgggtgtcaccggaaccggattgagaacaggtttccagatgaagctacttgtatgggcttctgcgcaccaaagaaaaagtaaatacgatttttatgttccatcattttgctacagtccaaaagatgagggactgtgctctgccaatgtgactcgctattattttaatccaagatacagaacctgtgatgctttcacctatactggctgtggagggaatgacaataactttgttacagtccaaaagatgagggactgtgctctgccaatgtgactcgctattattttaatccaagatacagaacctgtgatactttcacctatactggctgtggagggaatgacaataactttgttagcagggaggattgcaaacgtgcatgtgcaaaagctttgaaaaagaaaaagaagatgccaaagcttcgctttgccagtagaatccggaaaattcggaagaagcaattttaaacattcttaatatgtcatcttgtttgtctttatggcttatttgcctttatggttgtatctgaagaataatatgacagcatgaggaaacaaatcattggtgatttattcaccagtttttattaatacaagtcactttttcaaaaatttggatttttttatatataactagctgctattcaaatgtgagtctaccatttttaatttatggttcaactgtttgtgagactgaattcttgcaatgcataagatataaaagcaaatatgactcactcatttcttggggtcgtattcctgatttcagaagaggatcataactgaaacaacataagacaatataatcatgtgcttttaacatatttgagaataaaaaggactagcaaataaaactcattttgcatttaaaagttggattatattttagtcccaagaagacaaagtcgcagattaacaacactttaaaaatattactcccattttattgtgttagattgcagtacaatgaatgaataaggggatttatttaaaagatcttaactttcttgactgatttaaaaagctaatcaatttattaaagccagaaatgttctcctctgggaaagcaatttctatctatttatctaccaatccccactcacatgtatatgtttgtgtttacatagagatagatggttttaagggttttcctattgttaaattatttcctaagacattgtgggttggagaccactaaacttataaaaaaccaaggaaagtaaagtttttcaaatgtttatactgtttaaggtgtttatttatataaaccatgcatgagaaaccatgcataaatttaataatttaaatttcaccagtaaattatcattgattaaatatggtcataccaatgaaataggttttttctttctctgtaataaaacaatttttctaaattcttatgttttcatagcaagattaacatatttaattacaaattaaatatgcaaaatgaaaaaaaaaaaaaaaaacaaaaaaaaaaaaaaaacacaaacaacacaacaaagaaaanaaacaaaaaaaaagaa

SEQ ID NO: 733739 - DNA, 2206 bp, Homo sapiens
  misc_feature (2082)..(2082): n is a, c, g, or t
  misc_feature (2087)..(2087): n is a, c, g, or t
  misc_feature (2092)..(2092): n is a, c, g, or t
  misc_feature (2170)..(2170): n is a, c, g, or t
  misc_feature (2183)..(2183): n is a, c, g, or t
  misc_feature (2202)..(2202): n is a, c, g, or t
cctcttacacagtttgcagcgcgggggcggcggggtgacagtccccgtgcatgaatcagccacccctcaggctccgccccggcgggggtcggccggacgctcgccccgcataaagcgggcacccgggccgcctggagcgagaaagccgcgcacctcctcccgccaggcgctttctcggacgccttgcccagcgggccgcccgaccccctgcaccatggaccccgctcgccccctggggctgtcgattctgctgcttttcctgacggaggctgcactgggcgatgctgctcaggagccaacaggaaataacgcggagatctgtctcctgcccctagactacggaccctgccgggccctacttctccgttactactacgacaggtacacgcagagctgccgccagttcctgtacgggggctgcgagggcaacgccaacaatttctacacctgggaggcttgcgacgatgcttgctggaggatagaaaaagttcccaaagtttgccggctgcaagtgagtgtggacgaccagtgtgaggggtccacagaaaagtatttctttaatctaagttccatgacatgtgaaaaattcttttccggtgggtgtcaccggaaccggattgagaacaggtttccagatgaagctacttgtatgggcttctgcgcaccaaagaaaaagtaaatacgatttttatgttccatcattttgctacagtccaaaagatgagggactgtgctctgccaatgtgactcgctattattttaatccaagatacagaacctgtgatgctttcacctatactggctgtggagggaatgacaataactttgttacagtccaaaagatgagggactgtgctctgccaatgtgactcgctattattttaatccaagatacagaacctgtgatactttcacctatactggctgtggagggaatgacaataactttgttagcagggaggattgcaaacgtgcatgtgcaaaagctttgaaaaagaaaaagaagatgccaaagcttcgctttgccagtagaatccggaaaattcggaagaagcaattttaaacattcttaatatgtcatcttgtttgtctttatggcttatttgcctttatggttgtatctgaagaataatatgacagcatgaggaaacaaatcattggtgatttattcaccagtttttattaatacaagtcactttttcaaaaatttggatttttttatatataactagctgctattcaaatgtgagtctaccatttttaatttatggttcaactgtttgtgagactgaattcttgcaatgcataagatataaaagcaaatatgactcactcatttcttggggtcgtattcctgatttcagaagaggatcataactgaaacaacataagacaatataatcatgtgcttttaacatatttgagaataaaaaggactagcaaataaaactcattttgcatttaaaagttggattatattttagtcccaagaagacaaagtcgcagattaacaacactttaaaaatattactcccattttattgtgttagattgcagtacaatgaatgaataaggggatttatttaaaagatcttaactttcttgactgatttaaaaagctaatcaatttattaaagccagaaatgttctcctctgggaaagcaatttctatctatttatctaccaatccccactcacatgtatatgtttgtgtttacatagagatagatggttttaagggttttcctattgttaaattatttcctaagacattgtgggttggagaccactaaacttataaaaaaccaaggaaagtaaagtttttcaaatgtttatactgtttaaggtgtttatttatataaaccatgcatgagaaaccatgcataaatttaataatttaaatttcaccagtaaattatcattgattaaatatggtcataccaatgaaataggttttttctttctctgtaataaaacaatttttctaaattcttatgttttcatagcaagattaacatatttaattacaaattaaatatgcaaaatgaaaaaaaaaaaaaaaaacaaaaaaaaaaaaaattncctgnggccncaggctttttccctttggtgggggttatttttggcttggccctggccgtccgttttccaccgtcgtgcctgggggaanccccggggggttnccccacctttttccccttnacgg

SEQ ID NO: 733740 - DNA, 2468 bp, Homo sapiens
cctcttacacagtttgcagcgcgggggcggcggggtgacagtccccgtgcatgaatcagccacccctcaggctccgccccggcgggggtcggccggacgctcgccccgcataaagcgggcacccgggccgcctggagcgagaaagccgcgcacctcctcccgccaggcgctttctcggacgccttgcccagcgggccgcccgaccccctgcaccatggaccccgctcgccccctggggctgtcgattctgctgcttttcctgacggaggctgcactgggcgatgctgctcaggagccaacaggaaataacgcggagatctgtctcctgcccctagactacggaccctgccgggccctacttctccgttactactacgacaggtacacgcagagctgccgccagttcctgtacgggggctgcgagggcaacgccaacaatttctacacctgggaggcttgcgacgatgcttgctggaggatagaaaaagttcccaaagtttgccggctgcaagtgagtgtggacgaccagtgtgaggggtccacagaaaagtatttctttaatctaagttccatgacatgtgaaaaattcttttccggtgggtgtcaccggaaccggattgagaacaggtttccagatgaagctacttgtatgggcttctgcgcaccaaagaaaaagtaaatacgatttttatgttccatcattttgctacagtccaaaagatgagggactgtgctctgccaatgtgactcgctattattttaatccaagatacagaacctgtgatgctttcacctatactggctgtggagggaatgacaataactttgttacagtccaaaagatgagggactgtgctctgccaatgtgactcgctattattttaatccaagatacagaacctgtgatactttcacctatactggctgtggagggaatgacaataactttgttagcagggaggattgcaaacgtgcatgtgcaaaagctttgaaaaagaaaaagaagatgccaaagcttcgctttgccagtagaatccggaaaattcggaagaagcaattttaaacattcttaatatgtcatcttgtttgtctttatggcttatttgcctttatggttgtatctgaagaataatatgacagcatgaggaaacaaatcattggtgatttattcaccagtttttattaatacaagtcactttttcaaaaatttggatttttttatatataactagctgctattcaaatgtgagtctaccatttttaatttatggttcaactgtttgtgagactgaattcttgcaatgcataagatataaaagcaaatatgactcactcatttcttggggtcgtattcctgatttcagaagaggatcataactgaaacaacataagacaatataatcatgtgcttttaacatatttgagaataaaaaggactagcaaataaaactcattttgcatttaaaagttggattatattttagtcccaagaagacaaagtcgcagattaacaacactttaaaaatattactcccattttattgtgttagattgcagtacaatgaatgaataaggggatttatttaaaagatcttaactttcttgactgatttaaaaagctaatcaatttattaaagccagaaatgttctcctctgggaaagcaatttctatctatttatctaccaatccccactcacatgtatatgtttgtgtttacatagagatagatggttttaagggttttcctattgttaaattatttcctaagacattgtgggttggagaccactaaacttataaaaaaccaaggaaagtaaagtttttcaaatgtttatactgtttaaggtgtttatttatataaaccatgcatgagaaaccatgcataaatttaataatttaaatttcaccagtaaattatcattgattaaatatggtcataccaatgaaataggttttttctttctctgtaataaaacaatttttctaaattcttatgttttcatagcaagattaacatatttaattacaaattaaatatgcaaaatgaaaaaaaaaaaaaaaaacaaaaaaaaaaaaaactttgttggggggcttgggccttggaaaaagtttttaaaacccattcgttgttggggggggggccccagtattgtactgtggaccatgcgccaaaggcgtgcttcaaaaggaaaacccggcgccagtgacataggcggctgggggtgtctccccagataaataaaaccgccgggcgcgacacccggggcttttttagaccaatccccgaaggggagacgcggaggagcccaagacgggcgctctaacaaccaggggagtccagagggagcgcgaaataaaatagcggcgcgcgcgtgcggtgagaaacgaacacgtgcacgaccaacgaagaagacaagaggagaaaaacaaaagaacacaagaaaaagcggaaccatacacaacaaag

SEQ ID NO: 733741 - DNA, 2155 bp, Homo sapiens
  misc_feature (2139)..(2139): n is a, c, g, or t
cctcttacacagtttgcagcgcgggggcggcggggtgacagtccccgtgcatgaatcagccacccctcaggctccgccccggcgggggtcggccggacgctcgccccgcataaagcgggcacccgggccgcctggagcgagaaagccgcgcacctcctcccgccaggcgctttctcggacgccttgcccagcgggccgcccgaccccctgcaccatggaccccgctcgccccctggggctgtcgattctgctgcttttcctgacggaggctgcactgggcgatgctgctcaggagccaacaggaaataacgcggagatctgtctcctgcccctagactacggaccctgccgggccctacttctccgttactactacgacaggtacacgcagagctgccgccagttcctgtacgggggctgcgagggcaacgccaacaatttctacacctgggaggcttgcgacgatgcttgctggaggatagaaaaagttcccaaagtttgccggctgcaagtgagtgtggacgaccagtgtgaggggtccacagaaaagtatttctttaatctaagttccatgacatgtgaaaaattcttttccggtgggtgtcaccggaaccggattgagaacaggtttccagatgaagctacttgtatgggcttctgcgcaccaaagaaaaagtaaatacgatttttatgttccatcattttgctacagtccaaaagatgagggactgtgctctgccaatgtgactcgctattattttaatccaagatacagaacctgtgatgctttcacctatactggctgtggagggaatgacaataactttgttacagtccaaaagatgagggactgtgctctgccaatgtgactcgctattattttaatccaagatacagaacctgtgatactttcacctatactggctgtggagggaatgacaataactttgttagcagggaggattgcaaacgtgcatgtgcaaaagctttgaaaaagaaaaagaagatgccaaagcttcgctttgccagtagaatccggaaaattcggaagaagcaattttaaacattcttaatatgtcatcttgtttgtctttatggcttatttgcctttatggttgtatctgaagaataatatgacagcatgaggaaacaaatcattggtgatttattcaccagtttttattaatacaagtcactttttcaaaaatttggatttttttatatataactagctgctattcaaatgtgagtctaccatttttaatttatggttcaactgtttgtgagactgaattcttgcaatgcataagatataaaagcaaatatgactcactcatttcttggggtcgtattcctgatttcagaagaggatcataactgaaacaacataagacaatataatcatgtgcttttaacatatttgagaataaaaaggactagcaaataaaactcattttgcatttaaaagttggattatattttagtcccaagaagacaaagtcgcagattaacaacactttaaaaatattactcccattttattgtgttagattgcagtacaatgaatgaataaggggatttatttaaaagatcttaactttcttgactgatttaaaaagctaatcaatttattaaagccagaaatgttctcctctgggaaagcaatttctatctatttatctaccaatccccactcacatgtatatgtttgtgtttacatagagatagatggttttaagggttttcctattgttaaattatttcctaagacattgtgggttggagaccactaaacttataaaaaaccaaggaaagtaaagtttttcaaatgtttatactgtttaaggtgtttatttatataaaccatgcatgagaaaccatgcataaatttaataatttaaatttcaccagtaaattatcattgattaaatatggtcataccaatgaaataggttttttctttctctgtaataaaacaatttttctaaattcttatgttttcatagcaagattaacatatttaattacaaattaaatatgcaaaatgaaaaaaaaaaaacaaaaaaacaaaaaaaaaaaaaaaaaaaaaaaaaacaaacaaaaaaacaaacaaaacacaaacaacacaacaaagaaaanaaacaaaaaaaaagaa

SEQ ID NO: 733742 - DNA, 1550 bp, Homo sapiens
  misc_feature (1534)..(1534): n is a, c, g, or t
cctcttacacagtttgcagcgcgggggcggcggggtgacagtccccgtgcatgaatcagccacccctcaggctccgccccggcgggggtcggccggacgctcgccccgcataaagcgggcacccgggccgcctggagcgagaaagccgcgcacctcctcccgccaggcgctttctcggacgccttgcccagcgggccgcccgaccccctgcaccatggaccccgctcgccccctggggctgtcgattctgctgcttttcctgacggaggctgcactgggcgatgctgctcaggagccaacaggaaataacgcggagatctgtctcctgcccctagactacggaccctgccgggccctacttctccgttactactacgacaggtacacgcagagctgccgccagttcctgtacgggggctgcgagggcaacgccaacaatttctacacctgggaggcttgcgacgatgcttgctggaggatagaaaaagttcccaaagtttgccggctgcaagtgagtgtggacgaccagtgtgaggggtccacagaaaagtatttctttaatctaagttccatgacatgtgaaaaattcttttccggtgggtgtcaccggaaccggattgagaacaggtttccagatgaagctacttgtatgggcttctgcgcaccaaagaaaaagtaaatacgatttttatgttccatcattttgctacagtccaaaagatgagggactgtgctctgccaatgtgactcgctattattttaatccaagatacagaacctgtgatgctttcacctatactggctgtggagggaatgacaataactttgttacagtccaaaagatgagggactgtgctctgccaatgtgactcgctattattttaatccaagatacagaacctgtgatactttcacctatactggctgtggagggaatgacaataactttgttagcagggaggattgcaaacgtgcatgtgcaaaagctttgaaaaagaaaaagaagatgccaaagcttcgctttgccagtagaatccggaaaattcggaagaagcaattttaaacattcttaatatgtcatcttgtttgtctttatggcttatttgcctttatggttgtatctgaagaataatatgacagcatgaggaaacaaatcattggtgatttattcaccagtttttattaatacaagtcactttttcaaaaatttggatttttttatatataactagctgctattcaaatgtgagtctaccatttttaatttatggttcaactgtttgtgagactgaattcttgcaatgcataagatataaaagcaaatatgactcactcatttcttggggtcgtattcctgatttcagaagaggatcataactgaaacaacataagacaatataatcatgtgcttttaacatatttgagaataaaaaggactagcaaataaaaaaaaacaaaaaaaaaaaaaaaaaaaaaaaaaaaaaaaaaaaaaacaaaaaaaaaaaaaaaacacaaacaacacaacaaagaaaanaaacaaaaaaaaagaa

SEQ ID NO: 733743 - DNA, 1635 bp, Homo sapiens
  misc_feature (1511)..(1511): n is a, c, g, or t
  misc_feature (1516)..(1516): n is a, c, g, or t
  misc_feature (1521)..(1521): n is a, c, g, or t
  misc_feature (1599)..(1599): n is a, c, g, or t
  misc_feature (1612)..(1612): n is a, c, g, or t
  misc_feature (1631)..(1631): n is a, c, g, or t
cctcttacacagtttgcagcgcgggggcggcggggtgacagtccccgtgcatgaatcagccacccctcaggctccgccccggcgggggtcggccggacgctcgccccgcataaagcgggcacccgggccgcctggagcgagaaagccgcgcacctcctcccgccaggcgctttctcggacgccttgcccagcgggccgcccgaccccctgcaccatggaccccgctcgccccctggggctgtcgattctgctgcttttcctgacggaggctgcactgggcgatgctgctcaggagccaacaggaaataacgcggagatctgtctcctgcccctagactacggaccctgccgggccctacttctccgttactactacgacaggtacacgcagagctgccgccagttcctgtacgggggctgcgagggcaacgccaacaatttctacacctgggaggcttgcgacgatgcttgctggaggatagaaaaagttcccaaagtttgccggctgcaagtgagtgtggacgaccagtgtgaggggtccacagaaaagtatttctttaatctaagttccatgacatgtgaaaaattcttttccggtgggtgtcaccggaaccggattgagaacaggtttccagatgaagctacttgtatgggcttctgcgcaccaaagaaaaagtaaatacgatttttatgttccatcattttgctacagtccaaaagatgagggactgtgctctgccaatgtgactcgctattattttaatccaagatacagaacctgtgatgctttcacctatactggctgtggagggaatgacaataactttgttacagtccaaaagatgagggactgtgctctgccaatgtgactcgctattattttaatccaagatacagaacctgtgatactttcacctatactggctgtggagggaatgacaataactttgttagcagggaggattgcaaacgtgcatgtgcaaaagctttgaaaaagaaaaagaagatgccaaagcttcgctttgccagtagaatccggaaaattcggaagaagcaattttaaacattcttaatatgtcatcttgtttgtctttatggcttatttgcctttatggttgtatctgaagaataatatgacagcatgaggaaacaaatcattggtgatttattcaccagtttttattaatacaagtcactttttcaaaaatttggatttttttatatataactagctgctattcaaatgtgagtctaccatttttaatttatggttcaactgtttgtgagactgaattcttgcaatgcataagatataaaagcaaatatgactcactcatttcttggggtcgtattcctgatttcagaagaggatcataactgaaacaacataagacaatataatcatgtgcttttaacatatttgagaataaaaaggactagcaaataaaaaaaaacaaaaaaaaaaaaaaaaaaaaaaaaaaaaaaaaaaaaaacaaaaaaaaaaaaaattncctgnggccncaggctttttccctttggtgggggttatttttggcttggccctggccgtccgttttccaccgtcgtgcctgggggaanccccggggggttnccccacctttttccccttnacgg

SEQ ID NO: 733744 - DNA, 1897 bp, Homo sapiens
cctcttacacagtttgcagcgcgggggcggcggggtgacagtccccgtgcatgaatcagccacccctcaggctccgccccggcgggggtcggccggacgctcgccccgcataaagcgggcacccgggccgcctggagcgagaaagccgcgcacctcctcccgccaggcgctttctcggacgccttgcccagcgggccgcccgaccccctgcaccatggaccccgctcgccccctggggctgtcgattctgctgcttttcctgacggaggctgcactgggcgatgctgctcaggagccaacaggaaataacgcggagatctgtctcctgcccctagactacggaccctgccgggccctacttctccgttactactacgacaggtacacgcagagctgccgccagttcctgtacgggggctgcgagggcaacgccaacaatttctacacctgggaggcttgcgacgatgcttgctggaggatagaaaaagttcccaaagtttgccggctgcaagtgagtgtggacgaccagtgtgaggggtccacagaaaagtatttctttaatctaagttccatgacatgtgaaaaattcttttccggtgggtgtcaccggaaccggattgagaacaggtttccagatgaagctacttgtatgggcttctgcgcaccaaagaaaaagtaaatacgatttttatgttccatcattttgctacagtccaaaagatgagggactgtgctctgccaatgtgactcgctattattttaatccaagatacagaacctgtgatgctttcacctatactggctgtggagggaatgacaataactttgttacagtccaaaagatgagggactgtgctctgccaatgtgactcgctattattttaatccaagatacagaacctgtgatactttcacctatactggctgtggagggaatgacaataactttgttagcagggaggattgcaaacgtgcatgtgcaaaagctttgaaaaagaaaaagaagatgccaaagcttcgctttgccagtagaatccggaaaattcggaagaagcaattttaaacattcttaatatgtcatcttgtttgtctttatggcttatttgcctttatggttgtatctgaagaataatatgacagcatgaggaaacaaatcattggtgatttattcaccagtttttattaatacaagtcactttttcaaaaatttggatttttttatatataactagctgctattcaaatgtgagtctaccatttttaatttatggttcaactgtttgtgagactgaattcttgcaatgcataagatataaaagcaaatatgactcactcatttcttggggtcgtattcctgatttcagaagaggatcataactgaaacaacataagacaatataatcatgtgcttttaacatatttgagaataaaaaggactagcaaataaaaaaaaacaaaaaaaaaaaaaaaaaaaaaaaaaaaaaaaaaaaaaacaaaaaaaaaaaaaactttgttggggggcttgggccttggaaaaagtttttaaaacccattcgttgttggggggggggccccagtattgtactgtggaccatgcgccaaaggcgtgcttcaaaaggaaaacccggcgccagtgacataggcggctgggggtgtctccccagataaataaaaccgccgggcgcgacacccggggcttttttagaccaatccccgaaggggagacgcggaggagcccaagacgggcgctctaacaaccaggggagtccagagggagcgcgaaataaaatagcggcgcgcgcgtgcggtgagaaacgaacacgtgcacgaccaacgaagaagacaagaggagaaaaacaaaagaacacaagaaaaagcggaaccatacacaacaaag

SEQ ID NO: 733745 - DNA, 1866 bp, Homo sapiens
cctcttacacagtttgcagcgcgggggcggcggggtgacagtccccgtgcatgaatcagccacccctcaggctccgccccggcgggggtcggccggacgctcgccccgcataaagcgggcacccgggccgcctggagcgagaaagccgcgcacctcctcccgccaggcgctttctcggacgccttgcccagcgggccgcccgaccccctgcaccatggaccccgctcgccccctggggctgtcgattctgctgcttttcctgacggaggctgcactgggcgatgctgctcaggagccaacaggaaataacgcggagatctgtctcctgcccctagactacggaccctgccgggccctacttctccgttactactacgacaggtacacgcagagctgccgccagttcctgtacgggggctgcgagggcaacgccaacaatttctacacctgggaggcttgcgacgatgcttgctggaggatagaaaaagttcccaaagtttgccggctgcaagtgagtgtggacgaccagtgtgaggggtccacagaaaagtatttctttaatctaagttccatgacatgtgaaaaattcttttccggtgggtgtcaccggaaccggattgagaacaggtttccagatgaagctacttgtatgggcttctgcgcaccaaagaaaaagtaaatacgatttttatgttccatcattttgctacagtccaaaagatgagggactgtgctctgccaatgtgactcgctattattttaatccaagatacagaacctgtgatgctttcacctatactggctgtggagggaatgacaataactttgttacagtccaaaagatgagggactgtgctctgccaatgtgactcgctattattttaatccaagatacagaacctgtgatactttcacctatactggctgtggagggaatgacaataactttgttagcagggaggattgcaaacgtgcatgtgcaaaagctttgaaaaagaaaaagaagatgccaaagcttcgctttgccagtagaatccggaaaattcggaagaagcaattttaaacattcttaatatgtcatcttgtttgtctttatggcttatttgcctttatggttgtatctgaagaataatatgacagcatgaggaaacaaatcattggtgatttattcaccagtttttattaatacaagtcactttttcaaaaatttggatttttttatatataactagctgctattcaaatgtgagtctaccatttttaatttatggttcaactgtttgtgagactgaattcttgcaatgcataagatataaaagcaaatatgactcactcatttcttggggtcgtattcctgatttcagaagaggatcataactgaaacaacataagacaatataatcatgtgcttttaacatatttgagaataaaaaggactagcaaataaaaaaaaacaaaaaaaaaaaaaaaaaaaaaactttgttggggggcttgggccttggaaaaagtttttaaaacccattcgttgttggggggggggccccagtattgtactgtggaccatgcgccaaaggcgtgcttcaaaaggaaaacccggcgccagtgacataggcggctgggggtgtctccccagataaataaaaccgccgggcgcgacacccggggcttttttagaccaatccccgaaggggagacgcggaggagcccaagacgggcgctctaacaaccaggggagtccagagggagcgcgaaataaaatagcggcgcgcgcgtgcggtgagaaacgaacacgtgcacgaccaacgaagaagacaagaggagaaaaacaaaagaacacaagaaaaagcggaaccatacacaacaaag

SEQ ID NO: 733746 - DNA, 1603 bp, Homo sapiens
  misc_feature (1587)..(1587): n is a, c, g, or t
cctcttacacagtttgcagcgcgggggcggcggggtgacagtccccgtgcatgaatcagccacccctcaggctccgccccggcgggggtcggccggacgctcgccccgcataaagcgggcacccgggccgcctggagcgagaaagccgcgcacctcctcccgccaggcgctttctcggacgccttgcccagcgggccgcccgaccccctgcaccatggaccccgctcgccccctggggctgtcgattctgctgcttttcctgacggaggctgcactgggcgatgctgctcaggagccaacaggaaataacgcggagatctgtctcctgcccctagactacggaccctgccgggccctacttctccgttactactacgacaggtacacgcagagctgccgccagttcctgtacgggggctgcgagggcaacgccaacaatttctacacctgggaggcttgcgacgatgcttgctggaggatagaaaaagttcccaaagtttgccggctgcaagtgagtgtggacgaccagtgtgaggggtccacagaaaagtatttctttaatctaagttccatgacatgtgaaaaattcttttccggtgggtgtcaccggaaccggattgagaacaggtttccagatgaagctacttgtatgggcttctgcgcaccaaagaaaaagtaaatacgatttttatgttccatcattttgctacagtccaaaagatgagggactgtgctctgccaatgtgactcgctattattttaatccaagatacagaacctgtgatgctttcacctatactggctgtggagggaatgacaataactttgttacagtccaaaagatgagggactgtgctctgccaatgtgactcgctattattttaatccaagatacagaacctgtgatactttcacctatactggctgtggagggaatgacaataactttgttagcagggaggattgcaaacgtgcatgtgcaaaagctttgaaaaagaaaaagaagatgccaaagcttcgctttgccagtagaatccggaaaattcggaagaagcaattttaaacattcttaatatgtcatcttgtttgtctttatggcttatttgcctttatggttgtatctgaagaataatatgacagcatgaggaaacaaatcattggtgatttattcaccagtttttattaatacaagtcactttttcaaaaatttggatttttttatatataactagctgctattcaaatgtgagtctaccatttttaatttatggttcaactgtttgtgagactgaattcttgcaatgcataagatataaaagcaaatatgactcactcatttcttggggtcgtattcctgatttcagaagaggatcataactgaaacaacataagacaatataatcatgtgcttttaacatatttgagaataaaaaggactagcaaataaaaaaaaacaaaaaaaaaaaaaaaaaaaaaaaaaaaaaaaaaaaaaaaaaaaaaaaaaaaacaaaaaaacaaaaaaaaaaaaaaaaaaaaaaaaaacaaacaaaaaaacaaacaaaacacaaacaacacaacaaagaaaanaaacaaaaaaaaagaa

SEQ ID NO: 733747 - DNA, 1885 bp, Homo sapiens
cctcttacacagtttgcagcgcgggggcggcggggtgacagtccccgtgcatgaatcagccacccctcaggctccgccccggcgggggtcggccggacgctcgccccgcataaagcgggcacccgggccgcctggagcgagaaagccgcgcacctcctcccgccaggcgctttctcggacgccttgcccagcgggccgcccgaccccctgcaccatggaccccgctcgccccctggggctgtcgattctgctgcttttcctgacggaggctgcactgggcgatgctgctcaggagccaacaggaaataacgcggagatctgtctcctgcccctagactacggaccctgccgggccctacttctccgttactactacgacaggtacacgcagagctgccgccagttcctgtacgggggctgcgagggcaacgccaacaatttctacacctgggaggcttgcgacgatgcttgctggaggatagaaaaagttcccaaagtttgccggctgcaagtgagtgtggacgaccagtgtgaggggtccacagaaaagtatttctttaatctaagttccatgacatgtgaaaaattcttttccggtgggtgtcaccggaaccggattgagaacaggtttccagatgaagctacttgtatgggcttctgcgcaccaaagaaaaagtaaatacgatttttatgttccatcattttgctacagtccaaaagatgagggactgtgctctgccaatgtgactcgctattattttaatccaagatacagaacctgtgatgctttcacctatactggctgtggagggaatgacaataactttgttacagtccaaaagatgagggactgtgctctgccaatgtgactcgctattattttaatccaagatacagaacctgtgatactttcacctatactggctgtggagggaatgacaataactttgttagcagggaggattgcaaacgtgcatgtgcaaaagctttgaaaaagaaaaagaagatgccaaagcttcgctttgccagtagaatccggaaaattcggaagaagcaattttaaacattcttaatatgtcatcttgtttgtctttatggcttatttgcctttatggttgtatctgaagaataatatgacagcatgaggaaacaaatcattggtgatttattcaccagtttttattaatacaagtcactttttcaaaaatttggatttttttatatataactagctgctattcaaatgtgagtctaccatttttaatttatggttcaactgtttgtgagactgaattcttgcaatgcataagatataaaagcaaatatgactcactcatttcttggggtcgtattcctgatttcagaagaggatcataactgaaacaacataagacaatataatcatgtgcttttaacatatttgagaataaaaaggactagcaaataaaaaaaaacaaaaaaaaaaaaaaaaaaaaaaaaaaaaaaaaaaaaaaaaactttgttggggggcttgggccttggaaaaagtttttaaaacccattcgttgttggggggggggccccagtattgtactgtggaccatgcgccaaaggcgtgcttcaaaaggaaaacccggcgccagtgacataggcggctgggggtgtctccccagataaataaaaccgccgggcgcgacacccggggcttttttagaccaatccccgaaggggagacgcggaggagcccaagacgggcgctctaacaaccaggggagtccagagggagcgcgaaataaaatagcggcgcgcgcgtgcggtgagaaacgaacacgtgcacgaccaacgaagaagacaagaggagaaaaacaaaagaacacaagaaaaagcggaaccatacacaacaaag

SEQ ID NO: 733748 - DNA, 1584 bp, Homo sapiens
cctcttacacagtttgcagcgcgggggcggcggggtgacagtccccgtgcatgaatcagccacccctcaggctccgccccggcgggggtcggccggacgctcgccccgcataaagcgggcacccgggccgcctggagcgagaaagccgcgcacctcctcccgccaggcgctttctcggacgccttgcccagcgggccgcccgaccccctgcaccatggaccccgctcgccccctggggctgtcgattctgctgcttttcctgacggaggctgcactgggcgatgctgctcaggagccaacaggaaataacgcggagatctgtctcctgcccctagactacggaccctgccgggccctacttctccgttactactacgacaggtacacgcagagctgccgccagttcctgtacgggggctgcgagggcaacgccaacaatttctacacctgggaggcttgcgacgatgcttgctggaggatagaaaaagttcccaaagtttgccggctgcaagtgagtgtggacgaccagtgtgaggggtccacagaaaagtatttctttaatctaagttccatgacatgtgaaaaattcttttccggtgggtgtcaccggaaccggattgagaacaggtttccagatgaagctacttgtatgggcttctgcgcaccaaagaaaaagtaaatacgatttttatgttccatcattttgctacagtccaaaagatgagggactgtgctctgccaatgtgactcgctattattttaatccaagatacagaacctgtgatgctttcacctatactggctgtggagggaatgacaataactttgttacagtccaaaagatgagggactgtgctctgccaatgtgactcgctattattttaatccaagatacagaacctgtgatactttcacctatactggctgtggagggaatgacaataactttgttagcagggaggattgcaaacgtgcatgtgcaaaagctttgaaaaagaaaaagaagatgccaaagcttcgctttgccagtagaatccggaaaattcggaagaagcaattttaaacattcttaatatgtcatcttgtttgtctttatggcttatttgcctttatggttgtatctgaagaataatatgacagcatgaggaaacaaatcattggtgatttattcaccagtttttattaatacaagtcactttttcaaaaatttggatttttttatatataactagctgctattcaaatgtgagtctaccatttttaatttatggttcaactgtttgtgagactgaattcttgcaatgcataagatataaaagcaaatatgactcactcatttcttggggtcgtattcctgatttcagaagaggatcataactgaaacaacataagacaatataatcatgtgcttttaacatatttgagaataaaaaggactagcaaatagggttgcaataaccctttggttaaagtgggtatttttgccagaaaaagggggtaaaattaaattccctttggtggttgggagagaaagggggtaacaactcggggagagaataaaaggtgggggatttacccactggg

SEQ ID NO: 733749 - DNA, 1519 bp, Homo sapiens
  misc_feature (1503)..(1503): n is a, c, g, or t
cctcttacacagtttgcagcgcgggggcggcggggtgacagtccccgtgcatgaatcagccacccctcaggctccgccccggcgggggtcggccggacgctcgccccgcataaagcgggcacccgggccgcctggagcgagaaagccgcgcacctcctcccgccaggcgctttctcggacgccttgcccagcgggccgcccgaccccctgcaccatggaccccgctcgccccctggggctgtcgattctgctgcttttcctgacggaggctgcactgggcgatgctgctcaggagccaacaggaaataacgcggagatctgtctcctgcccctagactacggaccctgccgggccctacttctccgttactactacgacaggtacacgcagagctgccgccagttcctgtacgggggctgcgagggcaacgccaacaatttctacacctgggaggcttgcgacgatgcttgctggaggatagaaaaagttcccaaagtttgccggctgcaagtgagtgtggacgaccagtgtgaggggtccacagaaaagtatttctttaatctaagttccatgacatgtgaaaaattcttttccggtgggtgtcaccggaaccggattgagaacaggtttccagatgaagctacttgtatgggcttctgcgcaccaaagaaaaagtaaatacgatttttatgttccatcattttgctacagtccaaaagatgagggactgtgctctgccaatgtgactcgctattattttaatccaagatacagaacctgtgatgctttcacctatactggctgtggagggaatgacaataactttgttacagtccaaaagatgagggactgtgctctgccaatgtgactcgctattattttaatccaagatacagaacctgtgatactttcacctatactggctgtggagggaatgacaataactttgttagcagggaggattgcaaacgtgcatgtgcaaaagctttgaaaaagaaaaagaagatgccaaagcttcgctttgccagtagaatccggaaaattcggaagaagcaattttaaacattcttaatatgtcatcttgtttgtctttatggcttatttgcctttatggttgtatctgaagaataatatgacagcatgaggaaacaaatcattggtgatttattcaccagtttttattaatacaagtcactttttcaaaaatttggatttttttatatataactagctgctattcaaatgtgagtctaccatttttaatttatggttcaactgtttgtgagactgaattcttgcaatgcataagatataaaagcaaatatgactcactcatttcttggggtcgtattcctgatttcagaagaggatcataactgaaacaacataagacaatataatcatgtgcttttaacatatttgagaataaaaaggactagcaaataaaaaaaaaaaaaaaaacaaaaaaaaaaaaaaaacacaaacaacacaacaaagaaaanaaacaaaaaaaaagaa

SEQ ID NO: 733750 - DNA, 1604 bp, Homo sapiens
  misc_feature (1480)..(1480): n is a, c, g, or t
  misc_feature (1485)..(1485): n is a, c, g, or t
  misc_feature (1490)..(1490): n is a, c, g, or t
  misc_feature (1568)..(1568): n is a, c, g, or t
  misc_feature (1581)..(1581): n is a, c, g, or t
  misc_feature (1600)..(1600): n is a, c, g, or t
cctcttacacagtttgcagcgcgggggcggcggggtgacagtccccgtgcatgaatcagccacccctcaggctccgccccggcgggggtcggccggacgctcgccccgcataaagcgggcacccgggccgcctggagcgagaaagccgcgcacctcctcccgccaggcgctttctcggacgccttgcccagcgggccgcccgaccccctgcaccatggaccccgctcgccccctggggctgtcgattctgctgcttttcctgacggaggctgcactgggcgatgctgctcaggagccaacaggaaataacgcggagatctgtctcctgcccctagactacggaccctgccgggccctacttctccgttactactacgacaggtacacgcagagctgccgccagttcctgtacgggggctgcgagggcaacgccaacaatttctacacctgggaggcttgcgacgatgcttgctggaggatagaaaaagttcccaaagtttgccggctgcaagtgagtgtggacgaccagtgtgaggggtccacagaaaagtatttctttaatctaagttccatgacatgtgaaaaattcttttccggtgggtgtcaccggaaccggattgagaacaggtttccagatgaagctacttgtatgggcttctgcgcaccaaagaaaaagtaaatacgatttttatgttccatcattttgctacagtccaaaagatgagggactgtgctctgccaatgtgactcgctattattttaatccaagatacagaacctgtgatgctttcacctatactggctgtggagggaatgacaataactttgttacagtccaaaagatgagggactgtgctctgccaatgtgactcgctattattttaatccaagatacagaacctgtgatactttcacctatactggctgtggagggaatgacaataactttgttagcagggaggattgcaaacgtgcatgtgcaaaagctttgaaaaagaaaaagaagatgccaaagcttcgctttgccagtagaatccggaaaattcggaagaagcaattttaaacattcttaatatgtcatcttgtttgtctttatggcttatttgcctttatggttgtatctgaagaataatatgacagcatgaggaaacaaatcattggtgatttattcaccagtttttattaatacaagtcactttttcaaaaatttggatttttttatatataactagctgctattcaaatgtgagtctaccatttttaatttatggttcaactgtttgtgagactgaattcttgcaatgcataagatataaaagcaaatatgactcactcatttcttggggtcgtattcctgatttcagaagaggatcataactgaaacaacataagacaatataatcatgtgcttttaacatatttgagaataaaaaggactagcaaataaaaaaaaaaaaaaaaacaaaaaaaaaaaaaattncctgnggccncaggctttttccctttggtgggggttatttttggcttggccctggccgtccgttttccaccgtcgtgcctgggggaanccccggggggttnccccacctttttccccttnacgg

SEQ ID NO: 733751 - DNA, 1866 bp, Homo sapiens
cctcttacacagtttgcagcgcgggggcggcggggtgacagtccccgtgcatgaatcagccacccctcaggctccgccccggcgggggtcggccggacgctcgccccgcataaagcgggcacccgggccgcctggagcgagaaagccgcgcacctcctcccgccaggcgctttctcggacgccttgcccagcgggccgcccgaccccctgcaccatggaccccgctcgccccctggggctgtcgattctgctgcttttcctgacggaggctgcactgggcgatgctgctcaggagccaacaggaaataacgcggagatctgtctcctgcccctagactacggaccctgccgggccctacttctccgttactactacgacaggtacacgcagagctgccgccagttcctgtacgggggctgcgagggcaacgccaacaatttctacacctgggaggcttgcgacgatgcttgctggaggatagaaaaagttcccaaagtttgccggctgcaagtgagtgtggacgaccagtgtgaggggtccacagaaaagtatttctttaatctaagttccatgacatgtgaaaaattcttttccggtgggtgtcaccggaaccggattgagaacaggtttccagatgaagctacttgtatgggcttctgcgcaccaaagaaaaagtaaatacgatttttatgttccatcattttgctacagtccaaaagatgagggactgtgctctgccaatgtgactcgctattattttaatccaagatacagaacctgtgatgctttcacctatactggctgtggagggaatgacaataactttgttacagtccaaaagatgagggactgtgctctgccaatgtgactcgctattattttaatccaagatacagaacctgtgatactttcacctatactggctgtggagggaatgacaataactttgttagcagggaggattgcaaacgtgcatgtgcaaaagctttgaaaaagaaaaagaagatgccaaagcttcgctttgccagtagaatccggaaaattcggaagaagcaattttaaacattcttaatatgtcatcttgtttgtctttatggcttatttgcctttatggttgtatctgaagaataatatgacagcatgaggaaacaaatcattggtgatttattcaccagtttttattaatacaagtcactttttcaaaaatttggatttttttatatataactagctgctattcaaatgtgagtctaccatttttaatttatggttcaactgtttgtgagactgaattcttgcaatgcataagatataaaagcaaatatgactcactcatttcttggggtcgtattcctgatttcagaagaggatcataactgaaacaacataagacaatataatcatgtgcttttaacatatttgagaataaaaaggactagcaaataaaaaaaaaaaaaaaaacaaaaaaaaaaaaaactttgttggggggcttgggccttggaaaaagtttttaaaacccattcgttgttggggggggggccccagtattgtactgtggaccatgcgccaaaggcgtgcttcaaaaggaaaacccggcgccagtgacataggcggctgggggtgtctccccagataaataaaaccgccgggcgcgacacccggggcttttttagaccaatccccgaaggggagacgcggaggagcccaagacgggcgctctaacaaccaggggagtccagagggagcgcgaaataaaatagcggcgcgcgcgtgcggtgagaaacgaacacgtgcacgaccaacgaagaagacaagaggagaaaaacaaaagaacacaagaaaaagcggaaccatacacaacaaag

SEQ ID NO: 733752 - DNA, 1572 bp, Homo sapiens
  misc_feature (1556)..(1556): n is a, c, g, or t
cctcttacacagtttgcagcgcgggggcggcggggtgacagtccccgtgcatgaatcagccacccctcaggctccgccccggcgggggtcggccggacgctcgccccgcataaagcgggcacccgggccgcctggagcgagaaagccgcgcacctcctcccgccaggcgctttctcggacgccttgcccagcgggccgcccgaccccctgcaccatggaccccgctcgccccctggggctgtcgattctgctgcttttcctgacggaggctgcactgggcgatgctgctcaggagccaacaggaaataacgcggagatctgtctcctgcccctagactacggaccctgccgggccctacttctccgttactactacgacaggtacacgcagagctgccgccagttcctgtacgggggctgcgagggcaacgccaacaatttctacacctgggaggcttgcgacgatgcttgctggaggatagaaaaagttcccaaagtttgccggctgcaagtgagtgtggacgaccagtgtgaggggtccacagaaaagtatttctttaatctaagttccatgacatgtgaaaaattcttttccggtgggtgtcaccggaaccggattgagaacaggtttccagatgaagctacttgtatgggcttctgcgcaccaaagaaaaagtaaatacgatttttatgttccatcattttgctacagtccaaaagatgagggactgtgctctgccaatgtgactcgctattattttaatccaagatacagaacctgtgatgctttcacctatactggctgtggagggaatgacaataactttgttacagtccaaaagatgagggactgtgctctgccaatgtgactcgctattattttaatccaagatacagaacctgtgatactttcacctatactggctgtggagggaatgacaataactttgttagcagggaggattgcaaacgtgcatgtgcaaaagctttgaaaaagaaaaagaagatgccaaagcttcgctttgccagtagaatccggaaaattcggaagaagcaattttaaacattcttaatatgtcatcttgtttgtctttatggcttatttgcctttatggttgtatctgaagaataatatgacagcatgaggaaacaaatcattggtgatttattcaccagtttttattaatacaagtcactttttcaaaaatttggatttttttatatataactagctgctattcaaatgtgagtctaccatttttaatttatggttcaactgtttgtgagactgaattcttgcaatgcataagatataaaagcaaatatgactcactcatttcttggggtcgtattcctgatttcagaagaggatcataactgaaacaacataagacaatataatcatgtgcttttaacatatttgagaataaaaaggactagcaaataaaaaaaaaaaaaaaaaaaaaaaaaaaaaaacaaaaaaacaaaaaaaaaaaaaaaaaaaaaaaaaacaaacaaaaaaacaaacaaaacacaaacaacacaacaaagaaaanaaacaaaaaaaaagaa

SEQ ID NO: 733753 - DNA, 1854 bp, Homo sapiens
cctcttacacagtttgcagcgcgggggcggcggggtgacagtccccgtgcatgaatcagccacccctcaggctccgccccggcgggggtcggccggacgctcgccccgcataaagcgggcacccgggccgcctggagcgagaaagccgcgcacctcctcccgccaggcgctttctcggacgccttgcccagcgggccgcccgaccccctgcaccatggaccccgctcgccccctggggctgtcgattctgctgcttttcctgacggaggctgcactgggcgatgctgctcaggagccaacaggaaataacgcggagatctgtctcctgcccctagactacggaccctgccgggccctacttctccgttactactacgacaggtacacgcagagctgccgccagttcctgtacgggggctgcgagggcaacgccaacaatttctacacctgggaggcttgcgacgatgcttgctggaggatagaaaaagttcccaaagtttgccggctgcaagtgagtgtggacgaccagtgtgaggggtccacagaaaagtatttctttaatctaagttccatgacatgtgaaaaattcttttccggtgggtgtcaccggaaccggattgagaacaggtttccagatgaagctacttgtatgggcttctgcgcaccaaagaaaaagtaaatacgatttttatgttccatcattttgctacagtccaaaagatgagggactgtgctctgccaatgtgactcgctattattttaatccaagatacagaacctgtgatgctttcacctatactggctgtggagggaatgacaataactttgttacagtccaaaagatgagggactgtgctctgccaatgtgactcgctattattttaatccaagatacagaacctgtgatactttcacctatactggctgtggagggaatgacaataactttgttagcagggaggattgcaaacgtgcatgtgcaaaagctttgaaaaagaaaaagaagatgccaaagcttcgctttgccagtagaatccggaaaattcggaagaagcaattttaaacattcttaatatgtcatcttgtttgtctttatggcttatttgcctttatggttgtatctgaagaataatatgacagcatgaggaaacaaatcattggtgatttattcaccagtttttattaatacaagtcactttttcaaaaatttggatttttttatatataactagctgctattcaaatgtgagtctaccatttttaatttatggttcaactgtttgtgagactgaattcttgcaatgcataagatataaaagcaaatatgactcactcatttcttggggtcgtattcctgatttcagaagaggatcataactgaaacaacataagacaatataatcatgtgcttttaacatatttgagaataaaaaggactagcaaataaaaaaaaaaaaaaaaaaaactttgttggggggcttgggccttggaaaaagtttttaaaacccattcgttgttggggggggggccccagtattgtactgtggaccatgcgccaaaggcgtgcttcaaaaggaaaacccggcgccagtgacataggcggctgggggtgtctccccagataaataaaaccgccgggcgcgacacccggggcttttttagaccaatccccgaaggggagacgcggaggagcccaagacgggcgctctaacaaccaggggagtccagagggagcgcgaaataaaatagcggcgcgcgcgtgcggtgagaaacgaacacgtgcacgaccaacgaagaagacaagaggagaaaaacaaaagaacacaagaaaaagcggaaccatacacaacaaag

SEQ ID NO: 733754 - DNA, 1553 bp, Homo sapiens
  misc_feature (1537)..(1537): n is a, c, g, or t
cctcttacacagtttgcagcgcgggggcggcggggtgacagtccccgtgcatgaatcagccacccctcaggctccgccccggcgggggtcggccggacgctcgccccgcataaagcgggcacccgggccgcctggagcgagaaagccgcgcacctcctcccgccaggcgctttctcggacgccttgcccagcgggccgcccgaccccctgcaccatggaccccgctcgccccctggggctgtcgattctgctgcttttcctgacggaggctgcactgggcgatgctgctcaggagccaacaggaaataacgcggagatctgtctcctgcccctagactacggaccctgccgggccctacttctccgttactactacgacaggtacacgcagagctgccgccagttcctgtacgggggctgcgagggcaacgccaacaatttctacacctgggaggcttgcgacgatgcttgctggaggatagaaaaagttcccaaagtttgccggctgcaagtgagtgtggacgaccagtgtgaggggtccacagaaaagtatttctttaatctaagttccatgacatgtgaaaaattcttttccggtgggtgtcaccggaaccggattgagaacaggtttccagatgaagctacttgtatgggcttctgcgcaccaaagaaaaagtaaatacgatttttatgttccatcattttgctacagtccaaaagatgagggactgtgctctgccaatgtgactcgctattattttaatccaagatacagaacctgtgatgctttcacctatactggctgtggagggaatgacaataactttgttacagtccaaaagatgagggactgtgctctgccaatgtgactcgctattattttaatccaagatacagaacctgtgatactttcacctatactggctgtggagggaatgacaataactttgttagcagggaggattgcaaacgtgcatgtgcaaaagctttgaaaaagaaaaagaagatgccaaagcttcgctttgccagtagaatccggaaaattcggaagaagcaattttaaacattcttaatatgtcatcttgtttgtctttatggcttatttgcctttatggttgtatctgaagaataatatgacagcatgaggaaacaaatcattggtgatttattcaccagtttttattaatacaagtcactttttcaaaaatttggatttttttatatataactagctgctattcaaatgtgagtctaccatttttaatttatggttcaactgtttgtgagactgaattcttgcaatgcataagatataaaagcaaatatgactcactcatttcttggggtcgtattcctgatttcagaagaggatcataactgaaacaacataagacaatataatcatgtgcttttaacatatttgagaataaaaaggactagcaaataaaaaaaaaaaacaaaaaaacaaaaaaaaaaaaaaaaaaaaaaaaaacaaacaaaaaaacaaacaaaacacaaacaacacaacaaagaaaanaaacaaaaaaaaagaa

SEQ ID NO: 733755 - DNA, 1441 bp, Homo sapiens
cctcttacacagtttgcagcgcgggggcggcggggtgacagtccccgtgcatgaatcagccacccctcaggctccgccccggcgggggtcggccggacgctcgccccgcataaagcgggcacccgggccgcctggagcgagaaagccgcgcacctcctcccgccaggcgctttctcggacgccttgcccagcgggccgcccgaccccctgcaccatggaccccgctcgccccctggggctgtcgattctgctgcttttcctgacggaggctgcactgggcgatgctgctcaggagccaacaggaaataacgcggagatctgtctcctgcccctagactacggaccctgccgggccctacttctccgttactactacgacaggtacacgcagagctgccgccagttcctgtacgggggctgcgagggcaacgccaacaatttctacacctgggaggcttgcgacgatgcttgctggaggatagaaaaagttcccaaagtttgccggctgcaagtgagtgtggacgaccagtgtgaggggtccacagaaaagtatttctttaatctaagttccatgacatgtgaaaaattcttttccggtgggtgtcaccggaaccggattgagaacaggtttccagatgaagctacttgtatgggcttctgcgcaccaaagaaaaagtaaatacgatttttatgttccatcattttgctacagtccaaaagatgagggactgtgctctgccaatgtgactcgctattattttaatccaagatacagaacctgtgatgctttcacctatactggctgtggagggaatgacaataactttgttacagtccaaaagatgagggactgtgctctgccaatgtgactcgctattattttaatccaagatacagaacctgtgatactttcacctatactggctgtggagggaatgacaataactttgttagcagggaggattgcaaacgtgcatgtgcaaaagctttgaaaaagaaaaagaagatgccaaagcttcgctttgccagtagaatccggaaaattcggaagaagcaattttaaacattcttaatatgtcatcttgtttgtctttatggcttatttgcctttatggttgtatctgaagaataatatgacagcatgaggaaacaaatcattggtgatttattcaccagtttttattaatacaagtcactttttcaaaaatttggatttttttatatataactagctgctattcaaatgtgagtctaccatttttaatttatggttcaactgtttgtgagactgaattcttgcaatgcataagatataaaagcaaatatgactcactcatttcttggggtcgtattcctgatttcagaagaggatcataactgaaacaacattaactttcaggatcacgatgtcactcaaggaacagctatgccatagtacgtc

SEQ ID NO: 733756 - DNA, 1431 bp, Homo sapiens
  misc_feature (1415)..(1415): n is a, c, g, or t
cctcttacacagtttgcagcgcgggggcggcggggtgacagtccccgtgcatgaatcagccacccctcaggctccgccccggcgggggtcggccggacgctcgccccgcataaagcgggcacccgggccgcctggagcgagaaagccgcgcacctcctcccgccaggcgctttctcggacgccttgcccagcgggccgcccgaccccctgcaccatggaccccgctcgccccctggggctgtcgattctgctgcttttcctgacggaggctgcactgggcgatgctgctcaggagccaacaggaaataacgcggagatctgtctcctgcccctagactacggaccctgccgggccctacttctccgttactactacgacaggtacacgcagagctgccgccagttcctgtacgggggctgcgagggcaacgccaacaatttctacacctgggaggcttgcgacgatgcttgctggaggatagaaaaagttcccaaagtttgccggctgcaagtgagtgtggacgaccagtgtgaggggtccacagaaaagtatttctttaatctaagttccatgacatgtgaaaaattcttttccggtgggtgtcaccggaaccggattgagaacaggtttccagatgaagctacttgtatgggcttctgcgcaccaaagaaaaagtaaatacgatttttatgttccatcattttgctacagtccaaaagatgagggactgtgctctgccaatgtgactcgctattattttaatccaagatacagaacctgtgatgctttcacctatactggctgtggagggaatgacaataactttgttacagtccaaaagatgagggactgtgctctgccaatgtgactcgctattattttaatccaagatacagaacctgtgatactttcacctatactggctgtggagggaatgacaataactttgttagcagggaggattgcaaacgtgcatgtgcaaaagctttgaaaaagaaaaagaagatgccaaagcttcgctttgccagtagaatccggaaaattcggaagaagcaattttaaacattcttaatatgtcatcttgtttgtctttatggcttatttgcctttatggttgtatctgaagaataatatgacagcatgaggaaacaaatcattggtgatttattcaccagtttttattaatacaagtcactttttcaaaaatttggatttttttatatataactagctgctattcaaatgtgagtctaccatttttaatttatggttcaactgtttgtgagactgaattcttgcaatgcataagatataaaagcaaatatgaaaaaaaacaaaaaaaaaaaaaaaaaaaaaaaaaaaaaaaaaaaaaacaaaaaaaaaaaaaaaacacaaacaacacaacaaagaaaanaaacaaaaaaaaagaa

SEQ ID NO: 733757 - DNA, 1516 bp, Homo sapiens
  misc_feature (1392)..(1392): n is a, c, g, or t
  misc_feature (1397)..(1397): n is a, c, g, or t
  misc_feature (1402)..(1402): n is a, c, g, or t
  misc_feature (1480)..(1480): n is a, c, g, or t
  misc_feature (1493)..(1493): n is a, c, g, or t
  misc_feature (1512)..(1512): n is a, c, g, or t
cctcttacacagtttgcagcgcgggggcggcggggtgacagtccccgtgcatgaatcagccacccctcaggctccgccccggcgggggtcggccggacgctcgccccgcataaagcgggcacccgggccgcctggagcgagaaagccgcgcacctcctcccgccaggcgctttctcggacgccttgcccagcgggccgcccgaccccctgcaccatggaccccgctcgccccctggggctgtcgattctgctgcttttcctgacggaggctgcactgggcgatgctgctcaggagccaacaggaaataacgcggagatctgtctcctgcccctagactacggaccctgccgggccctacttctccgttactactacgacaggtacacgcagagctgccgccagttcctgtacgggggctgcgagggcaacgccaacaatttctacacctgggaggcttgcgacgatgcttgctggaggatagaaaaagttcccaaagtttgccggctgcaagtgagtgtggacgaccagtgtgaggggtccacagaaaagtatttctttaatctaagttccatgacatgtgaaaaattcttttccggtgggtgtcaccggaaccggattgagaacaggtttccagatgaagctacttgtatgggcttctgcgcaccaaagaaaaagtaaatacgatttttatgttccatcattttgctacagtccaaaagatgagggactgtgctctgccaatgtgactcgctattattttaatccaagatacagaacctgtgatgctttcacctatactggctgtggagggaatgacaataactttgttacagtccaaaagatgagggactgtgctctgccaatgtgactcgctattattttaatccaagatacagaacctgtgatactttcacctatactggctgtggagggaatgacaataactttgttagcagggaggattgcaaacgtgcatgtgcaaaagctttgaaaaagaaaaagaagatgccaaagcttcgctttgccagtagaatccggaaaattcggaagaagcaattttaaacattcttaatatgtcatcttgtttgtctttatggcttatttgcctttatggttgtatctgaagaataatatgacagcatgaggaaacaaatcattggtgatttattcaccagtttttattaatacaagtcactttttcaaaaatttggatttttttatatataactagctgctattcaaatgtgagtctaccatttttaatttatggttcaactgtttgtgagactgaattcttgcaatgcataagatataaaagcaaatatgaaaaaaaacaaaaaaaaaaaaaaaaaaaaaaaaaaaaaaaaaaaaaacaaaaaaaaaaaaaattncctgnggccncaggctttttccctttggtgggggttatttttggcttggccctggccgtccgttttccaccgtcgtgcctgggggaanccccggggggttnccccacctttttccccttnacgg

SEQ ID NO: 733758 - DNA, 1778 bp, Homo sapiens
cctcttacacagtttgcagcgcgggggcggcggggtgacagtccccgtgcatgaatcagccacccctcaggctccgccccggcgggggtcggccggacgctcgccccgcataaagcgggcacccgggccgcctggagcgagaaagccgcgcacctcctcccgccaggcgctttctcggacgccttgcccagcgggccgcccgaccccctgcaccatggaccccgctcgccccctggggctgtcgattctgctgcttttcctgacggaggctgcactgggcgatgctgctcaggagccaacaggaaataacgcggagatctgtctcctgcccctagactacggaccctgccgggccctacttctccgttactactacgacaggtacacgcagagctgccgccagttcctgtacgggggctgcgagggcaacgccaacaatttctacacctgggaggcttgcgacgatgcttgctggaggatagaaaaagttcccaaagtttgccggctgcaagtgagtgtggacgaccagtgtgaggggtccacagaaaagtatttctttaatctaagttccatgacatgtgaaaaattcttttccggtgggtgtcaccggaaccggattgagaacaggtttccagatgaagctacttgtatgggcttctgcgcaccaaagaaaaagtaaatacgatttttatgttccatcattttgctacagtccaaaagatgagggactgtgctctgccaatgtgactcgctattattttaatccaagatacagaacctgtgatgctttcacctatactggctgtggagggaatgacaataactttgttacagtccaaaagatgagggactgtgctctgccaatgtgactcgctattattttaatccaagatacagaacctgtgatactttcacctatactggctgtggagggaatgacaataactttgttagcagggaggattgcaaacgtgcatgtgcaaaagctttgaaaaagaaaaagaagatgccaaagcttcgctttgccagtagaatccggaaaattcggaagaagcaattttaaacattcttaatatgtcatcttgtttgtctttatggcttatttgcctttatggttgtatctgaagaataatatgacagcatgaggaaacaaatcattggtgatttattcaccagtttttattaatacaagtcactttttcaaaaatttggatttttttatatataactagctgctattcaaatgtgagtctaccatttttaatttatggttcaactgtttgtgagactgaattcttgcaatgcataagatataaaagcaaatatgaaaaaaaacaaaaaaaaaaaaaaaaaaaaaaaaaaaaaaaaaaaaaacaaaaaaaaaaaaaactttgttggggggcttgggccttggaaaaagtttttaaaacccattcgttgttggggggggggccccagtattgtactgtggaccatgcgccaaaggcgtgcttcaaaaggaaaacccggcgccagtgacataggcggctgggggtgtctccccagataaataaaaccgccgggcgcgacacccggggcttttttagaccaatccccgaaggggagacgcggaggagcccaagacgggcgctctaacaaccaggggagtccagagggagcgcgaaataaaatagcggcgcgcgcgtgcggtgagaaacgaacacgtgcacgaccaacgaagaagacaagaggagaaaaacaaaagaacacaagaaaaagcggaaccatacacaacaaag

SEQ ID NO: 733759 - DNA, 1747 bp, Homo sapiens
cctcttacacagtttgcagcgcgggggcggcggggtgacagtccccgtgcatgaatcagccacccctcaggctccgccccggcgggggtcggccggacgctcgccccgcataaagcgggcacccgggccgcctggagcgagaaagccgcgcacctcctcccgccaggcgctttctcggacgccttgcccagcgggccgcccgaccccctgcaccatggaccccgctcgccccctggggctgtcgattctgctgcttttcctgacggaggctgcactgggcgatgctgctcaggagccaacaggaaataacgcggagatctgtctcctgcccctagactacggaccctgccgggccctacttctccgttactactacgacaggtacacgcagagctgccgccagttcctgtacgggggctgcgagggcaacgccaacaatttctacacctgggaggcttgcgacgatgcttgctggaggatagaaaaagttcccaaagtttgccggctgcaagtgagtgtggacgaccagtgtgaggggtccacagaaaagtatttctttaatctaagttccatgacatgtgaaaaattcttttccggtgggtgtcaccggaaccggattgagaacaggtttccagatgaagctacttgtatgggcttctgcgcaccaaagaaaaagtaaatacgatttttatgttccatcattttgctacagtccaaaagatgagggactgtgctctgccaatgtgactcgctattattttaatccaagatacagaacctgtgatgctttcacctatactggctgtggagggaatgacaataactttgttacagtccaaaagatgagggactgtgctctgccaatgtgactcgctattattttaatccaagatacagaacctgtgatactttcacctatactggctgtggagggaatgacaataactttgttagcagggaggattgcaaacgtgcatgtgcaaaagctttgaaaaagaaaaagaagatgccaaagcttcgctttgccagtagaatccggaaaattcggaagaagcaattttaaacattcttaatatgtcatcttgtttgtctttatggcttatttgcctttatggttgtatctgaagaataatatgacagcatgaggaaacaaatcattggtgatttattcaccagtttttattaatacaagtcactttttcaaaaatttggatttttttatatataactagctgctattcaaatgtgagtctaccatttttaatttatggttcaactgtttgtgagactgaattcttgcaatgcataagatataaaagcaaatatgaaaaaaaacaaaaaaaaaaaaaaaaaaaaaactttgttggggggcttgggccttggaaaaagtttttaaaacccattcgttgttggggggggggccccagtattgtactgtggaccatgcgccaaaggcgtgcttcaaaaggaaaacccggcgccagtgacataggcggctgggggtgtctccccagataaataaaaccgccgggcgcgacacccggggcttttttagaccaatccccgaaggggagacgcggaggagcccaagacgggcgctctaacaaccaggggagtccagagggagcgcgaaataaaatagcggcgcgcgcgtgcggtgagaaacgaacacgtgcacgaccaacgaagaagacaagaggagaaaaacaaaagaacacaagaaaaagcggaaccatacacaacaaag

SEQ ID NO: 733760 - DNA, 1484 bp, Homo sapiens
  misc_feature (1468)..(1468): n is a, c, g, or t
cctcttacacagtttgcagcgcgggggcggcggggtgacagtccccgtgcatgaatcagccacccctcaggctccgccccggcgggggtcggccggacgctcgccccgcataaagcgggcacccgggccgcctggagcgagaaagccgcgcacctcctcccgccaggcgctttctcggacgccttgcccagcgggccgcccgaccccctgcaccatggaccccgctcgccccctggggctgtcgattctgctgcttttcctgacggaggctgcactgggcgatgctgctcaggagccaacaggaaataacgcggagatctgtctcctgcccctagactacggaccctgccgggccctacttctccgttactactacgacaggtacacgcagagctgccgccagttcctgtacgggggctgcgagggcaacgccaacaatttctacacctgggaggcttgcgacgatgcttgctggaggatagaaaaagttcccaaagtttgccggctgcaagtgagtgtggacgaccagtgtgaggggtccacagaaaagtatttctttaatctaagttccatgacatgtgaaaaattcttttccggtgggtgtcaccggaaccggattgagaacaggtttccagatgaagctacttgtatgggcttctgcgcaccaaagaaaaagtaaatacgatttttatgttccatcattttgctacagtccaaaagatgagggactgtgctctgccaatgtgactcgctattattttaatccaagatacagaacctgtgatgctttcacctatactggctgtggagggaatgacaataactttgttacagtccaaaagatgagggactgtgctctgccaatgtgactcgctattattttaatccaagatacagaacctgtgatactttcacctatactggctgtggagggaatgacaataactttgttagcagggaggattgcaaacgtgcatgtgcaaaagctttgaaaaagaaaaagaagatgccaaagcttcgctttgccagtagaatccggaaaattcggaagaagcaattttaaacattcttaatatgtcatcttgtttgtctttatggcttatttgcctttatggttgtatctgaagaataatatgacagcatgaggaaacaaatcattggtgatttattcaccagtttttattaatacaagtcactttttcaaaaatttggatttttttatatataactagctgctattcaaatgtgagtctaccatttttaatttatggttcaactgtttgtgagactgaattcttgcaatgcataagatataaaagcaaatatgaaaaaaaacaaaaaaaaaaaaaaaaaaaaaaaaaaaaaaaaaaaaaaaaaaaaaaaaaaaacaaaaaaacaaaaaaaaaaaaaaaaaaaaaaaaaacaaacaaaaaaacaaacaaaacacaaacaacacaacaaagaaaanaaacaaaaaaaaagaa

SEQ ID NO: 733761 - DNA, 1766 bp, Homo sapiens
cctcttacacagtttgcagcgcgggggcggcggggtgacagtccccgtgcatgaatcagccacccctcaggctccgccccggcgggggtcggccggacgctcgccccgcataaagcgggcacccgggccgcctggagcgagaaagccgcgcacctcctcccgccaggcgctttctcggacgccttgcccagcgggccgcccgaccccctgcaccatggaccccgctcgccccctggggctgtcgattctgctgcttttcctgacggaggctgcactgggcgatgctgctcaggagccaacaggaaataacgcggagatctgtctcctgcccctagactacggaccctgccgggccctacttctccgttactactacgacaggtacacgcagagctgccgccagttcctgtacgggggctgcgagggcaacgccaacaatttctacacctgggaggcttgcgacgatgcttgctggaggatagaaaaagttcccaaagtttgccggctgcaagtgagtgtggacgaccagtgtgaggggtccacagaaaagtatttctttaatctaagttccatgacatgtgaaaaattcttttccggtgggtgtcaccggaaccggattgagaacaggtttccagatgaagctacttgtatgggcttctgcgcaccaaagaaaaagtaaatacgatttttatgttccatcattttgctacagtccaaaagatgagggactgtgctctgccaatgtgactcgctattattttaatccaagatacagaacctgtgatgctttcacctatactggctgtggagggaatgacaataactttgttacagtccaaaagatgagggactgtgctctgccaatgtgactcgctattattttaatccaagatacagaacctgtgatactttcacctatactggctgtggagggaatgacaataactttgttagcagggaggattgcaaacgtgcatgtgcaaaagctttgaaaaagaaaaagaagatgccaaagcttcgctttgccagtagaatccggaaaattcggaagaagcaattttaaacattcttaatatgtcatcttgtttgtctttatggcttatttgcctttatggttgtatctgaagaataatatgacagcatgaggaaacaaatcattggtgatttattcaccagtttttattaatacaagtcactttttcaaaaatttggatttttttatatataactagctgctattcaaatgtgagtctaccatttttaatttatggttcaactgtttgtgagactgaattcttgcaatgcataagatataaaagcaaatatgaaaaaaaacaaaaaaaaaaaaaaaaaaaaaaaaaaaaaaaaaaaaaaaaactttgttggggggcttgggccttggaaaaagtttttaaaacccattcgttgttggggggggggccccagtattgtactgtggaccatgcgccaaaggcgtgcttcaaaaggaaaacccggcgccagtgacataggcggctgggggtgtctccccagataaataaaaccgccgggcgcgacacccggggcttttttagaccaatccccgaaggggagacgcggaggagcccaagacgggcgctctaacaaccaggggagtccagagggagcgcgaaataaaatagcggcgcgcgcgtgcggtgagaaacgaacacgtgcacgaccaacgaagaagacaagaggagaaaaacaaaagaacacaagaaaaagcggaaccatacacaacaaag

SEQ ID NO: 733762 - DNA, 1454 bp, Homo sapiens
  misc_feature (1438)..(1438): n is a, c, g, or t
cctcttacacagtttgcagcgcgggggcggcggggtgacagtccccgtgcatgaatcagccacccctcaggctccgccccggcgggggtcggccggacgctcgccccgcataaagcgggcacccgggccgcctggagcgagaaagccgcgcacctcctcccgccaggcgctttctcggacgccttgcccagcgggccgcccgaccccctgcaccatggaccccgctcgccccctggggctgtcgattctgctgcttttcctgacggaggctgcactgggcgatgctgctcaggagccaacaggaaataacgcggagatctgtctcctgcccctagactacggaccctgccgggccctacttctccgttactactacgacaggtacacgcagagctgccgccagttcctgtacgggggctgcgagggcaacgccaacaatttctacacctgggaggcttgcgacgatgcttgctggaggatagaaaaagttcccaaagtttgccggctgcaagtgagtgtggacgaccagtgtgaggggtccacagaaaagtatttctttaatctaagttccatgacatgtgaaaaattcttttccggtgggtgtcaccggaaccggattgagaacaggtttccagatgaagctacttgtatgggcttctgcgcaccaaagaaaaagtaaatacgatttttatgttccatcattttgctacagtccaaaagatgagggactgtgctctgccaatgtgactcgctattattttaatccaagatacagaacctgtgatgctttcacctatactggctgtggagggaatgacaataactttgttacagtccaaaagatgagggactgtgctctgccaatgtgactcgctattattttaatccaagatacagaacctgtgatactttcacctatactggctgtggagggaatgacaataactttgttagcagggaggattgcaaacgtgcatgtgcaaaagctttgaaaaagaaaaagaagatgccaaagcttcgctttgccagtagaatccggaaaattcggaagaagcaattttaaacattcttaatatgtcatcttgtttgtctttatggcttatttgcctttatggttgtatctgaagaataatatgacagcatgaggaaacaaatcattggtgatttattcaccagtttttattaatacaagtcactttttcaaaaatttggatttttttatatataactagctgctattcaaatgtgagtctaccatttttaatttatggttcaactgtttgtgagactgaattcttgcaatgcataagatataaaagcaaatatgacaaaaaaaaaaaaaaaaaaaaaaaaaaaaacaaaaaaaaaaaaaaaaaaaaaaaaaaaaaaaaaaaaaacaaaaaaaaaaaaaaaacacaaacaacacaacaaagaaaanaaacaaaaaaaaagaa

SEQ ID NO: 733763 - DNA, 1539 bp, Homo sapiens
  misc_feature (1415)..(1415): n is a, c, g, or t
  misc_feature (1420)..(1420): n is a, c, g, or t
  misc_feature (1425)..(1425): n is a, c, g, or t
  misc_feature (1503)..(1503): n is a, c, g, or t
  misc_feature (1516)..(1516): n is a, c, g, or t
  misc_feature (1535)..(1535): n is a, c, g, or t
cctcttacacagtttgcagcgcgggggcggcggggtgacagtccccgtgcatgaatcagccacccctcaggctccgccccggcgggggtcggccggacgctcgccccgcataaagcgggcacccgggccgcctggagcgagaaagccgcgcacctcctcccgccaggcgctttctcggacgccttgcccagcgggccgcccgaccccctgcaccatggaccccgctcgccccctggggctgtcgattctgctgcttttcctgacggaggctgcactgggcgatgctgctcaggagccaacaggaaataacgcggagatctgtctcctgcccctagactacggaccctgccgggccctacttctccgttactactacgacaggtacacgcagagctgccgccagttcctgtacgggggctgcgagggcaacgccaacaatttctacacctgggaggcttgcgacgatgcttgctggaggatagaaaaagttcccaaagtttgccggctgcaagtgagtgtggacgaccagtgtgaggggtccacagaaaagtatttctttaatctaagttccatgacatgtgaaaaattcttttccggtgggtgtcaccggaaccggattgagaacaggtttccagatgaagctacttgtatgggcttctgcgcaccaaagaaaaagtaaatacgatttttatgttccatcattttgctacagtccaaaagatgagggactgtgctctgccaatgtgactcgctattattttaatccaagatacagaacctgtgatgctttcacctatactggctgtggagggaatgacaataactttgttacagtccaaaagatgagggactgtgctctgccaatgtgactcgctattattttaatccaagatacagaacctgtgatactttcacctatactggctgtggagggaatgacaataactttgttagcagggaggattgcaaacgtgcatgtgcaaaagctttgaaaaagaaaaagaagatgccaaagcttcgctttgccagtagaatccggaaaattcggaagaagcaattttaaacattcttaatatgtcatcttgtttgtctttatggcttatttgcctttatggttgtatctgaagaataatatgacagcatgaggaaacaaatcattggtgatttattcaccagtttttattaatacaagtcactttttcaaaaatttggatttttttatatataactagctgctattcaaatgtgagtctaccatttttaatttatggttcaactgtttgtgagactgaattcttgcaatgcataagatataaaagcaaatatgacaaaaaaaaaaaaaaaaaaaaaaaaaaaaacaaaaaaaaaaaaaaaaaaaaaaaaaaaaaaaaaaaaaacaaaaaaaaaaaaaattncctgnggccncaggctttttccctttggtgggggttatttttggcttggccctggccgtccgttttccaccgtcgtgcctgggggaanccccggggggttnccccacctttttccccttnacgg

SEQ ID NO: 733764 - DNA, 1801 bp, Homo sapiens
cctcttacacagtttgcagcgcgggggcggcggggtgacagtccccgtgcatgaatcagccacccctcaggctccgccccggcgggggtcggccggacgctcgccccgcataaagcgggcacccgggccgcctggagcgagaaagccgcgcacctcctcccgccaggcgctttctcggacgccttgcccagcgggccgcccgaccccctgcaccatggaccccgctcgccccctggggctgtcgattctgctgcttttcctgacggaggctgcactgggcgatgctgctcaggagccaacaggaaataacgcggagatctgtctcctgcccctagactacggaccctgccgggccctacttctccgttactactacgacaggtacacgcagagctgccgccagttcctgtacgggggctgcgagggcaacgccaacaatttctacacctgggaggcttgcgacgatgcttgctggaggatagaaaaagttcccaaagtttgccggctgcaagtgagtgtggacgaccagtgtgaggggtccacagaaaagtatttctttaatctaagttccatgacatgtgaaaaattcttttccggtgggtgtcaccggaaccggattgagaacaggtttccagatgaagctacttgtatgggcttctgcgcaccaaagaaaaagtaaatacgatttttatgttccatcattttgctacagtccaaaagatgagggactgtgctctgccaatgtgactcgctattattttaatccaagatacagaacctgtgatgctttcacctatactggctgtggagggaatgacaataactttgttacagtccaaaagatgagggactgtgctctgccaatgtgactcgctattattttaatccaagatacagaacctgtgatactttcacctatactggctgtggagggaatgacaataactttgttagcagggaggattgcaaacgtgcatgtgcaaaagctttgaaaaagaaaaagaagatgccaaagcttcgctttgccagtagaatccggaaaattcggaagaagcaattttaaacattcttaatatgtcatcttgtttgtctttatggcttatttgcctttatggttgtatctgaagaataatatgacagcatgaggaaacaaatcattggtgatttattcaccagtttttattaatacaagtcactttttcaaaaatttggatttttttatatataactagctgctattcaaatgtgagtctaccatttttaatttatggttcaactgtttgtgagactgaattcttgcaatgcataagatataaaagcaaatatgacaaaaaaaaaaaaaaaaaaaaaaaaaaaaacaaaaaaaaaaaaaaaaaaaaaaaaaaaaaaaaaaaaaacaaaaaaaaaaaaaactttgttggggggcttgggccttggaaaaagtttttaaaacccattcgttgttggggggggggccccagtattgtactgtggaccatgcgccaaaggcgtgcttcaaaaggaaaacccggcgccagtgacataggcggctgggggtgtctccccagataaataaaaccgccgggcgcgacacccggggcttttttagaccaatccccgaaggggagacgcggaggagcccaagacgggcgctctaacaaccaggggagtccagagggagcgcgaaataaaatagcggcgcgcgcgtgcggtgagaaacgaacacgtgcacgaccaacgaagaagacaagaggagaaaaacaaaagaacacaagaaaaagcggaaccatacacaacaaag

SEQ ID NO: 733765 - DNA, 1770 bp, Homo sapiens
cctcttacacagtttgcagcgcgggggcggcggggtgacagtccccgtgcatgaatcagccacccctcaggctccgccccggcgggggtcggccggacgctcgccccgcataaagcgggcacccgggccgcctggagcgagaaagccgcgcacctcctcccgccaggcgctttctcggacgccttgcccagcgggccgcccgaccccctgcaccatggaccccgctcgccccctggggctgtcgattctgctgcttttcctgacggaggctgcactgggcgatgctgctcaggagccaacaggaaataacgcggagatctgtctcctgcccctagactacggaccctgccgggccctacttctccgttactactacgacaggtacacgcagagctgccgccagttcctgtacgggggctgcgagggcaacgccaacaatttctacacctgggaggcttgcgacgatgcttgctggaggatagaaaaagttcccaaagtttgccggctgcaagtgagtgtggacgaccagtgtgaggggtccacagaaaagtatttctttaatctaagttccatgacatgtgaaaaattcttttccggtgggtgtcaccggaaccggattgagaacaggtttccagatgaagctacttgtatgggcttctgcgcaccaaagaaaaagtaaatacgatttttatgttccatcattttgctacagtccaaaagatgagggactgtgctctgccaatgtgactcgctattattttaatccaagatacagaacctgtgatgctttcacctatactggctgtggagggaatgacaataactttgttacagtccaaaagatgagggactgtgctctgccaatgtgactcgctattattttaatccaagatacagaacctgtgatactttcacctatactggctgtggagggaatgacaataactttgttagcagggaggattgcaaacgtgcatgtgcaaaagctttgaaaaagaaaaagaagatgccaaagcttcgctttgccagtagaatccggaaaattcggaagaagcaattttaaacattcttaatatgtcatcttgtttgtctttatggcttatttgcctttatggttgtatctgaagaataatatgacagcatgaggaaacaaatcattggtgatttattcaccagtttttattaatacaagtcactttttcaaaaatttggatttttttatatataactagctgctattcaaatgtgagtctaccatttttaatttatggttcaactgtttgtgagactgaattcttgcaatgcataagatataaaagcaaatatgacaaaaaaaaaaaaaaaaaaaaaaaaaaaaacaaaaaaaaaaaaaaaaaaaaaactttgttggggggcttgggccttggaaaaagtttttaaaacccattcgttgttggggggggggccccagtattgtactgtggaccatgcgccaaaggcgtgcttcaaaaggaaaacccggcgccagtgacataggcggctgggggtgtctccccagataaataaaaccgccgggcgcgacacccggggcttttttagaccaatccccgaaggggagacgcggaggagcccaagacgggcgctctaacaaccaggggagtccagagggagcgcgaaataaaatagcggcgcgcgcgtgcggtgagaaacgaacacgtgcacgaccaacgaagaagacaagaggagaaaaacaaaagaacacaagaaaaagcggaaccatacacaacaaag

SEQ ID NO: 733766 - DNA, 1507 bp, Homo sapiens
  misc_feature (1491)..(1491): n is a, c, g, or t
cctcttacacagtttgcagcgcgggggcggcggggtgacagtccccgtgcatgaatcagccacccctcaggctccgccccggcgggggtcggccggacgctcgccccgcataaagcgggcacccgggccgcctggagcgagaaagccgcgcacctcctcccgccaggcgctttctcggacgccttgcccagcgggccgcccgaccccctgcaccatggaccccgctcgccccctggggctgtcgattctgctgcttttcctgacggaggctgcactgggcgatgctgctcaggagccaacaggaaataacgcggagatctgtctcctgcccctagactacggaccctgccgggccctacttctccgttactactacgacaggtacacgcagagctgccgccagttcctgtacgggggctgcgagggcaacgccaacaatttctacacctgggaggcttgcgacgatgcttgctggaggatagaaaaagttcccaaagtttgccggctgcaagtgagtgtggacgaccagtgtgaggggtccacagaaaagtatttctttaatctaagttccatgacatgtgaaaaattcttttccggtgggtgtcaccggaaccggattgagaacaggtttccagatgaagctacttgtatgggcttctgcgcaccaaagaaaaagtaaatacgatttttatgttccatcattttgctacagtccaaaagatgagggactgtgctctgccaatgtgactcgctattattttaatccaagatacagaacctgtgatgctttcacctatactggctgtggagggaatgacaataactttgttacagtccaaaagatgagggactgtgctctgccaatgtgactcgctattattttaatccaagatacagaacctgtgatactttcacctatactggctgtggagggaatgacaataactttgttagcagggaggattgcaaacgtgcatgtgcaaaagctttgaaaaagaaaaagaagatgccaaagcttcgctttgccagtagaatccggaaaattcggaagaagcaattttaaacattcttaatatgtcatcttgtttgtctttatggcttatttgcctttatggttgtatctgaagaataatatgacagcatgaggaaacaaatcattggtgatttattcaccagtttttattaatacaagtcactttttcaaaaatttggatttttttatatataactagctgctattcaaatgtgagtctaccatttttaatttatggttcaactgtttgtgagactgaattcttgcaatgcataagatataaaagcaaatatgacaaaaaaaaaaaaaaaaaaaaaaaaaaaaacaaaaaaaaaaaaaaaaaaaaaaaaaaaaaaaaaaaaaaaaaaaaaaaaaaaacaaaaaaacaaaaaaaaaaaaaaaaaaaaaaaaaacaaacaaaaaaacaaacaaaacacaaacaacacaacaaagaaaanaaacaaaaaaaaagaa

SEQ ID NO: 733767 - DNA, 1789 bp, Homo sapiens
cctcttacacagtttgcagcgcgggggcggcggggtgacagtccccgtgcatgaatcagccacccctcaggctccgccccggcgggggtcggccggacgctcgccccgcataaagcgggcacccgggccgcctggagcgagaaagccgcgcacctcctcccgccaggcgctttctcggacgccttgcccagcgggccgcccgaccccctgcaccatggaccccgctcgccccctggggctgtcgattctgctgcttttcctgacggaggctgcactgggcgatgctgctcaggagccaacaggaaataacgcggagatctgtctcctgcccctagactacggaccctgccgggccctacttctccgttactactacgacaggtacacgcagagctgccgccagttcctgtacgggggctgcgagggcaacgccaacaatttctacacctgggaggcttgcgacgatgcttgctggaggatagaaaaagttcccaaagtttgccggctgcaagtgagtgtggacgaccagtgtgaggggtccacagaaaagtatttctttaatctaagttccatgacatgtgaaaaattcttttccggtgggtgtcaccggaaccggattgagaacaggtttccagatgaagctacttgtatgggcttctgcgcaccaaagaaaaagtaaatacgatttttatgttccatcattttgctacagtccaaaagatgagggactgtgctctgccaatgtgactcgctattattttaatccaagatacagaacctgtgatgctttcacctatactggctgtggagggaatgacaataactttgttacagtccaaaagatgagggactgtgctctgccaatgtgactcgctattattttaatccaagatacagaacctgtgatactttcacctatactggctgtggagggaatgacaataactttgttagcagggaggattgcaaacgtgcatgtgcaaaagctttgaaaaagaaaaagaagatgccaaagcttcgctttgccagtagaatccggaaaattcggaagaagcaattttaaacattcttaatatgtcatcttgtttgtctttatggcttatttgcctttatggttgtatctgaagaataatatgacagcatgaggaaacaaatcattggtgatttattcaccagtttttattaatacaagtcactttttcaaaaatttggatttttttatatataactagctgctattcaaatgtgagtctaccatttttaatttatggttcaactgtttgtgagactgaattcttgcaatgcataagatataaaagcaaatatgacaaaaaaaaaaaaaaaaaaaaaaaaaaaaacaaaaaaaaaaaaaaaaaaaaaaaaaaaaaaaaaaaaaaaaactttgttggggggcttgggccttggaaaaagtttttaaaacccattcgttgttggggggggggccccagtattgtactgtggaccatgcgccaaaggcgtgcttcaaaaggaaaacccggcgccagtgacataggcggctgggggtgtctccccagataaataaaaccgccgggcgcgacacccggggcttttttagaccaatccccgaaggggagacgcggaggagcccaagacgggcgctctaacaaccaggggagtccagagggagcgcgaaataaaatagcggcgcgcgcgtgcggtgagaaacgaacacgtgcacgaccaacgaagaagacaagaggagaaaaacaaaagaacacaagaaaaagcggaaccatacacaacaaag

SEQ ID NO: 733768 - DNA, 1453 bp, Homo sapiens
  misc_feature (1437)..(1437): n is a, c, g, or t
cctcttacacagtttgcagcgcgggggcggcggggtgacagtccccgtgcatgaatcagccacccctcaggctccgccccggcgggggtcggccggacgctcgccccgcataaagcgggcacccgggccgcctggagcgagaaagccgcgcacctcctcccgccaggcgctttctcggacgccttgcccagcgggccgcccgaccccctgcaccatggaccccgctcgccccctggggctgtcgattctgctgcttttcctgacggaggctgcactgggcgatgctgctcaggagccaacaggaaataacgcggagatctgtctcctgcccctagactacggaccctgccgggccctacttctccgttactactacgacaggtacacgcagagctgccgccagttcctgtacgggggctgcgagggcaacgccaacaatttctacacctgggaggcttgcgacgatgcttgctggaggatagaaaaagttcccaaagtttgccggctgcaagtgagtgtggacgaccagtgtgaggggtccacagaaaagtatttctttaatctaagttccatgacatgtgaaaaattcttttccggtgggtgtcaccggaaccggattgagaacaggtttccagatgaagctacttgtatgggcttctgcgcaccaaagaaaaagtaaatacgatttttatgttccatcattttgctacagtccaaaagatgagggactgtgctctgccaatgtgactcgctattattttaatccaagatacagaacctgtgatgctttcacctatactggctgtggagggaatgacaataactttgttacagtccaaaagatgagggactgtgctctgccaatgtgactcgctattattttaatccaagatacagaacctgtgatactttcacctatactggctgtggagggaatgacaataactttgttagcagggaggattgcaaacgtgcatgtgcaaaagctttgaaaaagaaaaagaagatgccaaagcttcgctttgccagtagaatccggaaaattcggaagaagcaattttaaacattcttaatatgtcatcttgtttgtctttatggcttatttgcctttatggttgtatctgaagaataatatgacagcatgaggaaacaaatcattggtgatttattcaccagtttttattaatacaagtcactttttcaaaaatttggatttttttatatataactagctgctattcaaatgtgagtctaccatttttaatttatggttcaactgtttgtgagactgaattcttgcaatgcataagatataaaagcaaatatgaaaaaaaaaaaaaaaaaaaaaaaaaaaaaacaaaaaaacaaaaaaaaaaaaaaaaaaaaaaaaaacaaacaaaaaaacaaacaaaacacaaacaacacaacaaagaaaanaaacaaaaaaaaagaa

SEQ ID NO: 733769 - DNA, 1735 bp, Homo sapiens
cctcttacacagtttgcagcgcgggggcggcggggtgacagtccccgtgcatgaatcagccacccctcaggctccgccccggcgggggtcggccggacgctcgccccgcataaagcgggcacccgggccgcctggagcgagaaagccgcgcacctcctcccgccaggcgctttctcggacgccttgcccagcgggccgcccgaccccctgcaccatggaccccgctcgccccctggggctgtcgattctgctgcttttcctgacggaggctgcactgggcgatgctgctcaggagccaacaggaaataacgcggagatctgtctcctgcccctagactacggaccctgccgggccctacttctccgttactactacgacaggtacacgcagagctgccgccagttcctgtacgggggctgcgagggcaacgccaacaatttctacacctgggaggcttgcgacgatgcttgctggaggatagaaaaagttcccaaagtttgccggctgcaagtgagtgtggacgaccagtgtgaggggtccacagaaaagtatttctttaatctaagttccatgacatgtgaaaaattcttttccggtgggtgtcaccggaaccggattgagaacaggtttccagatgaagctacttgtatgggcttctgcgcaccaaagaaaaagtaaatacgatttttatgttccatcattttgctacagtccaaaagatgagggactgtgctctgccaatgtgactcgctattattttaatccaagatacagaacctgtgatgctttcacctatactggctgtggagggaatgacaataactttgttacagtccaaaagatgagggactgtgctctgccaatgtgactcgctattattttaatccaagatacagaacctgtgatactttcacctatactggctgtggagggaatgacaataactttgttagcagggaggattgcaaacgtgcatgtgcaaaagctttgaaaaagaaaaagaagatgccaaagcttcgctttgccagtagaatccggaaaattcggaagaagcaattttaaacattcttaatatgtcatcttgtttgtctttatggcttatttgcctttatggttgtatctgaagaataatatgacagcatgaggaaacaaatcattggtgatttattcaccagtttttattaatacaagtcactttttcaaaaatttggatttttttatatataactagctgctattcaaatgtgagtctaccatttttaatttatggttcaactgtttgtgagactgaattcttgcaatgcataagatataaaagcaaatatgaaaaaaaaaaaaaaaaaaactttgttggggggcttgggccttggaaaaagtttttaaaacccattcgttgttggggggggggccccagtattgtactgtggaccatgcgccaaaggcgtgcttcaaaaggaaaacccggcgccagtgacataggcggctgggggtgtctccccagataaataaaaccgccgggcgcgacacccggggcttttttagaccaatccccgaaggggagacgcggaggagcccaagacgggcgctctaacaaccaggggagtccagagggagcgcgaaataaaatagcggcgcgcgcgtgcggtgagaaacgaacacgtgcacgaccaacgaagaagacaagaggagaaaaacaaaagaacacaagaaaaagcggaaccatacacaacaaag

SEQ ID NO: 733770 - DNA, 1434 bp, Homo sapiens
  misc_feature (1418)..(1418): n is a, c, g, or t
cctcttacacagtttgcagcgcgggggcggcggggtgacagtccccgtgcatgaatcagccacccctcaggctccgccccggcgggggtcggccggacgctcgccccgcataaagcgggcacccgggccgcctggagcgagaaagccgcgcacctcctcccgccaggcgctttctcggacgccttgcccagcgggccgcccgaccccctgcaccatggaccccgctcgccccctggggctgtcgattctgctgcttttcctgacggaggctgcactgggcgatgctgctcaggagccaacaggaaataacgcggagatctgtctcctgcccctagactacggaccctgccgggccctacttctccgttactactacgacaggtacacgcagagctgccgccagttcctgtacgggggctgcgagggcaacgccaacaatttctacacctgggaggcttgcgacgatgcttgctggaggatagaaaaagttcccaaagtttgccggctgcaagtgagtgtggacgaccagtgtgaggggtccacagaaaagtatttctttaatctaagttccatgacatgtgaaaaattcttttccggtgggtgtcaccggaaccggattgagaacaggtttccagatgaagctacttgtatgggcttctgcgcaccaaagaaaaagtaaatacgatttttatgttccatcattttgctacagtccaaaagatgagggactgtgctctgccaatgtgactcgctattattttaatccaagatacagaacctgtgatgctttcacctatactggctgtggagggaatgacaataactttgttacagtccaaaagatgagggactgtgctctgccaatgtgactcgctattattttaatccaagatacagaacctgtgatactttcacctatactggctgtggagggaatgacaataactttgttagcagggaggattgcaaacgtgcatgtgcaaaagctttgaaaaagaaaaagaagatgccaaagcttcgctttgccagtagaatccggaaaattcggaagaagcaattttaaacattcttaatatgtcatcttgtttgtctttatggcttatttgcctttatggttgtatctgaagaataatatgacagcatgaggaaacaaatcattggtgatttattcaccagtttttattaatacaagtcactttttcaaaaatttggatttttttatatataactagctgctattcaaatgtgagtctaccatttttaatttatggttcaactgtttgtgagactgaattcttgcaatgcataagatataaaagcaaatatgaaaaaaaaaaacaaaaaaacaaaaaaaaaaaaaaaaaaaaaaaaaacaaacaaaaaaacaaacaaaacacaaacaacacaacaaagaaaanaaacaaaaaaaaagaa

SEQ ID NO: 733771 - DNA, 1088 bp, Homo sapiens
  misc_feature (1072)..(1072): n is a, c, g, or t
cctcttacacagtttgcagcgcgggggcggcggggtgacagtccccgtgcatgaatcagccacccctcaggctccgccccggcgggggtcggccggacgctcgccccgcataaagcgggcacccgggccgcctggagcgagaaagccgcgcacctcctcccgccaggcgctttctcggacgccttgcccagcgggccgcccgaccccctgcaccatggaccccgctcgccccctggggctgtcgattctgctgcttttcctgacggaggctgcactgggcgatgctgctcaggagccaacaggaaataacgcggagatctgtctcctgcccctagactacggaccctgccgggccctacttctccgttactactacgacaggtacacgcagagctgccgccagttcctgtacgggggctgcgagggcaacgccaacaatttctacacctgggaggcttgcgacgatgcttgctggaggatagaaaaagttcccaaagtttgccggctgcaagtgagtgtggacgaccagtgtgaggggtccacagaaaagtatttctttaatctaagttccatgacatgtgaaaaattcttttccggtgggtgtcaccggaaccggattgagaacaggtttccagatgaagctacttgtatgggcttctgcgcaccaaagaaaaagtaaatacgatttttatgttccatcattttgctacagtccaaaagatgagggactgtgctctgccaatgtgactcgctattattttaatccaagatacagaacctgtgatgctttcacctatactggctgtggagggaatgacaataactttgttacagtccaaaagatgagggactgtgctctgccaatgtgactcgctattattttaatccaagatacagaacctgtgatactttcacctatactggctgtggagggaatgacaataactttgttagcagggaggattgcaaacgtgcatgtgcaaaaaaaaaaacaaaaaaaaaaaaaaaaaaaaaaaaaaaaaaaaaaaaaacaaaaaaaaaaaaaaaacacaaacaacacaacaaagaaaanaaacaaaaaaaaagaa

SEQ ID NO: 733772 - DNA, 1173 bp, Homo sapiens
  misc_feature (1049)..(1049): n is a, c, g, or t
  misc_feature (1054)..(1054): n is a, c, g, or t
  misc_feature (1059)..(1059): n is a, c, g, or t
  misc_feature (1137)..(1137): n is a, c, g, or t
  misc_feature (1150)..(1150): n is a, c, g, or t
  misc_feature (1169)..(1169): n is a, c, g, or t
cctcttacacagtttgcagcgcgggggcggcggggtgacagtccccgtgcatgaatcagccacccctcaggctccgccccggcgggggtcggccggacgctcgccccgcataaagcgggcacccgggccgcctggagcgagaaagccgcgcacctcctcccgccaggcgctttctcggacgccttgcccagcgggccgcccgaccccctgcaccatggaccccgctcgccccctggggctgtcgattctgctgcttttcctgacggaggctgcactgggcgatgctgctcaggagccaacaggaaataacgcggagatctgtctcctgcccctagactacggaccctgccgggccctacttctccgttactactacgacaggtacacgcagagctgccgccagttcctgtacgggggctgcgagggcaacgccaacaatttctacacctgggaggcttgcgacgatgcttgctggaggatagaaaaagttcccaaagtttgccggctgcaagtgagtgtggacgaccagtgtgaggggtccacagaaaagtatttctttaatctaagttccatgacatgtgaaaaattcttttccggtgggtgtcaccggaaccggattgagaacaggtttccagatgaagctacttgtatgggcttctgcgcaccaaagaaaaagtaaatacgatttttatgttccatcattttgctacagtccaaaagatgagggactgtgctctgccaatgtgactcgctattattttaatccaagatacagaacctgtgatgctttcacctatactggctgtggagggaatgacaataactttgttacagtccaaaagatgagggactgtgctctgccaatgtgactcgctattattttaatccaagatacagaacctgtgatactttcacctatactggctgtggagggaatgacaataactttgttagcagggaggattgcaaacgtgcatgtgcaaaaaaaaaaacaaaaaaaaaaaaaaaaaaaaaaaaaaaaaaaaaaaaaacaaaaaaaaaaaaaattncctgnggccncaggctttttccctttggtgggggttatttttggcttggccctggccgtccgttttccaccgtcgtgcctgggggaanccccggggggttnccccacctttttccccttnacgg

SEQ ID NO: 733773 - DNA, 1435 bp, Homo sapiens
cctcttacacagtttgcagcgcgggggcggcggggtgacagtccccgtgcatgaatcagccacccctcaggctccgccccggcgggggtcggccggacgctcgccccgcataaagcgggcacccgggccgcctggagcgagaaagccgcgcacctcctcccgccaggcgctttctcggacgccttgcccagcgggccgcccgaccccctgcaccatggaccccgctcgccccctggggctgtcgattctgctgcttttcctgacggaggctgcactgggcgatgctgctcaggagccaacaggaaataacgcggagatctgtctcctgcccctagactacggaccctgccgggccctacttctccgttactactacgacaggtacacgcagagctgccgccagttcctgtacgggggctgcgagggcaacgccaacaatttctacacctgggaggcttgcgacgatgcttgctggaggatagaaaaagttcccaaagtttgccggctgcaagtgagtgtggacgaccagtgtgaggggtccacagaaaagtatttctttaatctaagttccatgacatgtgaaaaattcttttccggtgggtgtcaccggaaccggattgagaacaggtttccagatgaagctacttgtatgggcttctgcgcaccaaagaaaaagtaaatacgatttttatgttccatcattttgctacagtccaaaagatgagggactgtgctctgccaatgtgactcgctattattttaatccaagatacagaacctgtgatgctttcacctatactggctgtggagggaatgacaataactttgttacagtccaaaagatgagggactgtgctctgccaatgtgactcgctattattttaatccaagatacagaacctgtgatactttcacctatactggctgtggagggaatgacaataactttgttagcagggaggattgcaaacgtgcatgtgcaaaaaaaaaaacaaaaaaaaaaaaaaaaaaaaaaaaaaaaaaaaaaaaaacaaaaaaaaaaaaaactttgttggggggcttgggccttggaaaaagtttttaaaacccattcgttgttggggggggggccccagtattgtactgtggaccatgcgccaaaggcgtgcttcaaaaggaaaacccggcgccagtgacataggcggctgggggtgtctccccagataaataaaaccgccgggcgcgacacccggggcttttttagaccaatccccgaaggggagacgcggaggagcccaagacgggcgctctaacaaccaggggagtccagagggagcgcgaaataaaatagcggcgcgcgcgtgcggtgagaaacgaacacgtgcacgaccaacgaagaagacaagaggagaaaaacaaaagaacacaagaaaaagcggaaccatacacaacaaag

SEQ ID NO: 733774 - DNA, 1404 bp, Homo sapiens
cctcttacacagtttgcagcgcgggggcggcggggtgacagtccccgtgcatgaatcagccacccctcaggctccgccccggcgggggtcggccggacgctcgccccgcataaagcgggcacccgggccgcctggagcgagaaagccgcgcacctcctcccgccaggcgctttctcggacgccttgcccagcgggccgcccgaccccctgcaccatggaccccgctcgccccctggggctgtcgattctgctgcttttcctgacggaggctgcactgggcgatgctgctcaggagccaacaggaaataacgcggagatctgtctcctgcccctagactacggaccctgccgggccctacttctccgttactactacgacaggtacacgcagagctgccgccagttcctgtacgggggctgcgagggcaacgccaacaatttctacacctgggaggcttgcgacgatgcttgctggaggatagaaaaagttcccaaagtttgccggctgcaagtgagtgtggacgaccagtgtgaggggtccacagaaaagtatttctttaatctaagttccatgacatgtgaaaaattcttttccggtgggtgtcaccggaaccggattgagaacaggtttccagatgaagctacttgtatgggcttctgcgcaccaaagaaaaagtaaatacgatttttatgttccatcattttgctacagtccaaaagatgagggactgtgctctgccaatgtgactcgctattattttaatccaagatacagaacctgtgatgctttcacctatactggctgtggagggaatgacaataactttgttacagtccaaaagatgagggactgtgctctgccaatgtgactcgctattattttaatccaagatacagaacctgtgatactttcacctatactggctgtggagggaatgacaataactttgttagcagggaggattgcaaacgtgcatgtgcaaaaaaaaaaacaaaaaaaaaaaaaaaaaaaaaactttgttggggggcttgggccttggaaaaagtttttaaaacccattcgttgttggggggggggccccagtattgtactgtggaccatgcgccaaaggcgtgcttcaaaaggaaaacccggcgccagtgacataggcggctgggggtgtctccccagataaataaaaccgccgggcgcgacacccggggcttttttagaccaatccccgaaggggagacgcggaggagcccaagacgggcgctctaacaaccaggggagtccagagggagcgcgaaataaaatagcggcgcgcgcgtgcggtgagaaacgaacacgtgcacgaccaacgaagaagacaagaggagaaaaacaaaagaacacaagaaaaagcggaaccatacacaacaaag

SEQ ID NO: 733775 - DNA, 1141 bp, Homo sapiens
  misc_feature (1125)..(1125): n is a, c, g, or t
cctcttacacagtttgcagcgcgggggcggcggggtgacagtccccgtgcatgaatcagccacccctcaggctccgccccggcgggggtcggccggacgctcgccccgcataaagcgggcacccgggccgcctggagcgagaaagccgcgcacctcctcccgccaggcgctttctcggacgccttgcccagcgggccgcccgaccccctgcaccatggaccccgctcgccccctggggctgtcgattctgctgcttttcctgacggaggctgcactgggcgatgctgctcaggagccaacaggaaataacgcggagatctgtctcctgcccctagactacggaccctgccgggccctacttctccgttactactacgacaggtacacgcagagctgccgccagttcctgtacgggggctgcgagggcaacgccaacaatttctacacctgggaggcttgcgacgatgcttgctggaggatagaaaaagttcccaaagtttgccggctgcaagtgagtgtggacgaccagtgtgaggggtccacagaaaagtatttctttaatctaagttccatgacatgtgaaaaattcttttccggtgggtgtcaccggaaccggattgagaacaggtttccagatgaagctacttgtatgggcttctgcgcaccaaagaaaaagtaaatacgatttttatgttccatcattttgctacagtccaaaagatgagggactgtgctctgccaatgtgactcgctattattttaatccaagatacagaacctgtgatgctttcacctatactggctgtggagggaatgacaataactttgttacagtccaaaagatgagggactgtgctctgccaatgtgactcgctattattttaatccaagatacagaacctgtgatactttcacctatactggctgtggagggaatgacaataactttgttagcagggaggattgcaaacgtgcatgtgcaaaaaaaaaaacaaaaaaaaaaaaaaaaaaaaaaaaaaaaaaaaaaaaaaaaaaaaaaaaaaaacaaaaaaacaaaaaaaaaaaaaaaaaaaaaaaaaacaaacaaaaaaacaaacaaaacacaaacaacacaacaaagaaaanaaacaaaaaaaaagaa

SEQ ID NO: 733776 - DNA, 1423 bp, Homo sapiens
cctcttacacagtttgcagcgcgggggcggcggggtgacagtccccgtgcatgaatcagccacccctcaggctccgccccggcgggggtcggccggacgctcgccccgcataaagcgggcacccgggccgcctggagcgagaaagccgcgcacctcctcccgccaggcgctttctcggacgccttgcccagcgggccgcccgaccccctgcaccatggaccccgctcgccccctggggctgtcgattctgctgcttttcctgacggaggctgcactgggcgatgctgctcaggagccaacaggaaataacgcggagatctgtctcctgcccctagactacggaccctgccgggccctacttctccgttactactacgacaggtacacgcagagctgccgccagttcctgtacgggggctgcgagggcaacgccaacaatttctacacctgggaggcttgcgacgatgcttgctggaggatagaaaaagttcccaaagtttgccggctgcaagtgagtgtggacgaccagtgtgaggggtccacagaaaagtatttctttaatctaagttccatgacatgtgaaaaattcttttccggtgggtgtcaccggaaccggattgagaacaggtttccagatgaagctacttgtatgggcttctgcgcaccaaagaaaaagtaaatacgatttttatgttccatcattttgctacagtccaaaagatgagggactgtgctctgccaatgtgactcgctattattttaatccaagatacagaacctgtgatgctttcacctatactggctgtggagggaatgacaataactttgttacagtccaaaagatgagggactgtgctctgccaatgtgactcgctattattttaatccaagatacagaacctgtgatactttcacctatactggctgtggagggaatgacaataactttgttagcagggaggattgcaaacgtgcatgtgcaaaaaaaaaaacaaaaaaaaaaaaaaaaaaaaaaaaaaaaaaaaaaaaaaaaactttgttggggggcttgggccttggaaaaagtttttaaaacccattcgttgttggggggggggccccagtattgtactgtggaccatgcgccaaaggcgtgcttcaaaaggaaaacccggcgccagtgacataggcggctgggggtgtctccccagataaataaaaccgccgggcgcgacacccggggcttttttagaccaatccccgaaggggagacgcggaggagcccaagacgggcgctctaacaaccaggggagtccagagggagcgcgaaataaaatagcggcgcgcgcgtgcggtgagaaacgaacacgtgcacgaccaacgaagaagacaagaggagaaaaacaaaagaacacaagaaaaagcggaaccatacacaacaaag

SEQ ID NO: 733777 - DNA, 990 bp, Homo sapiens
cctcttacacagtttgcagcgcgggggcggcggggtgacagtccccgtgcatgaatcagccacccctcaggctccgccccggcgggggtcggccggacgctcgccccgcataaagcgggcacccgggccgcctggagcgagaaagccgcgcacctcctcccgccaggcgctttctcggacgccttgcccagcgggccgcccgaccccctgcaccatggaccccgctcgccccctggggctgtcgattctgctgcttttcctgacggaggctgcactgggcgatgctgctcaggagccaacaggaaataacgcggagatctgtctcctgcccctagactacggaccctgccgggccctacttctccgttactactacgacaggtacacgcagagctgccgccagttcctgtacgggggctgcgagggcaacgccaacaatttctacacctgggaggcttgcgacgatgcttgctggaggatagaaaaagttcccaaagtttgccggctgcaagtgagtgtggacgaccagtgtgaggggtccacagaaaagtatttctttaatctaagttccatgacatgtgaaaaattcttttccggtgggtgtcaccggaaccggattgagaacaggtttccagatgaagctacttgtatgggcttctgcgcaccaaagaaaaagtaaatacgatttttatgttccatcattttgctacagtccaaaagatgagggactgtgctctgccaatgtgactcgctattattttaatccaagatacagaacctgtgatgctttcacctatactggctgtggagggaatgacaataactttgttacagtccaaaagatgagggactgtgctctgccaatgtgactcgctattattttaatccaagatacagaacctgtgatactttcacctatactggctgtggagggaatgacaataactttgttagcagtgaaatggaaactgggatcctctagacgccacc

SEQ ID NO: 733778 - DNA, 803 bp, Homo sapiens
cctcttacacagtttgcagcgcgggggcggcggggtgacagtccccgtgcatgaatcagccacccctcaggctccgccccggcgggggtcggccggacgctcgccccgcataaagcgggcacccgggccgcctggagcgagaaagccgcgcacctcctcccgccaggcgctttctcggacgccttgcccagcgggccgcccgaccccctgcaccatggaccccgctcgccccctggggctgtcgattctgctgcttttcctgacggaggctgcactgggcgatgctgctcaggagccaacaggaaataacgcggagatctgtctcctgcccctagactacggaccctgccgggccctacttctccgttactactacgacaggtacacgcagagctgccgccagttcctgtacgggggctgcgagggcaacgccaacaatttctacacctgggaggcttgcgacgatgcttgctggaggatagaaaaagttcccaaagtttgccggctgcaagtgagtgtggacgaccagtgtgaggggtccacagaaaagtatttctttaatctaagttccatgacatgtgaaaaattcttttccggtgggtgtcaccggaaccggattgagaacaggtttccagatgaagctacttgtatgggcttctgcgcaccaaagaaaaagtaaatacgatttttatgttccatcattttgctacagtccaaaagatgagggactgtgctctgccaatgtgactcgctattattttaatccaagatgacgactgacacggccatagagcgactgacag

SEQ ID NO: 733779 - DNA, 880 bp, Homo sapiens
  misc_feature (796)..(796): n is a, c, g, or t
  misc_feature (824)..(824): n is a, c, g, or t
  misc_feature (865)..(865): n is a, c, g, or t
cctcttacacagtttgcagcgcgggggcggcggggtgacagtccccgtgcatgaatcagccacccctcaggctccgccccggcgggggtcggccggacgctcgccccgcataaagcgggcacccgggccgcctggagcgagaaagccgcgcacctcctcccgccaggcgctttctcggacgccttgcccagcgggccgcccgaccccctgcaccatggaccccgctcgccccctggggctgtcgattctgctgcttttcctgacggaggctgcactgggcgatgctgctcaggagccaacaggaaataacgcggagatctgtctcctgcccctagactacggaccctgccgggccctacttctccgttactactacgacaggtacacgcagagctgccgccagttcctgtacgggggctgcgagggcaacgccaacaatttctacacctgggaggcttgcgacgatgcttgctggaggatagaaaaagttcccaaagtttgccggctgcaagtgagtgtggacgaccagtgtgaggggtccacagaaaagtatttctttaatctaagttccatgacatgtgaaaaattcttttccggtgggtgtcaccggaaccggattgagaacaggtttccagatgaagctacttgtatgggcttctgcgcaccaaagaaaaagtaaatacgatttttatgttccatcattttgctacagtccaaaagatgagggactgtgctctgccaatgtgactcgctattattttaatccaagatgtgaaattggccctttcaccctaantactgggctggtgggaaggggaaatgancaaattaaactttggttaagccaagggggagggaattggcnaaaaccgttgccatg

SEQ ID NO: 733780 - DNA, 3051 bp, Homo sapiens
cctcttacacagtttgcagcgcgggggcggcggggtgacagtccccgtgcatgaatcagccacccctcaggctccgccccggcgggggtcggccggacgctcgccccgcataaagcgggcacccgggccgcctggagcgagaaagccgcgcacctcctcccgccaggcgctttctcggacgccttgcccagcgggccgcccgaccccctgcaccatggaccccgctcgccccctggggctgtcgattctgctgcttttcctgacggaggctgcactgggcgatgctgctcaggagccaacaggaaataacgcggagatctgtctcctgcccctagactacggaccctgccgggccctacttctccgttactactacgacaggtacacgcagagctgccgccagttcctgtacgggggctgcgagggcaacgccaacaatttctacacctgggaggcttgcgacgatgcttgctggaggatagaaaaagttcccaaagtttgccggctgcaagtgagtgtggacgaccagtgtgaggggtccacagaaaagtatttctttaatctaagttccatgacatgtgaaaaattcttttccggtgggtgtcaccggaaccggattgagaacaggtttccagatgaagctacttgtatgggcttctgcgcaccaaagaaaaagtaaatacgatttttatgttccatcattttgctacagtccaaaagatgagggactgtgctctgccaatgtgatgaggaaacaaatcattggtgatttattcaccagtttttattaatacaagtcactttttcaaaaatttggatttttttatatataactagctgctattcaaatgtgagtctaccatttttaatttatggttcaactgtttgtgagactgaattcttgcaatgcataagatataaaagcaaatatgactcactcatttcttggggtcgtattcctgatttcagaagaggatcataactgaaacaacataagacaatataatcatgtgcttttaacatatttgagaataaaaaggactagcaaataaaactcattttgcatttaaaagttggattatattttagtcccaagaagacaaagtcgcagattaacaacactttaaaaatattactcccattttattgtgttagattgcagtacaatgaatgaataaggggatttatttaaaagatcttaactttcttgactgatttaaaaagctaatcaatttattaaagccagaaatgttctcctctgggaaagcaatttctatctatttatctaccaatccccactcacatgtatatgtttgtgtttacatagagatagatggttttaagggttttcctattgttaaattatttcctaagacattgtgggttggagaccactaaacttataaaaaaccaaggaaagtaaagtttttcaaatgtttatactgtttaaggtgtttatttatataaaccatgcatgagaaaccatgcataaatttaataatttaaatttcaccagtaaattatcattgattaaatatggtcataccaatgaaataggttttttctttctctgtaataaaacaatttttctaaattcttatgttttcatagcaagattaacatatttaattacaaattaaatatgcaaaatgacaaatgcgtttaccttttgcttgaacaatctttcatttaaaaatttatcccagttattttgacaaataggtatatgcctgagaactttgaatgatgctgaaagctagaagcaaaccaggtactcttcagtcagggactggttgaagattttatggatgaggagttagcaaaatatctatatatgcatatcttctgactcccaggatacataagaaacacagggcctagaacagtatgaataaacacacatatacacaaacatcacagaagatactaaagatattaaaaatgtttacctatagaggtttggagagaacagaggggtggacagttgtggagataatatttgtgtaaatataactgtgatatagtttttatcttggaccatgtaaatatttgacataattaataatcaaaattaaatcacaaaagaaaaagcatttctttaagcattcaaacccaaatgaataccaaatagtggcaaaactacacaaaagatatatacttattttcaatgacttcacaaattaatatgagaatgtctttgggggaatataaaggtgaaaaaattctgaagaaatctcaaaatgcatttttaaatttgttattactttttatttgaatagttttgggagttacaagtggttttttattacatggatgaattatattgcagtgaattctgagattttagtgcactgtgaaaatgcatttagtagtctcattgttaatggtaatactggtgttattttgaacctattgtatctagaatactatgttgtaagaaaacaagtagttacatttctttagaagtcaggattttcagtgttaagagaaaatgagatacaagtatacaatgaaagaaattaagtaaaaatctttgacttaaattggaattagaaatattcatataaattaataactgattttctctatcaaaaaatctgtatttcccacttttccattgaaaagtccttgaagtaatgacaactcagtagcagtagttacaatgaacatcaagactgtggtctctccatactattactcactggttcctaagaaccagtgctcttaggagaatagctgaatccaggtctggggcaggaaatatgtaaaataaacttgggccatcttactccagaaatcaaggaagctatcaaagactaatgaatcatgtcacaaaaacgggagcaatattaaggagctcccactaacctaaaatgagacaatatggccatcaaaacaaataatgaccacaatgtatataaatatatagaaatctgagtttatgattatatacacacactcacctccttggtaccttttggaggtttctagggcattatctcattcatttgaaaacgatgaattaacagaaagaataaagcatttatcctt

SEQ ID NO: 733781 - DNA, 1726 bp, Homo sapiens
  misc_feature (1710)..(1710): n is a, c, g, or t
cctcttacacagtttgcagcgcgggggcggcggggtgacagtccccgtgcatgaatcagccacccctcaggctccgccccggcgggggtcggccggacgctcgccccgcataaagcgggcacccgggccgcctggagcgagaaagccgcgcacctcctcccgccaggcgctttctcggacgccttgcccagcgggccgcccgaccccctgcaccatggaccccgctcgccccctggggctgtcgattctgctgcttttcctgacggaggctgcactgggcgatgctgctcaggagccaacaggaaataacgcggagatctgtctcctgcccctagactacggaccctgccgggccctacttctccgttactactacgacaggtacacgcagagctgccgccagttcctgtacgggggctgcgagggcaacgccaacaatttctacacctgggaggcttgcgacgatgcttgctggaggatagaaaaagttcccaaagtttgccggctgcaagtgagtgtggacgaccagtgtgaggggtccacagaaaagtatttctttaatctaagttccatgacatgtgaaaaattcttttccggtgggtgtcaccggaaccggattgagaacaggtttccagatgaagctacttgtatgggcttctgcgcaccaaagaaaaagtaaatacgatttttatgttccatcattttgctacagtccaaaagatgagggactgtgctctgccaatgtgatgaggaaacaaatcattggtgatttattcaccagtttttattaatacaagtcactttttcaaaaatttggatttttttatatataactagctgctattcaaatgtgagtctaccatttttaatttatggttcaactgtttgtgagactgaattcttgcaatgcataagatataaaagcaaatatgactcactcatttcttggggtcgtattcctgatttcagaagaggatcataactgaaacaacataagacaatataatcatgtgcttttaacatatttgagaataaaaaggactagcaaataaaactcattttgcatttaaaagttggattatattttagtcccaagaagacaaagtcgcagattaacaacactttaaaaatattactcccattttattgtgttagattgcagtacaatgaatgaataaggggatttatttaaaagatcttaactttcttgactgatttaaaaagctaatcaatttattaaagccagaaatgttctcctctgggaaagcaatttctatctatttatctaccaatccccactcacatgtatatgtttgtgtttacatagagatagatggttttaagggttttcctattgttaaattatttcctaagacattgtgggttggagaccactaaacttataaaaaaccaaggaaagtaaagtttttcaaatgtttatactgtttaaggtgtttatttatataaaccatgcatgagaaaccatgcataaatttaataatttaaatttcaccagtaaattatcattgattaaatatggtcataccaatgaaataggttttttctttctctgtaataaaacaatttttctaaattcttatgttttcatagcaagattaacatatttaattacaaattaaatatgcaaaatgaaaaaaaaaaaaaaaaacaaaaaaaaaaaaaaaacacaaacaacacaacaaagaaaanaaacaaaaaaaaagaa

SEQ ID NO: 733782 - DNA, 1811 bp, Homo sapiens
  misc_feature (1687)..(1687): n is a, c, g, or t
  misc_feature (1692)..(1692): n is a, c, g, or t
  misc_feature (1697)..(1697): n is a, c, g, or t
  misc_feature (1775)..(1775): n is a, c, g, or t
  misc_feature (1788)..(1788): n is a, c, g, or t
  misc_feature (1807)..(1807): n is a, c, g, or t
cctcttacacagtttgcagcgcgggggcggcggggtgacagtccccgtgcatgaatcagccacccctcaggctccgccccggcgggggtcggccggacgctcgccccgcataaagcgggcacccgggccgcctggagcgagaaagccgcgcacctcctcccgccaggcgctttctcggacgccttgcccagcgggccgcccgaccccctgcaccatggaccccgctcgccccctggggctgtcgattctgctgcttttcctgacggaggctgcactgggcgatgctgctcaggagccaacaggaaataacgcggagatctgtctcctgcccctagactacggaccctgccgggccctacttctccgttactactacgacaggtacacgcagagctgccgccagttcctgtacgggggctgcgagggcaacgccaacaatttctacacctgggaggcttgcgacgatgcttgctggaggatagaaaaagttcccaaagtttgccggctgcaagtgagtgtggacgaccagtgtgaggggtccacagaaaagtatttctttaatctaagttccatgacatgtgaaaaattcttttccggtgggtgtcaccggaaccggattgagaacaggtttccagatgaagctacttgtatgggcttctgcgcaccaaagaaaaagtaaatacgatttttatgttccatcattttgctacagtccaaaagatgagggactgtgctctgccaatgtgatgaggaaacaaatcattggtgatttattcaccagtttttattaatacaagtcactttttcaaaaatttggatttttttatatataactagctgctattcaaatgtgagtctaccatttttaatttatggttcaactgtttgtgagactgaattcttgcaatgcataagatataaaagcaaatatgactcactcatttcttggggtcgtattcctgatttcagaagaggatcataactgaaacaacataagacaatataatcatgtgcttttaacatatttgagaataaaaaggactagcaaataaaactcattttgcatttaaaagttggattatattttagtcccaagaagacaaagtcgcagattaacaacactttaaaaatattactcccattttattgtgttagattgcagtacaatgaatgaataaggggatttatttaaaagatcttaactttcttgactgatttaaaaagctaatcaatttattaaagccagaaatgttctcctctgggaaagcaatttctatctatttatctaccaatccccactcacatgtatatgtttgtgtttacatagagatagatggttttaagggttttcctattgttaaattatttcctaagacattgtgggttggagaccactaaacttataaaaaaccaaggaaagtaaagtttttcaaatgtttatactgtttaaggtgtttatttatataaaccatgcatgagaaaccatgcataaatttaataatttaaatttcaccagtaaattatcattgattaaatatggtcataccaatgaaataggttttttctttctctgtaataaaacaatttttctaaattcttatgttttcatagcaagattaacatatttaattacaaattaaatatgcaaaatgaaaaaaaaaaaaaaaaacaaaaaaaaaaaaaattncctgnggccncaggctttttccctttggtgggggttatttttggcttggccctggccgtccgttttccaccgtcgtgcctgggggaanccccggggggttnccccacctttttccccttnacgg

SEQ ID NO: 733783 - DNA, 2073 bp, Homo sapiens
cctcttacacagtttgcagcgcgggggcggcggggtgacagtccccgtgcatgaatcagccacccctcaggctccgccccggcgggggtcggccggacgctcgccccgcataaagcgggcacccgggccgcctggagcgagaaagccgcgcacctcctcccgccaggcgctttctcggacgccttgcccagcgggccgcccgaccccctgcaccatggaccccgctcgccccctggggctgtcgattctgctgcttttcctgacggaggctgcactgggcgatgctgctcaggagccaacaggaaataacgcggagatctgtctcctgcccctagactacggaccctgccgggccctacttctccgttactactacgacaggtacacgcagagctgccgccagttcctgtacgggggctgcgagggcaacgccaacaatttctacacctgggaggcttgcgacgatgcttgctggaggatagaaaaagttcccaaagtttgccggctgcaagtgagtgtggacgaccagtgtgaggggtccacagaaaagtatttctttaatctaagttccatgacatgtgaaaaattcttttccggtgggtgtcaccggaaccggattgagaacaggtttccagatgaagctacttgtatgggcttctgcgcaccaaagaaaaagtaaatacgatttttatgttccatcattttgctacagtccaaaagatgagggactgtgctctgccaatgtgatgaggaaacaaatcattggtgatttattcaccagtttttattaatacaagtcactttttcaaaaatttggatttttttatatataactagctgctattcaaatgtgagtctaccatttttaatttatggttcaactgtttgtgagactgaattcttgcaatgcataagatataaaagcaaatatgactcactcatttcttggggtcgtattcctgatttcagaagaggatcataactgaaacaacataagacaatataatcatgtgcttttaacatatttgagaataaaaaggactagcaaataaaactcattttgcatttaaaagttggattatattttagtcccaagaagacaaagtcgcagattaacaacactttaaaaatattactcccattttattgtgttagattgcagtacaatgaatgaataaggggatttatttaaaagatcttaactttcttgactgatttaaaaagctaatcaatttattaaagccagaaatgttctcctctgggaaagcaatttctatctatttatctaccaatccccactcacatgtatatgtttgtgtttacatagagatagatggttttaagggttttcctattgttaaattatttcctaagacattgtgggttggagaccactaaacttataaaaaaccaaggaaagtaaagtttttcaaatgtttatactgtttaaggtgtttatttatataaaccatgcatgagaaaccatgcataaatttaataatttaaatttcaccagtaaattatcattgattaaatatggtcataccaatgaaataggttttttctttctctgtaataaaacaatttttctaaattcttatgttttcatagcaagattaacatatttaattacaaattaaatatgcaaaatgaaaaaaaaaaaaaaaaacaaaaaaaaaaaaaactttgttggggggcttgggccttggaaaaagtttttaaaacccattcgttgttggggggggggccccagtattgtactgtggaccatgcgccaaaggcgtgcttcaaaaggaaaacccggcgccagtgacataggcggctgggggtgtctccccagataaataaaaccgccgggcgcgacacccggggcttttttagaccaatccccgaaggggagacgcggaggagcccaagacgggcgctctaacaaccaggggagtccagagggagcgcgaaataaaatagcggcgcgcgcgtgcggtgagaaacgaacacgtgcacgaccaacgaagaagacaagaggagaaaaacaaaagaacacaagaaaaagcggaaccatacacaacaaag

SEQ ID NO: 733784 - DNA, 1760 bp, Homo sapiens
  misc_feature (1744)..(1744): n is a, c, g, or t
cctcttacacagtttgcagcgcgggggcggcggggtgacagtccccgtgcatgaatcagccacccctcaggctccgccccggcgggggtcggccggacgctcgccccgcataaagcgggcacccgggccgcctggagcgagaaagccgcgcacctcctcccgccaggcgctttctcggacgccttgcccagcgggccgcccgaccccctgcaccatggaccccgctcgccccctggggctgtcgattctgctgcttttcctgacggaggctgcactgggcgatgctgctcaggagccaacaggaaataacgcggagatctgtctcctgcccctagactacggaccctgccgggccctacttctccgttactactacgacaggtacacgcagagctgccgccagttcctgtacgggggctgcgagggcaacgccaacaatttctacacctgggaggcttgcgacgatgcttgctggaggatagaaaaagttcccaaagtttgccggctgcaagtgagtgtggacgaccagtgtgaggggtccacagaaaagtatttctttaatctaagttccatgacatgtgaaaaattcttttccggtgggtgtcaccggaaccggattgagaacaggtttccagatgaagctacttgtatgggcttctgcgcaccaaagaaaaagtaaatacgatttttatgttccatcattttgctacagtccaaaagatgagggactgtgctctgccaatgtgatgaggaaacaaatcattggtgatttattcaccagtttttattaatacaagtcactttttcaaaaatttggatttttttatatataactagctgctattcaaatgtgagtctaccatttttaatttatggttcaactgtttgtgagactgaattcttgcaatgcataagatataaaagcaaatatgactcactcatttcttggggtcgtattcctgatttcagaagaggatcataactgaaacaacataagacaatataatcatgtgcttttaacatatttgagaataaaaaggactagcaaataaaactcattttgcatttaaaagttggattatattttagtcccaagaagacaaagtcgcagattaacaacactttaaaaatattactcccattttattgtgttagattgcagtacaatgaatgaataaggggatttatttaaaagatcttaactttcttgactgatttaaaaagctaatcaatttattaaagccagaaatgttctcctctgggaaagcaatttctatctatttatctaccaatccccactcacatgtatatgtttgtgtttacatagagatagatggttttaagggttttcctattgttaaattatttcctaagacattgtgggttggagaccactaaacttataaaaaaccaaggaaagtaaagtttttcaaatgtttatactgtttaaggtgtttatttatataaaccatgcatgagaaaccatgcataaatttaataatttaaatttcaccagtaaattatcattgattaaatatggtcataccaatgaaataggttttttctttctctgtaataaaacaatttttctaaattcttatgttttcatagcaagattaacatatttaattacaaattaaatatgcaaaatgaaaaaaaaaaaacaaaaaaacaaaaaaaaaaaaaaaaaaaaaaaaaacaaacaaaaaaacaaacaaaacacaaacaacacaacaaagaaaanaaacaaaaaaaaagaa

SEQ ID NO: 733785 - DNA, 1155 bp, Homo sapiens
  misc_feature (1139)..(1139): n is a, c, g, or t
cctcttacacagtttgcagcgcgggggcggcggggtgacagtccccgtgcatgaatcagccacccctcaggctccgccccggcgggggtcggccggacgctcgccccgcataaagcgggcacccgggccgcctggagcgagaaagccgcgcacctcctcccgccaggcgctttctcggacgccttgcccagcgggccgcccgaccccctgcaccatggaccccgctcgccccctggggctgtcgattctgctgcttttcctgacggaggctgcactgggcgatgctgctcaggagccaacaggaaataacgcggagatctgtctcctgcccctagactacggaccctgccgggccctacttctccgttactactacgacaggtacacgcagagctgccgccagttcctgtacgggggctgcgagggcaacgccaacaatttctacacctgggaggcttgcgacgatgcttgctggaggatagaaaaagttcccaaagtttgccggctgcaagtgagtgtggacgaccagtgtgaggggtccacagaaaagtatttctttaatctaagttccatgacatgtgaaaaattcttttccggtgggtgtcaccggaaccggattgagaacaggtttccagatgaagctacttgtatgggcttctgcgcaccaaagaaaaagtaaatacgatttttatgttccatcattttgctacagtccaaaagatgagggactgtgctctgccaatgtgatgaggaaacaaatcattggtgatttattcaccagtttttattaatacaagtcactttttcaaaaatttggatttttttatatataactagctgctattcaaatgtgagtctaccatttttaatttatggttcaactgtttgtgagactgaattcttgcaatgcataagatataaaagcaaatatgactcactcatttcttggggtcgtattcctgatttcagaagaggatcataactgaaacaacataagacaatataatcatgtgcttttaacatatttgagaataaaaaggactagcaaataaaaaaaaacaaaaaaaaaaaaaaaaaaaaaaaaaaaaaaaaaaaaaacaaaaaaaaaaaaaaaacacaaacaacacaacaaagaaaanaaacaaaaaaaaagaa

SEQ ID NO: 733786 - DNA, 876 bp, Homo sapiens
catcagtttgacataagattctactaaactagtttcaacattagaataaggaaaggaaaattcctactttgtaaaaatcatattattctgatttcatcaccaacctcacagttttccaggcatatgtagaagaagtaattataatgccaaagtatgaaatatagccggtttcataaccggaatgaattatggctaattctcctgcagtaaataatttgtttttcaaatctgtattccccagacagctgagccaggccttgcttctcaagtgttttatttaaataggcagtatgtcagtggagttttaccacagagtttctgagcgcagagagcctttccctaggagtggggtgcagggaactggagggcaatggttcttatgagaaggtgatgatgcttctaagaaaaaagattacacaatgccctggctaaagctactgtgaaagaacttgcctcactgcacggcaccaagtacacatatggcccgggagctacaacaatctatcctgctgctgggggctctgacgactgggcttatgaccaaggaatcagatattccttcacctttgaacttcgagatacaggcagatatggctttctccttccagaatcccagatccgggctacctgcgaggagaccttcctggcaatcaagtatgttgccagctacgtcctggaacacctgtactagttgagaaagctgatggccttgtttcaaaattctcatttttcatttcttttctttcttgaattcttattttggtttgcctggatgttttgcagatcccaatctttcttttaagcttctgggtctattaaactaggtagatcttttcgtattgatcataataaaagtgaatcattactattggaaaa

SEQ ID NO: 733787 - DNA, 625 bp, Homo sapiens
catcagtttgacataagattctactaaactagtttcaacattagaataaggaaaggaaaattcctactttgtaaaaatcatattattctgatttcatcaccaacctcacagttttccaggcatatgtagaagaagtaattataatgccaaagtatgaaatatagccggtttcataaccggaatgaattatggctaattctcctgcagtaaataatttgtttttcaaatctgtattccccagacagctgagccaggccttgcttctcaagtgttttatttaaataggcagtatgtcagtggagttttaccacagagtttctgagcgcagagagcctttccctaggagtggggtgcagggaactggagggcaatggttcttatgagaaggtgatgatgcttctaagaaaaaagattacacgtaagttaatacctaaccattttttttaattctgaaattcaaatgttctgcattttgaaatagaatgaatattctctaactttttagtctaaaaaatttccaagctggagctaccactcatccttggaactgccaattcctaagcattttcatgctggcactgaatgttgcattgactagccattcctatgtgcagtttctaatgct

SEQ ID NO: 733788 - DNA, 1808 bp, Homo sapiens
caggcagcagcgagtgacaggacgtctggaccggcgcgccgctagcagctctgccgggccgcggcggtgatcgatggggagcggctggagcggacccagcgagtgagggcgcacagccgggacgccgaggcggcgggcgggagacccgcaccagcgcagccggccctcggcgggacgtgacgcagcgcccggggcgcgggtgttgagagagataccctctcagactttacacagctaccaaggcaacaatgccaggaaaactattaatcaagatatgatagttcctgtttgcaatcaggagaagaaagcaaagaacactcaggattataaaagcagatgagacctacccactagacctggtcagacacaatgttggcactcttggttctggtgactgtggccctggcatctgctcatcatggtggtgagcactttgaaggcgagaaggtgttccgtgttaacgttgaagatgaaaatcacattaacataatccgcgagttggccagcacgacccagattgacttctggaagccagattctgtcacacaaatcaaacctcacagtacagttgacttccgtgttaaagcagaagatactgtcactgtggagaatgttctaaagcagaatgaactacaatacaaggtactgataagcaacctgagaaatgtggtggaggctcagtttgatagccgggttcgtgcaacaggacacagttatgagaagtacaacaagtgggaaacgatagaggcttggactcaacaagtcgccactgagaatccagccctcatctctcgcagtgttatcggaaccacatttgagggacgcgctatttacctcctgaaggttggcaaagctggacaaaataagcctgccattttcatggactgtggtttccatgccagagagtggatttctcctgcattctgccagtggtttgtaagagaggctgttcgtacctatggacgtgagatccaagtgacagagcttctcgacaagttagacttttatgtcctgcctgtgctcaatattgatggctacatctacacctggaccaagagccgattttggagaaagactcgctccacccatactggatctagctgcattggcacagaccccaacagaaattttgatgctggttggtgtgaaattggagcctctcgaaacccctgtgatgaaacttactgtggacctgccgcagagtctgaaaaggagaccaaggccctggctgatttcatccgcaacaaactctcttccatcaaggcatatctgacaatccactcgtactcccaaatgatgatctacccttactcatatgcttacaaactcggtgagaacaatgctgagttgaatgccctggctaaagctactgtgaaagaacttgcctcactgcacggcaccaagtacacatatggcccgggagctacaacaatctatcctgctgctgggggctctgacgactgggcttatgaccaaggaatcagatattccttcacctttgaacttcgagatacaggcagatatggctttctccttccagaatcccagatccgggctacctgcgaggagaccttcctggcaatcaagtatgttgccagctacgtcctggaacacctgtactagttgagaaagctgatggccttgtttcaaaattctcatttttcatttcttttctttcttgaattcttattttggtttgcctggatgttttgcagatcccaatctttcttttaagcttctgggtctattaaactaggtagatcttttcgtattgatcataataaaagtgaatcattactattggaaaa

SEQ ID NO: 733789 - DNA, 815 bp, Homo sapiens
gtgttgagagagataccctctcagactttacacagctaccaaggcaacaatgccaggaaaactattaatcaagatatgatagttcctgtttgcaatcaggagaagaaagcaaagaacactcaggattataaaagcagatgagacctacccactagacctggtcagacacaatgttggcactcttggttctggtgactgtggccctggcatctgctcatcatggtggtgagcactttgaaggcgagaaggtgttccgtgttaacgttgaagatgaaaatcacattaacataatccgcgagttggccagcacgacccagattgacttctggaagccagattctgtcacacaaatcaaacctcacagtacagttgacttccgtgttaaagcagaagatactgtcactgtggagaatgttctaaagcagaatgaactacaatacaaatcctgctgctgggggctctgacgactgggcttatgaccaaggaatcagatattccttcacctttgaacttcgagatacaggcagatatggctttctccttccagaatcccagatccgggctacctgcgaggagaccttcctggcaatcaagtatgttgccagctacgtcctggaacacctgtactagttgagaaagctgatggccttgtttcaaaattctcatttttcatttcttttctttcttgaattcttattttggtttgcctggatgttttgcagatcccaatctttcttttaagcttctgggtctattaaactaggtagatcttttcgtattgatcataataaaagtgaatcattactattggaaaa

SEQ ID NO: 733790 - DNA, 430 bp, Homo sapiens
gtgagtcttggcttcagaactgtgcaaagaaccatgtgcctaaaaagccaacgaaagatcctgctgctgggggctctgacgactgggcttatgaccaaggaatcagatattccttcacctttgaacttcgagatacaggcagatatggctttctccttccagaatcccagatccgggctacctgcgaggagaccttcctggcaatcaagtatgttgccagctacgtcctggaacacctgtactagttgagaaagctgatggccttgtttcaaaattctcatttttcatttcttttctttcttgaattcttattttggtttgcctggatgttttgcagatcccaatctttcttttaagcttctgggtctattaaactaggtagatcttttcgtattgatcataataaaagtgaatcattactattggaaaa

SEQ ID NO: 733791 - DNA, 998 bp, Homo sapiens
gatccggtgggagggaacatctggaacattagacaggatgctgatcttctggacaatcacacttttcctgctgggagcagccaaaggaaaagaagtttgctatgaggacctcgggtgcttttctgacactgagccctggggcgggacagcaatcaggcccctgaaaattctcccctggagccctgagaagatcggcacccgcttcctgctgtacaccaatgaaaacccaaacaactttcaaattctcctcctctctgatccatcaacaattgaggcatcaaattttcaaatggacagaaagacccggttcatcatccatgggcttcatagacaaaggagatgagagctgggtgacagacatgtgcaaggtaggagccagctctgatccctgtggccagctgaggccaacacttctgctaacatctctgcatcactttatgcactcaagaaatctttacatattaggtaactttatgcaattaaaatgcttctcttcacaaaaattaaaatgcctttccatgtttccgcactacatttgcacactgaagcaaccacatttgctgttagaaaagtactcctactacctaatttctggttaaaccaaggcctgatgttttctgcttccatttgtagtgagggtactttgtatcctataagcgagggactataggggtttctttgttcaaatttttcccacatccctgagaggctgacatgtgttgctgtgaccacttaattgatcccagcactttgggaggccaaggtggatggatcacctgaggtcaggagttcgagaccagcctggcgaacatggtgaaaccctatctctactaatgatacaaaaatcagcctgttgtggtggcaggctcttgtagtcccagctacttgggaggctgaggcaggaaaattgcttgaacccaggaggcaaaggttgcaatgagccaatattgtgccactacactccagcctgggcaacagagtgagactccatctcaaaa

SEQ ID NO: 733792 - DNA, 1509 bp, Homo sapiens
gatccggtgggagggaacatctggaacattagacaggatgctgatcttctggacaatcacacttttcctgctgggagcagccaaaggaaaagaagtttgctatgaggacctcgggtgcttttctgacactgagccctggggcgggacagcaatcaggcccctgaaaattctcccctggagccctgagaagatcggcacccgcttcctgctgtacaccaatgaaaacccaaacaactttcaaattctcctcctctctgatccatcaacaattgaggcatcaaattttcaaatggacagaaagacccggttcatcatccatgggcttcatagacaaaggagatgagagctgggtgacagacatgtgcaagaaactgttcgaggtggaggaggtgaactgcatctgcgtggactggaagaagggctcccaagccacctacacacaggctgccaacaacgtgcgagtggtgggcgcccaggtggcccagatgctcgacatcctcttgacagagtatagctaccccccttccaaagttcacctcattggccacagcctgggagcccacgtggctggagaggcaggaagcaagactccaggcctgagcaggattacagggttggatcctgtagaagcaagtttcgagagtactcctgaagaggtgcgacttgatccctctgatgctgactttgttgatgtgattcacacggatgcagctcccctgatcccattcttgggttttggaacgaaccaacagatgggtcatcttgacttcttccccaatggaggagagagcatgccgggatgcaagaagaatgccctgtctcagatcgtggatctagatggcatctgggcgggaacccgggactttgtggcttgcaatcacctaagaagctacaagtattacttggaaagcatcctcaatcccgatgggtttgctgcatatccctgcacttcctacaagtcctttgagtctgacaagtgcttcccgtgtccagatcaaggatgcccacagatgggtcactatgctgataaatttgctggcaggacaagtgaagagcagcagaaattcttcttgaacacaggagaggctagcaatttcgctcgctggagatatggggtttccatcacactgtctggaagaacagccactggtcagatcaaagttgctttgtttggaaataagggaaacactcaccagtacagcatcttcagggggattctcaaaccaggctcaacccattcctatgagtttgatgcaaagctggatgttggaacaattgagaaagtcaagtttctttggaataacaatgtgataaatccaaccctccccaaagtgggtgccaccaagatcactgtgcaaaagggagaagagaagacagtgtacaacttctgtagcgaagacacagtgcgggaagacacgctgctcaccctcacgccctgctaagctcccggggcgacgaggctgctgcgttcacactaataaaatccactggtgcatctgtaaaaaatgg

SEQ ID NO: 733793 - DNA, 877 bp, Homo sapiens
tcctacacccctgccagcggcaccatggctttcctctggctcctctcctgcttctcccttgtgggggccgcctttggctgcggggtccccgccatccaccctgtgctcagcggcctgtccaggatcgtgaatggggaggacgccgtccccggctcctggccctggcaggtgtccctgcaggacaaaaccggcttccacttctgcgggggctccctcatcagcgaggactgggtggtcaccgctgcccactgcggggtcaggacctccgacgtggtcgtggctggggagtttgaccagggctctgacgaggagaacatccaggtcctgaagatcgccaaggtcttcaagaaccccaagttcagcattctgaccgtgaacaatgacatcaccctgctgaagctggccacacctgcccgcttctcccagacagtgtccgccgtgtgcctgcccagcgccgacgacgacttccccgcggggacactgtgtgccaccacaggctggggcaagaccaagtacaacgccaacaagacccctgacaagctgcagcaggcagccctgcccctcctgtccaatgccgaatgcaagaagtcctggggcaggaggatcaccgacgtgatgatctgtgccggggccagtggcgtctcctcctgcatgggtgactctggaggccccctggtctgccagaaggacggagcctggaccctggtgggcattgtgtcctggggcagccgcacctgctctaccaccacgcccgctgtgtacgcccgtgtcaccaagctcataccctgggtgcagaagatcctggccgccaactgagcccgcagctcctgccacccctgccttaagatttcccattaaatgcatctgtttagaaaaa

SEQ ID NO: 733794 - DNA, 743 bp, Homo sapiens
tcctacacccctgccagcggcaccatggctttcctctggctcctctcctgcttctcccttgtgggggccgcctttggctgcggggtccccgccatccaccctgtgctcagcggcctgtccaggatcgtgaatggggaggacgccgtccccggctcctggccctggcaggtgtccctgcaggacaaaaccggcttccacttctgcgggggctccctcatcagcgaggactgggtggtcaccgctgcccactgcggggtcaggacctccgacgtggtcgtggctggggagtttgaccagggctctgacgaggagaacatccaggtcctgaagatcgccaaggtcttcaagaaccccaagttcagcattctgaccgtgaacaatgacatcaccctgctgaagctggccacacctgcccgcttctcccagacagtgtccgccgtgtgcctgcccagcgccgacgacgacttccccgcggggacactgtgtgccaccacaggctggggcaagaccaagtacaacgggtgactctggaggccccctggtctgccagaaggacggagcctggaccctggtgggcattgtgtcctggggcagccgcacctgctctaccaccacgcccgctgtgtacgcccgtgtcaccaagctcataccctgggtgcagaagatcctggccgccaactgagcccgcagctcctgccacccctgccttaagatttcccattaaatgcatctgtttagaaaaa

SEQ ID NO: 733795 - DNA, 904 bp, Homo sapiens
  misc_feature (1)..(1): n is a, c, g, or t
ngtcctatcatcacaaaactcatgatgctccggctgctcagttccctcctccttgtggccgttgcctcaggctatggcccaccttcctctcactcttccagccgcgttgtccatggtgaggatgcggtcccctacagctggccctggcaggtttccctgcagtatgagaaaagtggaagcttctaccacacgtgtggcggtagcctcatcgcccccgattgggttgtgactgccggccactgcatctcgagggatctgacctaccaggtggtgttgggtgagtacaaccttgctgtgaaggagggccccgagcaggtgatccccatcaactctgaggagctgtttgtgcatccactctggaaccgctcgtgtgtggcctgtggcaatgacatcgccctcatcaagctctcacgcagcgcccagctgggagatgccgtccagctcgcctcactccctcccgctggtgacatccttcccaacaagacaccctgctacatcaccggctggggccgtctctataccaatgggccactcccagacaagctgcagcaggcccggctgcccgtggtggactataagcactgctccaggtggaactggtggggttccaccgtgaagaaaaccatggtgtgtgctggagggtacatccgctccggctgcaacggtgactctggaggacccctcaactgccccacagaggatggtggctggcaggtccacggtgtgaccagctttgtttctggctttggctgcaacttcatctggaagcccacggtgttcactcgagtctccgccttcatcgactggattgaggagaccatagcaagccactagaaccaaggcccagctggcagtgctgatcgatcccacatcctgaataaagaataaagatctctcagaaaat

SEQ ID NO: 733796 - DNA, 335 bp, Homo sapiens
  misc_feature (1)..(1): n is a, c, g, or t
ngtcctatcatcacaaaactcatgatgctccggctgctcagttccctcctccttgtggccgttgcctcaggctatggcccaccttcctcccacagaggatggtggctggcaggtccacggtgtgaccagctttgtttctggctttggctgcaacttcatctggaagcccacggtgttcactcgagtctccgccttcatcgactggattgaggagaccatagcaagccactagaaccaaggcccagctggcagtgctgatcgatcccacatcctgaataaagaataaagatctctcagaaaattcaaaaaaaaaaaaaaaaaaaaaaaaaaaaaac

SEQ ID NO: 733797 - DNA, 937 bp, Homo sapiens
  misc_feature (1)..(1): n is a, c, g, or t
ngtcctatcatcacaaaactcatgatgctccggctgctcagttccctcctccttgtggccgttgcctcaggctatggcccaccttcctctcactcttccagccgcgttgtccatggtgaggatgcggtcccctacagctggccctggcaggtttccctgcagtatgagaaaagtggaagcttctaccacacgtgtggcggtagcctcatcgcccccgattgggttgtgactgccggccactgcatctcgagggatctgacctaccaggtggtgttgggtgagtacaaccttgctgtgaaggagggccccgagcaggtgatccccatcaactctgaggagctgtttgtgcatccactctggaaccgctcgtgtgtggcctgtggcaatgacatcgccctcatcaagctctcacgcagcgcccagctgggagatgccgtccagctcgcctcactccctcccgctggtgacatccttcccaacaagacaccctgctacatcaccggctggggccgtctctataccaatgggccactcccagacaagctgcagcaggcccggctgcccgtggtggactataagcactgctccaggtggaactggtggggttccaccgtgaagaaaaccatggtgtgtgctggagggtacatccgctccggctgcaacggtgactctggaggacccctcaactgccccacagaggatggtggctggcaggtccacggtgtgaccagctttgtttctggctttggctgcaacttcatctggaagcccacggtgttcactcgagtctccgccttcatcgactggattgaggagaccatagcaagccactagaaccaaggcccagctggcagtgctgatcgatcccacatcctgaataaagaataaagatctctcagaaaattcaaaaaaaaaaaaaaaaaaaaaaaaaaaaaac

SEQ ID NO: 733798 - DNA, 985 bp, Homo sapiens
  misc_feature (1)..(1): n is a, c, g, or t
ngtcctatcatcacaaaactcatgatgctccggctgctcagttccctcctccttgtggccgttgcctcaggctatggcccaccttcctctcactcttccagccgcgttgtccatggtgaggatgcggtcccctacagctggccctggcaggtttccctgcagtatgagaaaagtggaagcttctaccacacgtgtggcggtagcctcatcgcccccgattgggttgtgactgccggccactgcatctcgagggatctgacctaccaggtggtgttgggtgagtacaaccttgctgtgaaggagggccccgagcaggtgatccccatcaactctgaggagctgtttgtgcatccactctggaaccgctcgtgtgtggcctgtggcaatgacatcgccctcatcaagctctcacgcagcgcccagctgggagatgccgtccagctcgcctcactccctcccgctggtgacatccttcccaacaagacaccctgctacatcaccggctggggccgtctctataccaatgggccactcccagacaagctgcagcaggcccggctgcccgtggtggactataagcactgctccaggtggaactggtggggttccaccgtgaagaaaaccatggtgtgtgctggagggtacatccgctccggctgcaacggtgactctggaggacccctcaactgccccacagaggatggtggctggcaggtccacggtgtgaccagctttgtttctggctttggctgcaacttcatctggaagcccacggtgttcactcgagtctccgccttcatcgactggattgaggagggaggatagagagacatgccagacaagaggctgcctggtgggggacagaccatagcaagccactagaaccaaggcccagctggcagtgctgatcgatcccacatcctgaataaagaataaagatctctcagaaaattcaaaaaaaaaaaaaaaaaaaaaaaaaaaaaac

SEQ ID NO: 733799 - DNA, 882 bp, Homo sapiens
  misc_feature (1)..(1): n is a, c, g, or t
ngtcctatcatcacaaaactcatgatgctccggctgctcagttccctcctccttgtggccgttgcctcaggctatggcccaccttcctctcactcttccagccgcgttgtccatggtgaggatgcggtcccctacagctggccctggcaggtttccctgcagtatgagaaaagtggaagcttctaccacacgtgtggcggtagcctcatcgcccccgattgggttgtgactgccggccactgcatctcgagggatctgacctaccaggtggtgttgggtgagtacaaccttgctgtgaaggagggccccgagcaggtgatccccatcaactctgaggagctgtttgtgcatccactctggaaccgctcgtgtgtggcctgtggcaatgacatcgccctcatcaagctctcacgcagcgcccagctgggagatgccgtccagctcgcctcactccctcccgctggtgacatccttcccaacaagacaagctgcagcaggcccggctgcccgtggtggactataagcactgctccaggtggaactggtggggttccaccgtgaagaaaaccatggtgtgtgctggagggtacatccgctccggctgcaacggtgactctggaggacccctcaactgccccacagaggatggtggctggcaggtccacggtgtgaccagctttgtttctggctttggctgcaacttcatctggaagcccacggtgttcactcgagtctccgccttcatcgactggattgaggagaccatagcaagccactagaaccaaggcccagctggcagtgctgatcgatcccacatcctgaataaagaataaagatctctcagaaaattcaaaaaaaaaaaaaaaaaaaaaaaaaaaaaac

SEQ ID NO: 733800 - DNA, 930 bp, Homo sapiens
  misc_feature (1)..(1): n is a, c, g, or t
ngtcctatcatcacaaaactcatgatgctccggctgctcagttccctcctccttgtggccgttgcctcaggctatggcccaccttcctctcactcttccagccgcgttgtccatggtgaggatgcggtcccctacagctggccctggcaggtttccctgcagtatgagaaaagtggaagcttctaccacacgtgtggcggtagcctcatcgcccccgattgggttgtgactgccggccactgcatctcgagggatctgacctaccaggtggtgttgggtgagtacaaccttgctgtgaaggagggccccgagcaggtgatccccatcaactctgaggagctgtttgtgcatccactctggaaccgctcgtgtgtggcctgtggcaatgacatcgccctcatcaagctctcacgcagcgcccagctgggagatgccgtccagctcgcctcactccctcccgctggtgacatccttcccaacaagacaagctgcagcaggcccggctgcccgtggtggactataagcactgctccaggtggaactggtggggttccaccgtgaagaaaaccatggtgtgtgctggagggtacatccgctccggctgcaacggtgactctggaggacccctcaactgccccacagaggatggtggctggcaggtccacggtgtgaccagctttgtttctggctttggctgcaacttcatctggaagcccacggtgttcactcgagtctccgccttcatcgactggattgaggagggaggatagagagacatgccagacaagaggctgcctggtgggggacagaccatagcaagccactagaaccaaggcccagctggcagtgctgatcgatcccacatcctgaataaagaataaagatctctcagaaaattcaaaaaaaaaaaaaaaaaaaaaaaaaaaaaac

SEQ ID NO: 733801 - DNA, 849 bp, Homo sapiens
  misc_feature (1)..(1): n is a, c, g, or t
ngtcctatcatcacaaaactcatgatgctccggctgctcagttccctcctccttgtggccgttgcctcaggctatggcccaccttcctctcactcttccagccgcgttgtccatggtgaggatgcggtcccctacagctggccctggcaggtttccctgcagtatgagaaaagtggaagcttctaccacacgtgtggcggtagcctcatcgcccccgattgggttgtgactgccggccactgcatctcgagggatctgacctaccaggtggtgttgggtgagtacaaccttgctgtgaaggagggccccgagcaggtgatccccatcaactctgaggagctgtttgtgcatccactctggaaccgctcgtgtgtggcctgtggcaatgacatcgccctcatcaagctctcacgcagcgcccagctgggagatgccgtccagctcgcctcactccctcccgctggtgacatccttcccaacaagacaagctgcagcaggcccggctgcccgtggtggactataagcactgctccaggtggaactggtggggttccaccgtgaagaaaaccatggtgtgtgctggagggtacatccgctccggctgcaacggtgactctggaggacccctcaactgccccacagaggatggtggctggcaggtccacggtgtgaccagctttgtttctggctttggctgcaacttcatctggaagcccacggtgttcactcgagtctccgccttcatcgactggattgaggagaccatagcaagccactagaaccaaggcccagctggcagtgctgatcgatcccacatcctgaataaagaataaagatctctcagaaaat

SEQ ID NO: 733802 - DNA, 657 bp, Homo sapiens
  misc_feature (1)..(1): n is a, c, g, or t
ngtcctatcatcacaaaactcatgatgctccggctgctcagttccctcctccttgtggccgttgcctcaggctatggcccaccttcctctcactcttccagccgcgttgtccatggtgaggatgcggtcccctacagctggccctggcaggtttccctgcagtatgagaaaagtggaagcttctaccacacgtgtggcggtagcctcatcgcccccgattgggttgtgactgccggccactgcatctcgagggatctgacctaccaggtggtgttgggtgagtacaaccttgctgtgaaggagggccccgagcaggtgatccccatcaactctgaggagctgtttgtgcatccactctggaaccgctcgtgtgtggcctgtggggtgactctggaggacccctcaactgccccacagaggatggtggctggcaggtccacggtgtgaccagctttgtttctggctttggctgcaacttcatctggaagcccacggtgttcactcgagtctccgccttcatcgactggattgaggagaccatagcaagccactagaaccaaggcccagctggcagtgctgatcgatcccacatcctgaataaagaataaagatctctcagaaaattcaaaaaaaaaaaaaaaaaaaaaaaaaaaaaac

SEQ ID NO: 733803 - DNA, 624 bp, Homo sapiens
  misc_feature (1)..(1): n is a, c, g, or t
ngtcctatcatcacaaaactcatgatgctccggctgctcagttccctcctccttgtggccgttgcctcaggctatggcccaccttcctctcactcttccagccgcgttgtccatggtgaggatgcggtcccctacagctggccctggcaggtttccctgcagtatgagaaaagtggaagcttctaccacacgtgtggcggtagcctcatcgcccccgattgggttgtgactgccggccactgcatctcgagggatctgacctaccaggtggtgttgggtgagtacaaccttgctgtgaaggagggccccgagcaggtgatccccatcaactctgaggagctgtttgtgcatccactctggaaccgctcgtgtgtggcctgtggggtgactctggaggacccctcaactgccccacagaggatggtggctggcaggtccacggtgtgaccagctttgtttctggctttggctgcaacttcatctggaagcccacggtgttcactcgagtctccgccttcatcgactggattgaggagaccatagcaagccactagaaccaaggcccagctggcagtgctgatcgatcccacatcctgaataaagaataaagatctctcagaaaat

SEQ ID NO: 733804 - DNA, 2727 bp, Homo sapiens
cctcagtcgctgggccagcctgcccggccccagcatgcgggaggcagccttcatgtacagcacagcagtggccatcttcctggtcatcctggtggccgcactgcagggctcggctccccgtgagagccccctcccctatcacatccccctggacccggaggggtccctggagctctcatggaatgtcagctacacccaggaggccatccatttccagctcctggtgcggaggctcaaggctggcgtcctgtttgggatgtccgaccgtggcgagcttgagaacgcagatctcgtggtgctctggaccgatggggacactgcctattttgcggacgcctggagtgaccagaaggggcagatccacctggatccccagcaggactaccagctgctgcaggtgcagaggaccccagaaggcctgaccctgcttttcaagaggccctttggcacctgcgaccccaaggattacctcattgaggacggcactgtccacttggtctacgggatcctggaggagccgttccggtcactggaggccatcaacggctcgggcctgcagatggggctgcagagggtgcagctcctgaagcccaatatccccgaaccggagttgccctcagacgcgtgcaccatggaggtccaagctcccaatatccagatccccagccaggagaccacgtactggtgctacattaaggagcttccaaagggcttctctcggcaccacattatcaagtacgagcccatcgtcaccaagggcaatgaggcccttgtccaccacatggaagtcttccagtgcgcccccgagatggacagcgtcccccacttcagcgggccctgcgactccaagatgaaacccgaccgcctcaactactgccgccacgtgctggccgcctgggccctgggtgccaaggcattttactacccagaggaagccggccttgccttcgggggtccagggtcctccagatatctccgcctggaagttcactaccacaacccactggtgatagaaggacgaaacgactcctcaggcatccgcttgtactacacagccaagctgcggcgcttcaacgcggggatcatggagctgggactggtgtacacgccagtgatggccattccaccacgggagaccgccttcatcctcactggctactgcacggacaagtgcacccagctggcactgcctccctccgggatccacatcttcgcctctcagctccacacacacctgactgggagaaaggtggtcacagtgctggtccgggacggccgggagtgggagatcgtgaaccaggacaatcactacagccctcacttccaggagatccgcatgttgaagaaggtcgtgtcggtccatccgggagatgtgctcatcacctcctgcacgtacaacacggaagaccgggagctggccacagtggggggcttcgggatcctggaggagatgtgtgtcaactacgtgcactactacccccagacgcagctggagctctgcaagagcgctgtggacgccggcttcctgcagaagtacttccacctcatcaacaggttcaacaacgaggatgtctgcacctgccctcaggcgtccgtgtctcagcagttcacctctgttccctggaactccttcaaccgcgacgtactgaaggccctgtacagcttcgcgcccatctccatgcactgcaacaagtcctcagccgtccgcttccagggtgaatggaacctgcagcccctgcccaaggtcatctccacactggaagagcccaccccacagtgccccaccagccagggccgaagccctgctggccccaccgttgtcagcattggtgggggcaaaggctgaggggggacctactcctccccctcctccatgctgtccctgtgggctcacaccggcactgtgcactctactctgcgacgatccccatggaacagccctgcacgcccaggatgaaggggccagaccacgcccctgcctgagaccacggtccaatccagccttcttcccccagggtcccctgcatggctgagagggtgtgggtgccctgttgacctaccctggaccgagtggaccacgacctcgtccatttaaacccggctgactcagtgcagggacagcctgcacagtggtccagggtccagccctccgccagccctgttccgcctcactgggtgtggcctggcttctgggacaggcaccatgctgggccggggtgtggaatcaccgggaacgcccccgcccccgccccgctgctcccggtgtgcagcgggtgcgggtgccgcttaaacatttccctgctgagtggctcgtgtttcacagtgggcggcttccctgcgacggaggcaggaccaggcatttagctagttagagactcgcctgggaaattgctccattcctgagtaaacagatattttcgcccacctaaagggaagccctgacaacaactatcaccaaaagacgaggcggcaaagatccagcggggcttctgggcgccggttccacgtggggtggaattattagcaccagcttgcttctctgccggtggggccagcgctgaacagaccggggtggagtcagggctgtgctttccgcgtggttctgccacttagggagtgtgccttgggcgggccatttcacattcctgaccctcacttttctcatctgtaaaaccaggctgatgccgtgcgggctaatgagccaataaagctcacacttgggctggc

SEQ ID NO: 733805 - DNA, 2427 bp, Homo sapiens
cctcagtcgctgggccagcctgcccggccccagcatgcgggaggcagccttcatgtacagcacagcagtggccatcttcctggtcatcctggtggccgcactgcagggctcggctccccgtgagagccccctcccctatcacatccccctggacccggaggggtccctggagctctcatggaatgtcagctacacccaggaggccatccatttccagctcctggtgcggaggctcaaggctggcgtcctgtttgggatgtccgaccgtggcgagcttgagaacgcagatctcgtggtgctctggaccgatggggacactgcctattttgcggacgcctggagtgaccagaaggggcagatccacctggatccccagcaggactaccagctgctgcaggtgcagaggaccccagaaggcctgaccctgcttttcaagaggccctttggcacctgcgaccccaaggattacctcattgaggacggcactgtccacttggtctacgggatcctggaggagccgttccggtcactggaggccatcaacggctcgggcctgcagatggggctgcagagggtgcagctcctgaagcccaatatccccgaaccggagttgccctcagacgcgtgcaccatggaggtccaagctcccaatatccagatccccagccaggagaccacgtactggtgctacattaaggagcttccaaagggcttctctcggcaccacattatcaagtacgagcccatcgtcaccaagggcaatgaggcccttgtccaccacatggaagtcttccagtgcgcccccgagatggacagcgtcccccacttcagcgggccctgcgactccaagatgaaacccgaccgcctcaactactgccgccacgtgctggccgcctgggccctgggtgccaaggcattttactacccagaggaagccggccttgccttcgggggtccagggtcctccagatatctccgcctggaagttcactaccacaacccactggtgatagaaggacgaaacgactcctcaggcatccgcttgtactacacagccaagctgcggcgcttcaacgcggggatcatggagctgggactggtgtacacgccagtgatggccattccaccacgggagaccgccttcatcctcactggctactgcacggacaagtgcacccagctggcactgcctccctccgggatccacatcttcgcctctcagctccacacacacctgactgggagaaaggtggtcacagtgctggtccgggacggccgggagtgggagatcgtgaaccaggacaatcactacagccctcacttccaggagatccgcatgttgaagaaggtcgtgtcggtccatccgggagatgtgctcatcacctcctgcacgtacaacacggaagaccgggagctggccacagtggggggcttcgggatcctggaggagatgtgtgtcaactacgtgcactactacccccagacgcagctggagctctgcaagagcgctgtggacgccggcttcctgcagaagtacttccacctcatcaacaggttcaacaacgaggatgtctgcacctgccctcaggcgtccgtgtctcagcagttcacctctgttccctggaactccttcaaccgcgacgtactgaaggccctgtacagcttcgcgcccatctccatgcactgcaacaagtcctcagccgtccgcttccagggtgaatggaacctgcagcccctgcccaaggtcatctccacactggaagagcccaccccacagtgccccaccagccagggccgaagccctgctggccccaccgttgtcagcattggtgggggcaaaggctgaggggggacctactcctccccctcctccatgctgtccctgtgggctcacaccggcactgtgcactctactctgcgacgatccccatggaacagccctgcacgcccaggatgaaggggccagaccacgcccctgcctgagaccacggtccaatccagccttcttcccccagggtcccctgcatggctgagagggtgtgggtgccctgttgacctaccctggaccgagtggaccacgacctcgtccatttaaacccggctgactcagtgcagggacagcctgcacagtggtccagggtccagccctccgccagccctgttccgcctcactgggtgtggcctggcttctgggacaggcaccatgctgggccggggtgtggaatcaccgggaacgcccccgcccccgccccgctgctcccggtgtgcagcgggtgcgggtgccgcttaaacatttccctgctgagtggctcgtgtttcacagtgggcggcttccctgcgacggaggcaggaccaggcatttagctagttagagactcgcctgggaaattgctccattcctgagtaaacagatattttcgcccacct

SEQ ID NO: 733806 - DNA, 2857 bp, Homo sapiens
cctcagtcgctgggccagcctgcccggccccagcatgcgggaggcagccttcatgtacagcacagcagtggccatcttcctggtcatcctggtggccgcactgcagggctcggctccccgtgagagccccctcccctatcacatccccctggacccggaggggtccctggagctctcatggaatgtcagctacacccaggaggccatccatttccagctcctggtgcggaggctcaaggctggcgtcctgtttgggatgtccgaccgtggcgagcttgagaacgcagatctcgtggtgctctggaccgatggggacactgcctattttgcggacgcctggagtgaccagaaggggcagatccacctggatccccagcaggactaccagctgctgcaggtgcagaggaccccagaaggcctgaccctgcttttcaagaggccctttggcacctgcgaccccaaggattacctcattgaggacggcactgtccacttggtctacgggatcctggaggagccgttccggtcactggaggccatcaacggctcgggcctgcagatggggctgcagagggtgcagctcctgaagcccaatatccccgaaccggagttgccctcagacgcgtgcaccatggaggtccaagctcccaatatccagatccccagccaggagaccacgtactggtgctacattaaggagcttccaaagggcttctctcggcaccacattatcaagtacgagcccatcgtcaccaagggcaatgaggcccttgtccaccacatggaagtcttccagtgcgcccccgagatggacagcgtcccccacttcagcgggccctgcgactccaagatgaaacccgaccgcctcaactactgccgccacgtgctggccgcctgggccctgggtgccaaggcattttactacccagaggaagccggccttgccttcgggggtccagggtcctccagatatctccgcctggaagttcactaccacaacccactggtgatagaaggacgaaacgactcctcaggcatccgcttgtactacacagccaagctgcggcgcttcaacgcggggatcatggagctgggactggtgtacacgccagtgatggccattccaccacgggagaccgccttcatcctcactggctactgcacggacaagtgcacccagctggcactgcctccctccgggatccacatcttcgcctctcagctccacacacacctgactgggagaaaggtggtcacagtgctggtccgggacggccgggagtgggagatcgtgaaccaggacaatcactacagccctcacttccaggagatccgcatgttgaagaaggtcgtgtcggtccatccgggagatgtgctcatcacctcctgcacgtacaacacggaagaccgggagctggccacagtggggggcttcgggatcctggaggagatgtgtgtcaactacgtgcactactacccccagacgcagctggagctctgcaagagcgctgtggacgccggcttcctgcagaagtacttccacctcatcaacaggttcaacaacgaggatgtctgcacctgccctcaggcgtccgtgtctcagcagttcacctctgttccctggaactccttcaaccgcgacgtactgaaggccctgtacagcttcgcgcccatctccatgcactgcaacaagtcctcagccgtccgcttccagggtgaatggaacctgcagcccctgcccaaggtcatctccacactggaagagcccaccccacagtgccccaccagccagggccgaagccctgctggccccaccgttgtcagcattggtgggggcaaaggctgaggggggacctactcctccccctcctccatgctgtccctgtgggctcacaccggcactgtgcactctactctgcgacgatccccatggaacagccctgcacgcccaggatgaaggggccagaccacgcccctgcctgagaccacggtccaatccagccttcttcccccagggtcccctgcatggctgagagggtgtgggtgccctgttgacctaccctggaccgagtggaccacgacctcgtccatttaaacccggctgactcagtgcagggacagcctgcacagtggtccagggtccagccctccgccagccctgttccgcctcactgggtgtggcctggcttctgggacaggcaccatgctgggccggggtgtggaatcaccgggaacgcccccgcccccgccccgctgctcccggtgtgcagcgggtgcgggtgccgcttaaacatttccctgctgagtggctcgtgtttcacagtgggcggcttccctgcgacggaggcaggaccaggcatttagctagttagagactcgcctgggaaattgctccattcctgagtaaacagatattttcgcccacctaaagggaagccctgacaacaactatcaccaaaagacgaggcggcaaagatccagcggggcttctgggcgccggttccacgtggggtggaattattagcaccagcttgcttctctgccggtggggccagcgctgaacagaccggggtggagtcagggctgtgctttccgcgtggttctgccacttagggagtgtgccttgggcgggccatttcacattcctgaccctcacttttctcatctgtaaaaccaggctgatgccgtgcgggctaatgagccaataaagctcacacttgggctggcacccactggaggtgggtatgtttgcactccgggccgtcgctccaggagagagaagcttgctcctgagcctcctccctgtgccaggcgtggtaccaagtgcttccccctgagcgtcctgaagctgcctcag

SEQ ID NO: 733807 - DNA, 2914 bp, Homo sapiens
cctcagtcgctgggccagcctgcccggccccagcatgcgggaggcagccttcatgtacagcacagcagtggccatcttcctggtcatcctggtggccgcactgcagggctcggctccccgtgagagccccctcccctatcacatccccctggacccggaggggtccctggagctctcatggaatgtcagctacacccaggaggccatccatttccagctcctggtgcggaggctcaaggctggcgtcctgtttgggatgtccgaccgtggcgagcttgagaacgcagatctcgtggtgctctggaccgatggggacactgcctattttgcggacgcctggagtgaccagaaggggcagatccacctggatccccagcaggactaccagctgctgcaggtgcagaggaccccagaaggcctgaccctgcttttcaagaggccctttggcacctgcgaccccaaggattacctcattgaggacggcactgtccacttggtctacgggatcctggaggagccgttccggtcactggaggccatcaacggctcgggcctgcagatggggctgcagagggtgcagctcctgaagcccaatatccccgaaccggagttgccctcagacgcgtgcaccatggaggtccaagctcccaatatccagatccccagccaggagaccacgtactggtgctacattaaggagcttccaaagggcttctctcggcaccacattatcaagtacgagcccatcgtcaccaagggcaatgaggcccttgtccaccacatggaagtcttccagtgcgcccccgagatggacagcgtcccccacttcagcgggccctgcgactccaagatgaaacccgaccgcctcaactactgccgccacgtgctggccgcctgggccctgggtgccaaggcattttactacccagaggaagccggccttgccttcgggggtccagggtcctccagatatctccgcctggaagttcactaccacaacccactggtgatagaaggacgaaacgactcctcaggcatccgcttgtactacacagccaagctgcggcgcttcaacgcggggatcatggagctgggactggtgtacacgccagtgatggccattccaccacgggagaccgccttcatcctcactggctactgcacggacaagtgcacccagctggcactgcctccctccgggatccacatcttcgcctctcagctccacacacacctgactgggagaaaggtggtcacagtgctggtccgggacggccgggagtgggagatcgtgaaccaggacaatcactacagccctcacttccaggagatccgcatgttgaagaaggtcgtgtcggtccatccgggagatgtgctcatcacctcctgcacgtacaacacggaagaccgggagctggccacagtggggggcttcgggatcctggaggagatgtgtgtcaactacgtgcactactacccccagacgcagctggagctctgcaagagcgctgtggacgccggcttcctgcagaagtacttccacctcatcaacagagcctcctcaacccagcctgcagcagccattacccacccgccaaggtgacaggagaggttcaacaacgaggatgtctgcacctgccctcaggcgtccgtgtctcagcagttcacctctgttccctggaactccttcaaccgcgacgtactgaaggccctgtacagcttcgcgcccatctccatgcactgcaacaagtcctcagccgtccgcttccagggtgaatggaacctgcagcccctgcccaaggtcatctccacactggaagagcccaccccacagtgccccaccagccagggccgaagccctgctggccccaccgttgtcagcattggtgggggcaaaggctgaggggggacctactcctccccctcctccatgctgtccctgtgggctcacaccggcactgtgcactctactctgcgacgatccccatggaacagccctgcacgcccaggatgaaggggccagaccacgcccctgcctgagaccacggtccaatccagccttcttcccccagggtcccctgcatggctgagagggtgtgggtgccctgttgacctaccctggaccgagtggaccacgacctcgtccatttaaacccggctgactcagtgcagggacagcctgcacagtggtccagggtccagccctccgccagccctgttccgcctcactgggtgtggcctggcttctgggacaggcaccatgctgggccggggtgtggaatcaccgggaacgcccccgcccccgccccgctgctcccggtgtgcagcgggtgcgggtgccgcttaaacatttccctgctgagtggctcgtgtttcacagtgggcggcttccctgcgacggaggcaggaccaggcatttagctagttagagactcgcctgggaaattgctccattcctgagtaaacagatattttcgcccacctaaagggaagccctgacaacaactatcaccaaaagacgaggcggcaaagatccagcggggcttctgggcgccggttccacgtggggtggaattattagcaccagcttgcttctctgccggtggggccagcgctgaacagaccggggtggagtcagggctgtgctttccgcgtggttctgccacttagggagtgtgccttgggcgggccatttcacattcctgaccctcacttttctcatctgtaaaaccaggctgatgccgtgcgggctaatgagccaataaagctcacacttgggctggcacccactggaggtgggtatgtttgcactccgggccgtcgctccaggagagagaagcttgctcctgagcctcctccctgtgccaggcgtggtaccaagtgcttccccctgagcgtcctgaagctgcctcag

SEQ ID NO: 733808 - DNA, 2784 bp, Homo sapiens
cctcagtcgctgggccagcctgcccggccccagcatgcgggaggcagccttcatgtacagcacagcagtggccatcttcctggtcatcctggtggccgcactgcagggctcggctccccgtgagagccccctcccctatcacatccccctggacccggaggggtccctggagctctcatggaatgtcagctacacccaggaggccatccatttccagctcctggtgcggaggctcaaggctggcgtcctgtttgggatgtccgaccgtggcgagcttgagaacgcagatctcgtggtgctctggaccgatggggacactgcctattttgcggacgcctggagtgaccagaaggggcagatccacctggatccccagcaggactaccagctgctgcaggtgcagaggaccccagaaggcctgaccctgcttttcaagaggccctttggcacctgcgaccccaaggattacctcattgaggacggcactgtccacttggtctacgggatcctggaggagccgttccggtcactggaggccatcaacggctcgggcctgcagatggggctgcagagggtgcagctcctgaagcccaatatccccgaaccggagttgccctcagacgcgtgcaccatggaggtccaagctcccaatatccagatccccagccaggagaccacgtactggtgctacattaaggagcttccaaagggcttctctcggcaccacattatcaagtacgagcccatcgtcaccaagggcaatgaggcccttgtccaccacatggaagtcttccagtgcgcccccgagatggacagcgtcccccacttcagcgggccctgcgactccaagatgaaacccgaccgcctcaactactgccgccacgtgctggccgcctgggccctgggtgccaaggcattttactacccagaggaagccggccttgccttcgggggtccagggtcctccagatatctccgcctggaagttcactaccacaacccactggtgatagaaggacgaaacgactcctcaggcatccgcttgtactacacagccaagctgcggcgcttcaacgcggggatcatggagctgggactggtgtacacgccagtgatggccattccaccacgggagaccgccttcatcctcactggctactgcacggacaagtgcacccagctggcactgcctccctccgggatccacatcttcgcctctcagctccacacacacctgactgggagaaaggtggtcacagtgctggtccgggacggccgggagtgggagatcgtgaaccaggacaatcactacagccctcacttccaggagatccgcatgttgaagaaggtcgtgtcggtccatccgggagatgtgctcatcacctcctgcacgtacaacacggaagaccgggagctggccacagtggggggcttcgggatcctggaggagatgtgtgtcaactacgtgcactactacccccagacgcagctggagctctgcaagagcgctgtggacgccggcttcctgcagaagtacttccacctcatcaacagagcctcctcaacccagcctgcagcagccattacccacccgccaaggtgacaggagaggttcaacaacgaggatgtctgcacctgccctcaggcgtccgtgtctcagcagttcacctctgttccctggaactccttcaaccgcgacgtactgaaggccctgtacagcttcgcgcccatctccatgcactgcaacaagtcctcagccgtccgcttccagggtgaatggaacctgcagcccctgcccaaggtcatctccacactggaagagcccaccccacagtgccccaccagccagggccgaagccctgctggccccaccgttgtcagcattggtgggggcaaaggctgaggggggacctactcctccccctcctccatgctgtccctgtgggctcacaccggcactgtgcactctactctgcgacgatccccatggaacagccctgcacgcccaggatgaaggggccagaccacgcccctgcctgagaccacggtccaatccagccttcttcccccagggtcccctgcatggctgagagggtgtgggtgccctgttgacctaccctggaccgagtggaccacgacctcgtccatttaaacccggctgactcagtgcagggacagcctgcacagtggtccagggtccagccctccgccagccctgttccgcctcactgggtgtggcctggcttctgggacaggcaccatgctgggccggggtgtggaatcaccgggaacgcccccgcccccgccccgctgctcccggtgtgcagcgggtgcgggtgccgcttaaacatttccctgctgagtggctcgtgtttcacagtgggcggcttccctgcgacggaggcaggaccaggcatttagctagttagagactcgcctgggaaattgctccattcctgagtaaacagatattttcgcccacctaaagggaagccctgacaacaactatcaccaaaagacgaggcggcaaagatccagcggggcttctgggcgccggttccacgtggggtggaattattagcaccagcttgcttctctgccggtggggccagcgctgaacagaccggggtggagtcagggctgtgctttccgcgtggttctgccacttagggagtgtgccttgggcgggccatttcacattcctgaccctcacttttctcatctgtaaaaccaggctgatgccgtgcgggctaatgagccaataaagctcacacttgggctggc

SEQ ID NO: 733809 - DNA, 2484 bp, Homo sapiens
cctcagtcgctgggccagcctgcccggccccagcatgcgggaggcagccttcatgtacagcacagcagtggccatcttcctggtcatcctggtggccgcactgcagggctcggctccccgtgagagccccctcccctatcacatccccctggacccggaggggtccctggagctctcatggaatgtcagctacacccaggaggccatccatttccagctcctggtgcggaggctcaaggctggcgtcctgtttgggatgtccgaccgtggcgagcttgagaacgcagatctcgtggtgctctggaccgatggggacactgcctattttgcggacgcctggagtgaccagaaggggcagatccacctggatccccagcaggactaccagctgctgcaggtgcagaggaccccagaaggcctgaccctgcttttcaagaggccctttggcacctgcgaccccaaggattacctcattgaggacggcactgtccacttggtctacgggatcctggaggagccgttccggtcactggaggccatcaacggctcgggcctgcagatggggctgcagagggtgcagctcctgaagcccaatatccccgaaccggagttgccctcagacgcgtgcaccatggaggtccaagctcccaatatccagatccccagccaggagaccacgtactggtgctacattaaggagcttccaaagggcttctctcggcaccacattatcaagtacgagcccatcgtcaccaagggcaatgaggcccttgtccaccacatggaagtcttccagtgcgcccccgagatggacagcgtcccccacttcagcgggccctgcgactccaagatgaaacccgaccgcctcaactactgccgccacgtgctggccgcctgggccctgggtgccaaggcattttactacccagaggaagccggccttgccttcgggggtccagggtcctccagatatctccgcctggaagttcactaccacaacccactggtgatagaaggacgaaacgactcctcaggcatccgcttgtactacacagccaagctgcggcgcttcaacgcggggatcatggagctgggactggtgtacacgccagtgatggccattccaccacgggagaccgccttcatcctcactggctactgcacggacaagtgcacccagctggcactgcctccctccgggatccacatcttcgcctctcagctccacacacacctgactgggagaaaggtggtcacagtgctggtccgggacggccgggagtgggagatcgtgaaccaggacaatcactacagccctcacttccaggagatccgcatgttgaagaaggtcgtgtcggtccatccgggagatgtgctcatcacctcctgcacgtacaacacggaagaccgggagctggccacagtggggggcttcgggatcctggaggagatgtgtgtcaactacgtgcactactacccccagacgcagctggagctctgcaagagcgctgtggacgccggcttcctgcagaagtacttccacctcatcaacagagcctcctcaacccagcctgcagcagccattacccacccgccaaggtgacaggagaggttcaacaacgaggatgtctgcacctgccctcaggcgtccgtgtctcagcagttcacctctgttccctggaactccttcaaccgcgacgtactgaaggccctgtacagcttcgcgcccatctccatgcactgcaacaagtcctcagccgtccgcttccagggtgaatggaacctgcagcccctgcccaaggtcatctccacactggaagagcccaccccacagtgccccaccagccagggccgaagccctgctggccccaccgttgtcagcattggtgggggcaaaggctgaggggggacctactcctccccctcctccatgctgtccctgtgggctcacaccggcactgtgcactctactctgcgacgatccccatggaacagccctgcacgcccaggatgaaggggccagaccacgcccctgcctgagaccacggtccaatccagccttcttcccccagggtcccctgcatggctgagagggtgtgggtgccctgttgacctaccctggaccgagtggaccacgacctcgtccatttaaacccggctgactcagtgcagggacagcctgcacagtggtccagggtccagccctccgccagccctgttccgcctcactgggtgtggcctggcttctgggacaggcaccatgctgggccggggtgtggaatcaccgggaacgcccccgcccccgccccgctgctcccggtgtgcagcgggtgcgggtgccgcttaaacatttccctgctgagtggctcgtgtttcacagtgggcggcttccctgcgacggaggcaggaccaggcatttagctagttagagactcgcctgggaaattgctccattcctgagtaaacagatattttcgcccacct

SEQ ID NO: 733810 - DNA, 2248 bp, Homo sapiens
cctcagtcgctgggccagcctgcccggccccagcatgcgggaggcagccttcatgtacagcacagcagtggccatcttcctggtcatcctggtggccgcactgcagggctcggctccccgtgagagccccctcccctatcacatccccctggacccggaggggtccctggagctctcatggaatgtcagctacacccaggaggccatccatttccagctcctggtgcggaggctcaaggctggcgtcctgtttgggatgtccgaccgtggcgagcttgagaacgcagatctcgtggtgctctggaccgatggggacactgcctattttgcggacgcctggagtgaccagaaggggcagatccacctggatccccagcaggactaccagctgctgcaggtgcagaggaccccagaaggcctgaccctgcttttcaagaggccctttggcacctgcgaccccaaggattacctcattgaggacggcactgtccacttggtctacgggatcctggaggagccgttccggtcactggaggccatcaacggctcgggcctgcagatggggctgcagagggtgcagctcctgaagcccaatatccccgaaccggagttgccctcagacgcgtgcaccatggaggtccaagctcccaatatccagatccccagccaggagaccacgtactggtgctacattaaggagcttccaaagggcttctctcggcaccacattatcaagtacgagcccatcgtcaccaagggcaatgaggcccttgtccaccacatggaagtcttccagtgcgcccccgagatggacagcgggggcttcgggatcctggaggagatgtgtgtcaactacgtgcactactacccccagacgcagctggagctctgcaagagcgctgtggacgccggcttcctgcagaagtacttccacctcatcaacaggttcaacaacgaggatgtctgcacctgccctcaggcgtccgtgtctcagcagttcacctctgttccctggaactccttcaaccgcgacgtactgaaggccctgtacagcttcgcgcccatctccatgcactgcaacaagtcctcagccgtccgcttccagggtgaatggaacctgcagcccctgcccaaggtcatctccacactggaagagcccaccccacagtgccccaccagccagggccgaagccctgctggccccaccgttgtcagcattggtgggggcaaaggctgaggggggacctactcctccccctcctccatgctgtccctgtgggctcacaccggcactgtgcactctactctgcgacgatccccatggaacagccctgcacgcccaggatgaaggggccagaccacgcccctgcctgagaccacggtccaatccagccttcttcccccagggtcccctgcatggctgagagggtgtgggtgccctgttgacctaccctggaccgagtggaccacgacctcgtccatttaaacccggctgactcagtgcagggacagcctgcacagtggtccagggtccagccctccgccagccctgttccgcctcactgggtgtggcctggcttctgggacaggcaccatgctgggccggggtgtggaatcaccgggaacgcccccgcccccgccccgctgctcccggtgtgcagcgggtgcgggtgccgcttaaacatttccctgctgagtggctcgtgtttcacagtgggcggcttccctgcgacggaggcaggaccaggcatttagctagttagagactcgcctgggaaattgctccattcctgagtaaacagatattttcgcccacctaaagggaagccctgacaacaactatcaccaaaagacgaggcggcaaagatccagcggggcttctgggcgccggttccacgtggggtggaattattagcaccagcttgcttctctgccggtggggccagcgctgaacagaccggggtggagtcagggctgtgctttccgcgtggttctgccacttagggagtgtgccttgggcgggccatttcacattcctgaccctcacttttctcatctgtaaaaccaggctgatgccgtgcgggctaatgagccaataaagctcacacttgggctggcacccactggaggtgggtatgtttgcactccgggccgtcgctccaggagagagaagcttgctcctgagcctcctccctgtgccaggcgtggtaccaagtgcttccccctgagcgtcctgaagctgcctcag

SEQ ID NO: 733811 - DNA, 2118 bp, Homo sapiens
cctcagtcgctgggccagcctgcccggccccagcatgcgggaggcagccttcatgtacagcacagcagtggccatcttcctggtcatcctggtggccgcactgcagggctcggctccccgtgagagccccctcccctatcacatccccctggacccggaggggtccctggagctctcatggaatgtcagctacacccaggaggccatccatttccagctcctggtgcggaggctcaaggctggcgtcctgtttgggatgtccgaccgtggcgagcttgagaacgcagatctcgtggtgctctggaccgatggggacactgcctattttgcggacgcctggagtgaccagaaggggcagatccacctggatccccagcaggactaccagctgctgcaggtgcagaggaccccagaaggcctgaccctgcttttcaagaggccctttggcacctgcgaccccaaggattacctcattgaggacggcactgtccacttggtctacgggatcctggaggagccgttccggtcactggaggccatcaacggctcgggcctgcagatggggctgcagagggtgcagctcctgaagcccaatatccccgaaccggagttgccctcagacgcgtgcaccatggaggtccaagctcccaatatccagatccccagccaggagaccacgtactggtgctacattaaggagcttccaaagggcttctctcggcaccacattatcaagtacgagcccatcgtcaccaagggcaatgaggcccttgtccaccacatggaagtcttccagtgcgcccccgagatggacagcgggggcttcgggatcctggaggagatgtgtgtcaactacgtgcactactacccccagacgcagctggagctctgcaagagcgctgtggacgccggcttcctgcagaagtacttccacctcatcaacaggttcaacaacgaggatgtctgcacctgccctcaggcgtccgtgtctcagcagttcacctctgttccctggaactccttcaaccgcgacgtactgaaggccctgtacagcttcgcgcccatctccatgcactgcaacaagtcctcagccgtccgcttccagggtgaatggaacctgcagcccctgcccaaggtcatctccacactggaagagcccaccccacagtgccccaccagccagggccgaagccctgctggccccaccgttgtcagcattggtgggggcaaaggctgaggggggacctactcctccccctcctccatgctgtccctgtgggctcacaccggcactgtgcactctactctgcgacgatccccatggaacagccctgcacgcccaggatgaaggggccagaccacgcccctgcctgagaccacggtccaatccagccttcttcccccagggtcccctgcatggctgagagggtgtgggtgccctgttgacctaccctggaccgagtggaccacgacctcgtccatttaaacccggctgactcagtgcagggacagcctgcacagtggtccagggtccagccctccgccagccctgttccgcctcactgggtgtggcctggcttctgggacaggcaccatgctgggccggggtgtggaatcaccgggaacgcccccgcccccgccccgctgctcccggtgtgcagcgggtgcgggtgccgcttaaacatttccctgctgagtggctcgtgtttcacagtgggcggcttccctgcgacggaggcaggaccaggcatttagctagttagagactcgcctgggaaattgctccattcctgagtaaacagatattttcgcccacctaaagggaagccctgacaacaactatcaccaaaagacgaggcggcaaagatccagcggggcttctgggcgccggttccacgtggggtggaattattagcaccagcttgcttctctgccggtggggccagcgctgaacagaccggggtggagtcagggctgtgctttccgcgtggttctgccacttagggagtgtgccttgggcgggccatttcacattcctgaccctcacttttctcatctgtaaaaccaggctgatgccgtgcgggctaatgagccaataaagctcacacttgggctggc

SEQ ID NO: 733812 - DNA, 1818 bp, Homo sapiens
cctcagtcgctgggccagcctgcccggccccagcatgcgggaggcagccttcatgtacagcacagcagtggccatcttcctggtcatcctggtggccgcactgcagggctcggctccccgtgagagccccctcccctatcacatccccctggacccggaggggtccctggagctctcatggaatgtcagctacacccaggaggccatccatttccagctcctggtgcggaggctcaaggctggcgtcctgtttgggatgtccgaccgtggcgagcttgagaacgcagatctcgtggtgctctggaccgatggggacactgcctattttgcggacgcctggagtgaccagaaggggcagatccacctggatccccagcaggactaccagctgctgcaggtgcagaggaccccagaaggcctgaccctgcttttcaagaggccctttggcacctgcgaccccaaggattacctcattgaggacggcactgtccacttggtctacgggatcctggaggagccgttccggtcactggaggccatcaacggctcgggcctgcagatggggctgcagagggtgcagctcctgaagcccaatatccccgaaccggagttgccctcagacgcgtgcaccatggaggtccaagctcccaatatccagatccccagccaggagaccacgtactggtgctacattaaggagcttccaaagggcttctctcggcaccacattatcaagtacgagcccatcgtcaccaagggcaatgaggcccttgtccaccacatggaagtcttccagtgcgcccccgagatggacagcgggggcttcgggatcctggaggagatgtgtgtcaactacgtgcactactacccccagacgcagctggagctctgcaagagcgctgtggacgccggcttcctgcagaagtacttccacctcatcaacaggttcaacaacgaggatgtctgcacctgccctcaggcgtccgtgtctcagcagttcacctctgttccctggaactccttcaaccgcgacgtactgaaggccctgtacagcttcgcgcccatctccatgcactgcaacaagtcctcagccgtccgcttccagggtgaatggaacctgcagcccctgcccaaggtcatctccacactggaagagcccaccccacagtgccccaccagccagggccgaagccctgctggccccaccgttgtcagcattggtgggggcaaaggctgaggggggacctactcctccccctcctccatgctgtccctgtgggctcacaccggcactgtgcactctactctgcgacgatccccatggaacagccctgcacgcccaggatgaaggggccagaccacgcccctgcctgagaccacggtccaatccagccttcttcccccagggtcccctgcatggctgagagggtgtgggtgccctgttgacctaccctggaccgagtggaccacgacctcgtccatttaaacccggctgactcagtgcagggacagcctgcacagtggtccagggtccagccctccgccagccctgttccgcctcactgggtgtggcctggcttctgggacaggcaccatgctgggccggggtgtggaatcaccgggaacgcccccgcccccgccccgctgctcccggtgtgcagcgggtgcgggtgccgcttaaacatttccctgctgagtggctcgtgtttcacagtgggcggcttccctgcgacggaggcaggaccaggcatttagctagttagagactcgcctgggaaattgctccattcctgagtaaacagatattttcgcccacct

SEQ ID NO: 733813 - DNA, 898 bp, Homo sapiens; identical to SEQ ID NO: 50527

SEQ ID NO: 733814 - DNA, 1027 bp, Homo sapiens; identical to SEQ ID NO: 50528

SEQ ID NO: 733815 - DNA, 1074 bp, Homo sapiens
gcagcctcaaaccccagctgttggggccaggacacccagtgagcccatacttgctctttttgtcttcttcagactgcgccatggggctcagcgacggggaatggcagttggtgctgaacgtctgggggaaggtggaggctgacatcccaggccatgggcaggaagtcctcatcaggctctttaagggtcacccagagactctggagaagtttgacaagttcaagcacctgaagtcagaggacgagatgaaggcgtctgaggacttaaagaagcatggtgccaccgtgctcaccgccctgggtggcatccttaagaagaaggggcatcatgaggcagagattaagcccctggcacagtcgcatgccaccaagcacaagatccccgtgaagtacctggagttcatctcggaatgcatcatccaggttctgcagagcaagcatcccggggactttggtgctgatgcccagggggccatgaacaaggccctggagctgttccggaaggacatggcctccaactacaaggagctgggcttccagggctaggcccctgccgctcccacccccacccatctgggccccgggttcaagagagagcggggtctgatctcgtgtagccatatagagtttgcttctgagtgtctgctttgtttagtagaggtgggcaggaggagctgaggggctggggctggggtgttgaagttggctttgcatgcccagcgatgcgcctccctgtgggatgtcatcaccctgggaaccgggagtggcccttggctcactgtgttctgcatggtttggatctgaattaattgtcctttcttctaaatcccaaccgaacttcttccaacctccaaactggctgtaaccccaaatccaagccattaactacacctgacagtagcaattgtctgattaatcactggccccttgaagacagcagaatgtccctttgcaatgaggaggagatctgggctgggcgggccagctggggaagcatttgactatctggaacttgtgtgtgcctcctcaggtatggcagtgactcacctggttttaataaaacaacctgcaacat

SEQ ID NO: 733816 - DNA, 1150 bp, Homo sapiens
caatggcacctgccctaaaatagcttcccatgtgagggctagagaaaggaaaagattagaccctccctggatgagagagagaaagtgaaggagggcaggggagggggacagcgagccattgagcgatctttgtcaagcatcccagaagactgcgccatggggctcagcgacggggaatggcagttggtgctgaacgtctgggggaaggtggaggctgacatcccaggccatgggcaggaagtcctcatcaggctctttaagggtcacccagagactctggagaagtttgacaagttcaagcacctgaagtcagaggacgagatgaaggcgtctgaggacttaaagaagcatggtgccaccgtgctcaccgccctgggtggcatccttaagaagaaggggcatcatgaggcagagattaagcccctggcacagtcgcatgccaccaagcacaagatccccgtgaagtacctggagttcatctcggaatgcatcatccaggttctgcagagcaagcatcccggggactttggtgctgatgcccagggggccatgaacaaggccctggagctgttccggaaggacatggcctccaactacaaggagctgggcttccagggctaggcccctgccgctcccacccccacccatctgggccccgggttcaagagagagcggggtctgatctcgtgtagccatatagagtttgcttctgagtgtctgctttgtttagtagaggtgggcaggaggagctgaggggctggggctggggtgttgaagttggctttgcatgcccagcgatgcgcctccctgtgggatgtcatcaccctgggaaccgggagtggcccttggctcactgtgttctgcatggtttggatctgaattaattgtcctttcttctaaatcccaaccgaacttcttccaacctccaaactggctgtaaccccaaatccaagccattaactacacctgacagtagcaattgtctgattaatcactggccccttgaagacagcagaatgtccctttgcaatgaggaggagatctgggctgggcgggccagctggggaagcatttgactatctggaacttgtgtgtgcctcctcaggtatggcagtgactcacctggttttaataaaacaacctgcaacat

SEQ ID NO: 733817 - DNA, 1034 bp, Homo sapiens
tgcgaggacagctggggagaaggggagctgtgactgcgccatggggctcagcgacggggaatggcagttggtgctgaacgtctgggggaaggtggaggctgacatcccaggccatgggcaggaagtcctcatcaggctctttaagggtcacccagagactctggagaagtttgacaagttcaagcacctgaagtcagaggacgagatgaaggcgtctgaggacttaaagaagcatggtgccaccgtgctcaccgccctgggtggcatccttaagaagaaggggcatcatgaggcagagattaagcccctggcacagtcgcatgccaccaagcacaagatccccgtgaagtacctggagttcatctcggaatgcatcatccaggttctgcagagcaagcatcccggggactttggtgctgatgcccagggggccatgaacaaggccctggagctgttccggaaggacatggcctccaactacaaggagctgggcttccagggctaggcccctgccgctcccacccccacccatctgggccccgggttcaagagagagcggggtctgatctcgtgtagccatatagagtttgcttctgagtgtctgctttgtttagtagaggtgggcaggaggagctgaggggctggggctggggtgttgaagttggctttgcatgcccagcgatgcgcctccctgtgggatgtcatcaccctgggaaccgggagtggcccttggctcactgtgttctgcatggtttggatctgaattaattgtcctttcttctaaatcccaaccgaacttcttccaacctccaaactggctgtaaccccaaatccaagccattaactacacctgacagtagcaattgtctgattaatcactggccccttgaagacagcagaatgtccctttgcaatgaggaggagatctgggctgggcgggccagctggggaagcatttgactatctggaacttgtgtgtgcctcctcaggtatggcagtgactcacctggttttaataaaacaacctgcaacat

SEQ ID NO: 733818 - DNA, 1092 bp, Homo sapiens
gcaagccaaaaccctgggcagactcaatccaaaaataaacaatcaaagagcatgttggcctggtcctttgctaggtactgtagagcaggtgagagagtgagggggaaggactccaaattagaccagttcttagccatgaagcagagactctgaagccagactacctgggtcccaatcttgggcttggtatttcctcgctgtgtgactctggactgcgccatggggctcagcgacggggaatggcagttggtgctgaacgtctgggggaaggtggaggctgacatcccaggccatgggcaggaagtcctcatcaggctctttaagggtcacccagagactctggagaagtttgacaagttcaagcacctgaagtcagaggacgagatgaaggcgtctgaggacttaaagaagcatggtgccaccgtgctcaccgccctgggtggcatccttaagaagaaggggcatcatgaggcagagattaagcccctggcacagtcgcatgccaccaagcacaagatccccgtgaagtacctggagttcatctcggaatgcatcatccaggttctgcagagcaagcatcccggggactttggtgctgatgcccagggggccatgaacaaggccctggagctgttccggaaggacatggcccccacccatctgggccccgggttcaagagagagcggggtctgatctcgtgtagccatatagagtttgcttctgagtgtctgctttgtttagtagaggtgggcaggaggagctgaggggctggggctggggtggcccttggctcactgtgttctgcatggtttggatctgaattaattgtcctttcttctaaatcccaaccgaacttcttccaacctccaaactggctgtaaccccaaatccaagccattaactacacctgacagtagcaattgtctgattaatcactggccccttgaagacagcagaatgtccctttgcaatgaggaggagatctgggctgggcgggccagctggggaagcatttgactatctggaacttgtgtgtgcctcctcaggtatggcagtgactcacctggttttaataaaacaacctgcaacat

SEQ ID NO: 733819 - DNA, 950 bp, Homo sapiens
  misc_feature (17)..(17): n is a, c, g, or t
ttggtgggcatctagangatccttcccgggtctgggtaggaagtcctcatcgctctttaagggtcacccagagactctggagaagtttgacaagttcaagcacctgaagtcagaggacgagatgaaggcgtctgaggacttaaagaagcatggtgccaccgtgctcaccgccctgggtggcatccttaagaagaaggggcatcatgaggcagagattaagcccctggcacagtcgcatgccaccaagcacaagatccccgtgaagtacctggagttcatctcggaatgcatcatccaggttctgcagagcaagcatcccggggactttggtgctgatgcccagggggccatgaacaaggccctggagctgttccggaaggacatggcctccaactacaaggagctgggcttccagggctaggcccctgccgctcccacccccacccatctgggccccgggttcaagagagagcggggtctgatctcgtgtagccatatagagtttgcttctgagtgtctgctttgtttagtagaggtgggcaggaggagctgaggggctggggctggggtgttgaagttggctttgcatgcccagcgatgcgcctccctgtgggatgtcatcaccctgggaaccgggagtggcccttggctcactgtgttctgcatggtttggatctgaattaattgtcctttcttctaaatcccaaccgaacttcttccaacctccaaactggctgtaaccccaaatccaagccattaactacacctgacagtagcaattgtctgattaatcactggccccttgaagacagcagaatgtccctttgcaatgaggaggagatctgggctgggcgggccagctggggaagcatttgactatctggaacttgtgtgtgcctcctcaggtatggcagtgactcacctggttttaataaaacaacctgcaacat

SEQ ID NO: 733820 - DNA, 829 bp, Homo sapiens
  misc_feature (17)..(17): n is a, c, g, or t
ttggtgggcatctagangatccttcccgggtctgggtaggaagtcctcatcgctctttaagggtcacccagagactctggagaagtttgacaagttcaagcacctgaagtcagaggacgagatgaaggcgtctgaggacttaaagaagcatggtgccaccgtgctcaccgccctgggtggcatccttaagaagaaggggcatcatgaggcagagattaagcccctggcacagtcgcatgccaccaagcacaagatccccgtgaagtacctggagttcatctcggaatgcatcatccaggttctgcagagcaagcatcccggggactttggtgctgatgcccagggggccatgaacaaggccctggagctgttccggaaggacatggcccccacccatctgggccccgggttcaagagagagcggggtctgatctcgtgtagccatatagagtttgcttctgagtgtctgctttgtttagtagaggtgggcaggaggagctgaggggctggggctggggtggcccttggctcactgtgttctgcatggtttggatctgaattaattgtcctttcttctaaatcccaaccgaacttcttccaacctccaaactggctgtaaccccaaatccaagccattaactacacctgacagtagcaattgtctgattaatcactggccccttgaagacagcagaatgtccctttgcaatgaggaggagatctgggctgggcgggccagctggggaagcatttgactatctggaacttgtgtgtgcctcctcaggtatggcagtgactcacctggttttaataaaacaacctgcaacat

SEQ ID NO: 733821 - DNA, 913 bp, Homo sapiens
tgcgaggacagctggggagaaggggagctgtgactgcgccatggggctcagcgacggggaatggcagttggtgctgaacgtctgggggaaggtggaggctgacatcccaggccatgggcaggaagtcctcatcaggctctttaagggtcacccagagactctggagaagtttgacaagttcaagcacctgaagtcagaggacgagatgaaggcgtctgaggacttaaagaagcatggtgccaccgtgctcaccgccctgggtggcatccttaagaagaaggggcatcatgaggcagagattaagcccctggcacagtcgcatgccaccaagcacaagatccccgtgaagtacctggagttcatctcggaatgcatcatccaggttctgcagagcaagcatcccggggactttggtgctgatgcccagggggccatgaacaaggccctggagctgttccggaaggacatggcccccacccatctgggccccgggttcaagagagagcggggtctgatctcgtgtagccatatagagtttgcttctgagtgtctgctttgtttagtagaggtgggcaggaggagctgaggggctggggctggggtggcccttggctcactgtgttctgcatggtttggatctgaattaattgtcctttcttctaaatcccaaccgaacttcttccaacctccaaactggctgtaaccccaaatccaagccattaactacacctgacagtagcaattgtctgattaatcactggccccttgaagacagcagaatgtccctttgcaatgaggaggagatctgggctgggcgggccagctggggaagcatttgactatctggaacttgtgtgtgcctcctcaggtatggcagtgactcacctggttttaataaaacaacctgcaacat

SEQ ID NO: 733822 - DNA, 953 bp, Homo sapiens
gcagcctcaaaccccagctgttggggccaggacacccagtgagcccatacttgctctttttgtcttcttcagactgcgccatggggctcagcgacggggaatggcagttggtgctgaacgtctgggggaaggtggaggctgacatcccaggccatgggcaggaagtcctcatcaggctctttaagggtcacccagagactctggagaagtttgacaagttcaagcacctgaagtcagaggacgagatgaaggcgtctgaggacttaaagaagcatggtgccaccgtgctcaccgccctgggtggcatccttaagaagaaggggcatcatgaggcagagattaagcccctggcacagtcgcatgccaccaagcacaagatccccgtgaagtacctggagttcatctcggaatgcatcatccaggttctgcagagcaagcatcccggggactttggtgctgatgcccagggggccatgaacaaggccctggagctgttccggaaggacatggcccccacccatctgggccccgggttcaagagagagcggggtctgatctcgtgtagccatatagagtttgcttctgagtgtctgctttgtttagtagaggtgggcaggaggagctgaggggctggggctggggtggcccttggctcactgtgttctgcatggtttggatctgaattaattgtcctttcttctaaatcccaaccgaacttcttccaacctccaaactggctgtaaccccaaatccaagccattaactacacctgacagtagcaattgtctgattaatcactggccccttgaagacagcagaatgtccctttgcaatgaggaggagatctgggctgggcgggccagctggggaagcatttgactatctggaacttgtgtgtgcctcctcaggtatggcagtgactcacctggttttaataaaacaacctgcaacat

SEQ ID NO: 733823 - DNA, 1029 bp, Homo sapiens
caatggcacctgccctaaaatagcttcccatgtgagggctagagaaaggaaaagattagaccctccctggatgagagagagaaagtgaaggagggcaggggagggggacagcgagccattgagcgatctttgtcaagcatcccagaagactgcgccatggggctcagcgacggggaatggcagttggtgctgaacgtctgggggaaggtggaggctgacatcccaggccatgggcaggaagtcctcatcaggctctttaagggtcacccagagactctggagaagtttgacaagttcaagcacctgaagtcagaggacgagatgaaggcgtctgaggacttaaagaagcatggtgccaccgtgctcaccgccctgggtggcatccttaagaagaaggggcatcatgaggcagagattaagcccctggcacagtcgcatgccaccaagcacaagatccccgtgaagtacctggagttcatctcggaatgcatcatccaggttctgcagagcaagcatcccggggactttggtgctgatgcccagggggccatgaacaaggccctggagctgttccggaaggacatggcccccacccatctgggccccgggttcaagagagagcggggtctgatctcgtgtagccatatagagtttgcttctgagtgtctgctttgtttagtagaggtgggcaggaggagctgaggggctggggctggggtggcccttggctcactgtgttctgcatggtttggatctgaattaattgtcctttcttctaaatcccaaccgaacttcttccaacctccaaactggctgtaaccccaaatccaagccattaactacacctgacagtagcaattgtctgattaatcactggccccttgaagacagcagaatgtccctttgcaatgaggaggagatctgggctgggcgggccagctggggaagcatttgactatctggaacttgtgtgtgcctcctcaggtatggcagtgactcacctggttttaataaaacaacctgcaacat

SEQ ID NO: 733824 - DNA, 893 bp, Homo sapiens
  misc_feature (17)..(17): n is a, c, g, or t
ttggtgggcatctagangatccttcccgggtctgggtaggaagtcctcatcgctctttaagggtcacccagagactctggagaagtttgacaagttcaagcacctgaagtcagaggacgagatgaaggcgtctgaggacttaaagaagcatggtgccaccgtgctcaccgccctgggtggcatccttaagaagaaggggcatcatgaggcagagattaagcccctggcacagtcgcatgccaccaagcacaagatccccgtgaagtacctggagttcatctcggaatgcatcatccaggttctgcagagcaagcatcccggggactttggtgctgatgcccagggggccatgaacaagggctaggcccctgccgctcccacccccacccatctgggccccgggttcaagagagagcggggtctgatctcgtgtagccatatagagtttgcttctgagtgtctgctttgtttagtagaggtgggcaggaggagctgaggggctggggctggggtgttgaagttggctttgcatgcccagcgatgcgcctccctgtgggatgtcatcaccctgggaaccgggagtggcccttggctcactgtgttctgcatggtttggatctgaattaattgtcctttcttctaaatcccaaccgaacttcttccaacctccaaactggctgtaaccccaaatccaagccattaactacacctgacagtagcaattgtctgattaatcactggccccttgaagacagcagaatgtccctttgcaatgaggaggagatctgggctgggcgggccagctggggaagcatttgactatctggaacttgtgtgtgcctcctcaggtatggcagtgactcacctggttttaataaaacaacctgcaacat

SEQ ID NO: 733825 - DNA, 977 bp, Homo sapiens
tgcgaggacagctggggagaaggggagctgtgactgcgccatggggctcagcgacggggaatggcagttggtgctgaacgtctgggggaaggtggaggctgacatcccaggccatgggcaggaagtcctcatcaggctctttaagggtcacccagagactctggagaagtttgacaagttcaagcacctgaagtcagaggacgagatgaaggcgtctgaggacttaaagaagcatggtgccaccgtgctcaccgccctgggtggcatccttaagaagaaggggcatcatgaggcagagattaagcccctggcacagtcgcatgccaccaagcacaagatccccgtgaagtacctggagttcatctcggaatgcatcatccaggttctgcagagcaagcatcccggggactttggtgctgatgcccagggggccatgaacaagggctaggcccctgccgctcccacccccacccatctgggccccgggttcaagagagagcggggtctgatctcgtgtagccatatagagtttgcttctgagtgtctgctttgtttagtagaggtgggcaggaggagctgaggggctggggctggggtgttgaagttggctttgcatgcccagcgatgcgcctccctgtgggatgtcatcaccctgggaaccgggagtggcccttggctcactgtgttctgcatggtttggatctgaattaattgtcctttcttctaaatcccaaccgaacttcttccaacctccaaactggctgtaaccccaaatccaagccattaactacacctgacagtagcaattgtctgattaatcactggccccttgaagacagcagaatgtccctttgcaatgaggaggagatctgggctgggcgggccagctggggaagcatttgactatctggaacttgtgtgtgcctcctcaggtatggcagtgactcacctggttttaataaaacaacctgcaacat

SEQ ID NO: 733826 - DNA, 1195 bp, Homo sapiens
ctctgagagcattgatgaggtcaggaagcctcctgttgggtagaggagcaactaagagactgaacttggcccccaccctgaggctcacaagcttgaattgcacctgagttccaaaggagaagttgacattcttccagaacatatgcccagtgtcttcaacttgagatggagctgggatgccaagtctgcaaatactgcgccatggggctcagcgacggggaatggcagttggtgctgaacgtctgggggaaggtggaggctgacatcccaggccatgggcaggaagtcctcatcaggctctttaagggtcacccagagactctggagaagtttgacaagttcaagcacctgaagtcagaggacgagatgaaggcgtctgaggacttaaagaagcatggtgccaccgtgctcaccgccctgggtggcatccttaagaagaaggggcatcatgaggcagagattaagcccctggcacagtcgcatgccaccaagcacaagatccccgtgaagtacctggagttcatctcggaatgcatcatccaggttctgcagagcaagcatcccggggactttggtgctgatgcccagggggccatgaacaaggccctggagctgttccggaaggacatggcctccaactacaaggagctgggcttccagggctaggcccctgccgctcccacccccacccatctgggccccgggttcaagagagagcggggtctgatctcgtgtagccatatagagtttgcttctgagtgtctgctttgtttagtagaggtgggcaggaggagctgaggggctggggctggggtgttgaagttggctttgcatgcccagcgatgcgcctccctgtgggatgtcatcaccctgggaaccgggagtggcccttggctcactgtgttctgcatggtttggatctgaattaattgtcctttcttctaaatcccaaccgaacttcttccaacctccaaactggctgtaaccccaaatccaagccattaactacacctgacagtagcaattgtctgattaatcactggccccttgaagacagcagaatgtccctttgcaatgaggaggagatctgggctgggcgggccagctggggaagcatttgactatctggaacttgtgtgtgcctcctcaggtatggcagtgactcacctggttttaataaaacaacctgcaacat

SEQ ID NO: 733827 - DNA, 1074 bp, Homo sapiens
ctctgagagcattgatgaggtcaggaagcctcctgttgggtagaggagcaactaagagactgaacttggcccccaccctgaggctcacaagcttgaattgcacctgagttccaaaggagaagttgacattcttccagaacatatgcccagtgtcttcaacttgagatggagctgggatgccaagtctgcaaatactgcgccatggggctcagcgacggggaatggcagttggtgctgaacgtctgggggaaggtggaggctgacatcccaggccatgggcaggaagtcctcatcaggctctttaagggtcacccagagactctggagaagtttgacaagttcaagcacctgaagtcagaggacgagatgaaggcgtctgaggacttaaagaagcatggtgccaccgtgctcaccgccctgggtggcatccttaagaagaaggggcatcatgaggcagagattaagcccctggcacagtcgcatgccaccaagcacaagatccccgtgaagtacctggagttcatctcggaatgcatcatccaggttctgcagagcaagcatcccggggactttggtgctgatgcccagggggccatgaacaaggccctggagctgttccggaaggacatggcccccacccatctgggccccgggttcaagagagagcggggtctgatctcgtgtagccatatagagtttgcttctgagtgtctgctttgtttagtagaggtgggcaggaggagctgaggggctggggctggggtggcccttggctcactgtgttctgcatggtttggatctgaattaattgtcctttcttctaaatcccaaccgaacttcttccaacctccaaactggctgtaaccccaaatccaagccattaactacacctgacagtagcaattgtctgattaatcactggccccttgaagacagcagaatgtccctttgcaatgaggaggagatctgggctgggcgggccagctggggaagcatttgactatctggaacttgtgtgtgcctcctcaggtatggcagtgactcacctggttttaataaaacaacctgcaacat

SEQ ID NO: 733828 - DNA, 1138 bp, Homo sapiens
ctctgagagcattgatgaggtcaggaagcctcctgttgggtagaggagcaactaagagactgaacttggcccccaccctgaggctcacaagcttgaattgcacctgagttccaaaggagaagttgacattcttccagaacatatgcccagtgtcttcaacttgagatggagctgggatgccaagtctgcaaatactgcgccatggggctcagcgacggggaatggcagttggtgctgaacgtctgggggaaggtggaggctgacatcccaggccatgggcaggaagtcctcatcaggctctttaagggtcacccagagactctggagaagtttgacaagttcaagcacctgaagtcagaggacgagatgaaggcgtctgaggacttaaagaagcatggtgccaccgtgctcaccgccctgggtggcatccttaagaagaaggggcatcatgaggcagagattaagcccctggcacagtcgcatgccaccaagcacaagatccccgtgaagtacctggagttcatctcggaatgcatcatccaggttctgcagagcaagcatcccggggactttggtgctgatgcccagggggccatgaacaagggctaggcccctgccgctcccacccccacccatctgggccccgggttcaagagagagcggggtctgatctcgtgtagccatatagagtttgcttctgagtgtctgctttgtttagtagaggtgggcaggaggagctgaggggctggggctggggtgttgaagttggctttgcatgcccagcgatgcgcctccctgtgggatgtcatcaccctgggaaccgggagtggcccttggctcactgtgttctgcatggtttggatctgaattaattgtcctttcttctaaatcccaaccgaacttcttccaacctccaaactggctgtaaccccaaatccaagccattaactacacctgacagtagcaattgtctgattaatcactggccccttgaagacagcagaatgtccctttgcaatgaggaggagatctgggctgggcgggccagctggggaagcatttgactatctggaacttgtgtgtgcctcctcaggtatggcagtgactcacctggttttaataaaacaacctgcaacat

SEQ ID NO: 733829 - DNA, 931 bp, Homo sapiens
tgcgaggacagctggggagaaggggagctgtggctctttaagggtcacccagagactctggagaagtttgacaagttcaagcacctgaagtcagaggacgagatgaaggcgtctgaggacttaaagaagcatggtgccaccgtgctcaccgccctgggtggcatccttaagaagaaggggcatcatgaggcagagattaagcccctggcacagtcgcatgccaccaagcacaagatccccgtgaagtacctggagttcatctcggaatgcatcatccaggttctgcagagcaagcatcccggggactttggtgctgatgcccagggggccatgaacaaggccctggagctgttccggaaggacatggcctccaactacaaggagctgggcttccagggctaggcccctgccgctcccacccccacccatctgggccccgggttcaagagagagcggggtctgatctcgtgtagccatatagagtttgcttctgagtgtctgctttgtttagtagaggtgggcaggaggagctgaggggctggggctggggtgttgaagttggctttgcatgcccagcgatgcgcctccctgtgggatgtcatcaccctgggaaccgggagtggcccttggctcactgtgttctgcatggtttggatctgaattaattgtcctttcttctaaatcccaaccgaacttcttccaacctccaaactggctgtaaccccaaatccaagccattaactacacctgacagtagcaattgtctgattaatcactggccccttgaagacagcagaatgtccctttgcaatgaggaggagatctgggctgggcgggccagctggggaagcatttgactatctggaacttgtgtgtgcctcctcaggtatggcagtgactcacctggttttaataaaacaacctgcaacat

SEQ ID NO: 733830 - DNA, 602 bp, Homo sapiens
gcagcctcaaaccccagctgttggggccaggacacccagtgagcccatacttgctctttttgtcttcttcagactgcgccatggggctcagcgacggggaatggcagttggtgctgaacgtctgggggaaggtggaggctgacatcccaggccatgggcaggaagtcctcatcaggctctttaagggtcacccagagactctggagaagtttgacaagttcaagcacctgaagtcagaggacgagatgaaggcgcctccctgtgggatgtcatcaccctgggaaccgggagtggcccttggctcactgtgttctgcatggtttggatctgaattaattgtcctttcttctaaatcccaaccgaacttcttccaacctccaaactggctgtaaccccaaatccaagccattaactacacctgacagtagcaattgtctgattaatcactggccccttgaagacagcagaatgtccctttgcaatgaggaggagatctgggctgggcgggccagctggggaagcatttgactatctggaacttgtgtgtgcctcctcaggtatggcagtgactcacctggttttaataaaacaacctgcaacat

SEQ ID NO: 733831 - DNA, 1017 bp, Homo sapiens
gcagcctcaaaccccagctgttggggccaggacacccagtgagcccatacttgctctttttgtcttcttcagactgcgccatggggctcagcgacggggaatggcagttggtgctgaacgtctgggggaaggtggaggctgacatcccaggccatgggcaggaagtcctcatcaggctctttaagggtcacccagagactctggagaagtttgacaagttcaagcacctgaagtcagaggacgagatgaaggcgtctgaggacttaaagaagcatggtgccaccgtgctcaccgccctgggtggcatccttaagaagaaggggcatcatgaggcagagattaagcccctggcacagtcgcatgccaccaagcacaagatccccgtgaagtacctggagttcatctcggaatgcatcatccaggttctgcagagcaagcatcccggggactttggtgctgatgcccagggggccatgaacaagggctaggcccctgccgctcccacccccacccatctgggccccgggttcaagagagagcggggtctgatctcgtgtagccatatagagtttgcttctgagtgtctgctttgtttagtagaggtgggcaggaggagctgaggggctggggctggggtgttgaagttggctttgcatgcccagcgatgcgcctccctgtgggatgtcatcaccctgggaaccgggagtggcccttggctcactgtgttctgcatggtttggatctgaattaattgtcctttcttctaaatcccaaccgaacttcttccaacctccaaactggctgtaaccccaaatccaagccattaactacacctgacagtagcaattgtctgattaatcactggccccttgaagacagcagaatgtccctttgcaatgaggaggagatctgggctgggcgggccagctggggaagcatttgactatctggaacttgtgtgtgcctcctcaggtatggcagtgactcacctggttttaataaaacaacctgcaacat

SEQ ID NO: 733832 - DNA, 678 bp, Homo sapiens
caatggcacctgccctaaaatagcttcccatgtgagggctagagaaaggaaaagattagaccctccctggatgagagagagaaagtgaaggagggcaggggagggggacagcgagccattgagcgatctttgtcaagcatcccagaagactgcgccatggggctcagcgacggggaatggcagttggtgctgaacgtctgggggaaggtggaggctgacatcccaggccatgggcaggaagtcctcatcaggctctttaagggtcacccagagactctggagaagtttgacaagttcaagcacctgaagtcagaggacgagatgaaggcgcctccctgtgggatgtcatcaccctgggaaccgggagtggcccttggctcactgtgttctgcatggtttggatctgaattaattgtcctttcttctaaatcccaaccgaacttcttccaacctccaaactggctgtaaccccaaatccaagccattaactacacctgacagtagcaattgtctgattaatcactggccccttgaagacagcagaatgtccctttgcaatgaggaggagatctgggctgggcgggccagctggggaagcatttgactatctggaacttgtgtgtgcctcctcaggtatggcagtgactcacctggttttaataaaacaacctgcaacat

SEQ ID NO: 733833 - DNA, 1093 bp, Homo sapiens
caatggcacctgccctaaaatagcttcccatgtgagggctagagaaaggaaaagattagaccctccctggatgagagagagaaagtgaaggagggcaggggagggggacagcgagccattgagcgatctttgtcaagcatcccagaagactgcgccatggggctcagcgacggggaatggcagttggtgctgaacgtctgggggaaggtggaggctgacatcccaggccatgggcaggaagtcctcatcaggctctttaagggtcacccagagactctggagaagtttgacaagttcaagcacctgaagtcagaggacgagatgaaggcgtctgaggacttaaagaagcatggtgccaccgtgctcaccgccctgggtggcatccttaagaagaaggggcatcatgaggcagagattaagcccctggcacagtcgcatgccaccaagcacaagatccccgtgaagtacctggagttcatctcggaatgcatcatccaggttctgcagagcaagcatcccggggactttggtgctgatgcccagggggccatgaacaagggctaggcccctgccgctcccacccccacccatctgggccccgggttcaagagagagcggggtctgatctcgtgtagccatatagagtttgcttctgagtgtctgctttgtttagtagaggtgggcaggaggagctgaggggctggggctggggtgttgaagttggctttgcatgcccagcgatgcgcctccctgtgggatgtcatcaccctgggaaccgggagtggcccttggctcactgtgttctgcatggtttggatctgaattaattgtcctttcttctaaatcccaaccgaacttcttccaacctccaaactggctgtaaccccaaatccaagccattaactacacctgacagtagcaattgtctgattaatcactggccccttgaagacagcagaatgtccctttgcaatgaggaggagatctgggctgggcgggccagctggggaagcatttgactatctggaacttgtgtgtgcctcctcaggtatggcagtgactcacctggttttaataaaacaacctgcaacat

SEQ ID NO: 733834 - DNA, 1162 bp, Homo sapiens
gcaagccaaaaccctgggcagactcaatccaaaaataaacaatcaaagagcatgttggcctggtcctttgctaggtactgtagagcaggtgagagagtgagggggaaggactccaaattagaccagttcttagccatgaagcagagactctgaagccagactacctgggtcccaatcttgggcttggtatttcctcgctgtgtgactctggactgcgccatggggctcagcgacggggaatggcagttggtgctgaacgtctgggggaaggtggaggctgacatcccaggccatgggcaggaagtcctcatcaggctctttaagggtcacccagagactctggagaagtttgacaagttcaagcacctgaagtcagaggacgagatgaaggcgtctgaggacttaaagaagcatggtgccaccgtgctcaccgccctgggtggcatccttaagaagaaggggcatcatgaggcagagattaagcccctggcacagtcgcatgccaccaagcacaagatccccgtgaagtacctggagttcatctcggaatgcatcatccaggttctgcagagcaagcatcccggggactttggtgctgatgcccagggggccatgaacaaggccctggagctgttccggaaggacatggcccccacccatctgggccccgggttcaagagagagcggggtctgatctcgtgtagccatatagagtttgcttctgagtgtctgctttgtttagtagaggtgggcaggaggagctgaggggctggggctggggtgttgaagttggctttgcatgcccagcgatgcgcctccctgtgggatgtcatcaccctgggaaccgggagtggcccttggctcactgtgttctgcatggtttggatctgaattaattgtcctttcttctaaatcccaaccgaacttcttccaacctccaaactggctgtaaccccaaatccaagccattaactacacctgacagtagcaattgtctgattaatcactggccccttgaagacagcagaatgtccctttgcaatgaggaggagatctgggctgggcgggccagctggggaagcatttgactatctggaacttgtgtgtgcctcctcaggtatggcagtgactcacctggttttaataaaacaacctgcaacat

SEQ ID NO: 733835 - DNA, 616 bp, Homo sapiens
tacggtcggagtcgcttttattgcagagagaatggccagcaggaaggcggggacccggggcaaggtggcagccaccaagcaggcccaacgtggttcttccaacgtcttttccatgtttgaacaagcccagatacaggagttcaaagaagccttcagctgtatcgaccagaatcgtgatggcatcatctgcaaggcagacctgagggagacctactcccagctggggaaggtgagtgtcccagaggaggagctggacgccatgctgcaagagggcaagggccccatcaacttcaccgtcttcctcacgctctttggggagaagctcaatgggacagaccccgaggaagccatcctgagtgccttccgcatgtttgaccccagcggcaaaggggtggtgaacaaggatgagttcaagcagcttctcctgacccaggcagacaagttctctccagctgaggtggagcagatgttcgccctgacacccatggacctggcggggaacatcgactacaagtcactgtgctacatcatcacccatggagacgagaaagaggaatgaggggcagggccaggcccacgggggggcacctcaataaactctgttgcaaaattggaa

SEQ ID NO: 733836 - DNA, 387 bp, Homo sapiens
cacacctctgcagagagaatggccagcaggaaggcggggacccggggcaaggtggcagccaccaagcaggcccaacgtggttcttccaacgtcttttccatgtttgaacaagcccagatacaggagttcaaagaagccttcagctgtatcgaccagaatcgtgatggcatcatctgcaaggcagacctgagggagacctactcccagctggggaaggtgagtgtcccagaggaggagctggacgccatgctgcaagagggcaagggccccatcaacttcaccgtcttcctcacgctctttggggagaagctcaatggacaacccaggagcatctagtccttcgatgtttacccagcgcaaggtgtacagatattagagtttctacag

SEQ ID NO: 733837 - DNA, 340 bp, Homo sapiens
cacacctctgcagagagaatggccagcaggaaggcggggacccggggcaaggtggcagccaccaagcaggcccaacgtggttcttccaacgtcttttccatgtttgaacaagcccagatacaggagttcaaagaagccttcagctgtatcgaccagaatcgtgatggcatcatctgcaaggcagacctgagggagacctactcccagctggggtgcgtgcaccaccttccaccctgcgcactggggtccctactctgagctgctgggcgggtgggagtcgcttgggggacaggactctgctcccctgcttcccctcctccccgtctcctcacactgccct

SEQ ID NO: 733838 - DNA, 603 bp, Homo sapiens
cacacctctgcagagagaatggccagcaggaaggcggggacccggggcaaggtggcagccaccaagcaggcccaacgtggttcttccaacgtcttttccatgtttgaacaagcccagatacaggagttcaaagaagccttcagctgtatcgaccagaatcgtgatggcatcatctgcaaggcagacctgagggagacctactcccagctggggaaggtgagtgtcccagaggaggagctggacgccatgctgcaagagggcaagggccccatcaacttcaccgtcttcctcacgctctttggggagaagctcaatgggacagaccccgaggaagccatcctgagtgccttccgcatgtttgaccccagcggcaaaggggtggtgaacaaggatgagttcaagcagcttctcctgacccaggcagacaagttctctccagctgaggtggagcagatgttcgccctgacacccatggacctggcggggaacatcgactacaagtcactgtgctacatcatcacccatggagacgagaaagaggaatgaggggcagggccaggcccacgggggggcacctcaataaactctgttgcaaaattggaa

SEQ ID NO: 733839 - DNA, 672 bp, Homo sapiens
cacacctctgcagagagaatggccagcaggaaggcggggacccggggcaaggtggcagccaccaagcaggcccaacgtggttcttccaacgtcttttccatgtttgaacaagcccagatacaggagttcaaagaagtctctcccccacctcccaccttccctagagctgggggctgctcccacctgaaggcccccatcccacaggccttcagctgtatcgaccagaatcgtgatggcatcatctgcaaggcagacctgagggagacctactcccagctggggaaggtgagtgtcccagaggaggagctggacgccatgctgcaagagggcaagggccccatcaacttcaccgtcttcctcacgctctttggggagaagctcaatgggacagaccccgaggaagccatcctgagtgccttccgcatgtttgaccccagcggcaaaggggtggtgaacaaggatgagttcaagcagcttctcctgacccaggcagacaagttctctccagctgaggtggagcagatgttcgccctgacacccatggacctggcggggaacatcgactacaagtcactgtgctacatcatcacccatggagacgagaaagaggaatgaggggcagggccaggcccacgggggggcacctcaataaactctgttgcaaaattggaa

SEQ ID NO: 733840 - DNA, 400 bp, Homo sapiens
tacggtcggagtcgcttttattgcagagagaatggccagcaggaaggcggggacccggggcaaggtggcagccaccaagcaggcccaacgtggttcttccaacgtcttttccatgtttgaacaagcccagatacaggagttcaaagaagccttcagctgtatcgaccagaatcgtgatggcatcatctgcaaggcagacctgagggagacctactcccagctggggaaggtgagtgtcccagaggaggagctggacgccatgctgcaagagggcaagggccccatcaacttcaccgtcttcctcacgctctttggggagaagctcaatggacaacccaggagcatctagtccttcgatgtttacccagcgcaaggtgtacagatattagagtttctacag

SEQ ID NO: 733841 - DNA, 715 bp, Homo sapiens
tacggtcggagtcgcttttattgcagagagaatggccagcaggaaggcggggacccggggcaaggtggcagccaccaagcaggcccaacgtggttcttccaacgtcttttccatgtttgaacaagcccagatacaggagttcaaagaagccttcagctgtatcgaccagaatcgtgatggcatcatctgcaaggcagacctgagggagacctactcccagctggggaaggtgagtgtcccagaggaggagctggacgccatgctgcaagagggcaagggccccatcaacttcaccgtcttcctcacgctctttggggagaagctcaatgggacagaccccgaggaagccatcctgagtgccttccgcatgtttgaccccagcggcaaaggggtggtgaacaaggatgagttcaagcagcttctcctgacccaggcagacaagttctctccagctgaggtgaggctgcccagccccttcaatactcatccccagcaccttctctgggccttcacccatgacccagagcccagtaccagtgaggcagttgctggaagggtggagcagatgttcgccctgacacccatggacctggcggggaacatcgactacaagtcactgtgctacatcatcacccatggagacgagaaagaggaatgaggggcagggccaggcccacgggggggcacctcaataaactctgttgcaaaattggaa

SEQ ID NO: 733842 - DNA, 702 bp, Homo sapiens
cacacctctgcagagagaatggccagcaggaaggcggggacccggggcaaggtggcagccaccaagcaggcccaacgtggttcttccaacgtcttttccatgtttgaacaagcccagatacaggagttcaaagaagccttcagctgtatcgaccagaatcgtgatggcatcatctgcaaggcagacctgagggagacctactcccagctggggaaggtgagtgtcccagaggaggagctggacgccatgctgcaagagggcaagggccccatcaacttcaccgtcttcctcacgctctttggggagaagctcaatgggacagaccccgaggaagccatcctgagtgccttccgcatgtttgaccccagcggcaaaggggtggtgaacaaggatgagttcaagcagcttctcctgacccaggcagacaagttctctccagctgaggtgaggctgcccagccccttcaatactcatccccagcaccttctctgggccttcacccatgacccagagcccagtaccagtgaggcagttgctggaagggtggagcagatgttcgccctgacacccatggacctggcggggaacatcgactacaagtcactgtgctacatcatcacccatggagacgagaaagaggaatgaggggcagggccaggcccacgggggggcacctcaataaactctgttgcaaaattggaa

SEQ ID NO: 733843 - DNA, 771 bp, Homo sapiens
cacacctctgcagagagaatggccagcaggaaggcggggacccggggcaaggtggcagccaccaagcaggcccaacgtggttcttccaacgtcttttccatgtttgaacaagcccagatacaggagttcaaagaagtctctcccccacctcccaccttccctagagctgggggctgctcccacctgaaggcccccatcccacaggccttcagctgtatcgaccagaatcgtgatggcatcatctgcaaggcagacctgagggagacctactcccagctggggaaggtgagtgtcccagaggaggagctggacgccatgctgcaagagggcaagggccccatcaacttcaccgtcttcctcacgctctttggggagaagctcaatgggacagaccccgaggaagccatcctgagtgccttccgcatgtttgaccccagcggcaaaggggtggtgaacaaggatgagttcaagcagcttctcctgacccaggcagacaagttctctccagctgaggtgaggctgcccagccccttcaatactcatccccagcaccttctctgggccttcacccatgacccagagcccagtaccagtgaggcagttgctggaagggtggagcagatgttcgccctgacacccatggacctggcggggaacatcgactacaagtcactgtgctacatcatcacccatggagacgagaaagaggaatgaggggcagggccaggcccacgggggggcacctcaataaactctgttgcaaaattggaa

SEQ ID NO: 733844 - DNA, 643 bp, Homo sapiens
cacacctctgcagagagaatggccagcaggaaggcggggacccggggcaaggtggcagccaccaagcaggcccaacgtggttcttccaacgtcttttccatgtttgaacaagcccagatacaggagttcaaagaaagctgggggctgctcccacctgaaggcccccatcccacaggccttcagctgtatcgaccagaatcgtgatggcatcatctgcaaggcagacctgagggagacctactcccagctggggaaggtgagtgtcccagaggaggagctggacgccatgctgcaagagggcaagggccccatcaacttcaccgtcttcctcacgctctttggggagaagctcaatgggacagaccccgaggaagccatcctgagtgccttccgcatgtttgaccccagcggcaaaggggtggtgaacaaggatgagttcaagcagcttctcctgacccaggcagacaagttctctccagctgaggtggagcagatgttcgccctgacacccatggacctggcggggaacatcgactacaagtcactgtgctacatcatcacccatggagacgagaaagaggaatgaggggcagggccaggcccacgggggggcacctcaataaactctgttgcaaaattggaa

SEQ ID NO: 733845 - DNA, 742 bp, Homo sapiens
cacacctctgcagagagaatggccagcaggaaggcggggacccggggcaaggtggcagccaccaagcaggcccaacgtggttcttccaacgtcttttccatgtttgaacaagcccagatacaggagttcaaagaaagctgggggctgctcccacctgaaggcccccatcccacaggccttcagctgtatcgaccagaatcgtgatggcatcatctgcaaggcagacctgagggagacctactcccagctggggaaggtgagtgtcccagaggaggagctggacgccatgctgcaagagggcaagggccccatcaacttcaccgtcttcctcacgctctttggggagaagctcaatgggacagaccccgaggaagccatcctgagtgccttccgcatgtttgaccccagcggcaaaggggtggtgaacaaggatgagttcaagcagcttctcctgacccaggcagacaagttctctccagctgaggtgaggctgcccagccccttcaatactcatccccagcaccttctctgggccttcacccatgacccagagcccagtaccagtgaggcagttgctggaagggtggagcagatgttcgccctgacacccatggacctggcggggaacatcgactacaagtcactgtgctacatcatcacccatggagacgagaaagaggaatgaggggcagggccaggcccacgggggggcacctcaataaactctgttgcaaaattggaa

SEQ ID NO: 733846 - DNA, 708 bp, Homo sapiens
tacggtcggagtcgcttttattgcagagagaatggccagcaggaaggcggggacccggggcaaggtggcagccaccaagcaggcccaacgtggttcttccaacgtcttttccatgtttgaacaagcccagatacaggagttcaaagaagccttcagctgtatcgaccagaatcgtgatggcatcatctgcaaggcagacctgagggagacctactcccagctggggaaggtgagtgtcccagaggaggagctggacgccatgctgcaagagggcaagggccccatcaacttcaccgtcttcctcacgctctttggggagaagctcaatgggacagaccccgaggaagccatcctgagtgccttccgcatgtttgaccccagcggcaaaggggtggtgaacaaggatgaccaacccttcctgcgccatgggagcctccgtacccaccttcctgtgcagtcactcccccgcagtttctgctcagaccctcctcaccccccaggttcaagcagcttctcctgacccaggcagacaagttctctccagctgaggtggagcagatgttcgccctgacacccatggacctggcggggaacatcgactacaagtcactgtgctacatcatcacccatggagacgagaaagaggaatgaggggcagggccaggcccacgggggggcacctcaataaactctgttgcaaaattggaa

SEQ ID NO: 733847 - DNA, 442 bp, Homo sapiens
  misc_feature (366)..(366): n is a, c, g, or t
  misc_feature (373)..(373): n is a, c, g, or t
  misc_feature (380)..(380): n is a, c, g, or t
  misc_feature (383)..(383): n is a, c, g, or t
  misc_feature (390)..(390): n is a, c, g, or t
  misc_feature (401)..(401): n is a, c, g, or t
tacggtcggagtcgcttttattgcagagagaatggccagcaggaaggcggggacccggggcaaggtggcagccaccaagcaggcccaacgtggttcttccaacgtcttttccatgtttgaacaagcccagatacaggagttcaaagaagccttcagctgtatcgaccagaatcgtgatggcatcatctgcaaggcagacctgagggagacctactcccagctggggaaggtgagtgtcccagaggaggagctggacgccatgctgcaagagggcaagggccccatcaacttcaccgtcttcctcacgctctttggggagaagctcaatggacaaccccaggagcatctgagtcctccgatgtttcnccagcgnaagggtngtnacagatngttagcgtttnctaccagagaaagttctcccctagggggcgatttgccctaa

SEQ ID NO: 733848 - DNA, 695 bp, Homo sapiens
cacacctctgcagagagaatggccagcaggaaggcggggacccggggcaaggtggcagccaccaagcaggcccaacgtggttcttccaacgtcttttccatgtttgaacaagcccagatacaggagttcaaagaagccttcagctgtatcgaccagaatcgtgatggcatcatctgcaaggcagacctgagggagacctactcccagctggggaaggtgagtgtcccagaggaggagctggacgccatgctgcaagagggcaagggccccatcaacttcaccgtcttcctcacgctctttggggagaagctcaatgggacagaccccgaggaagccatcctgagtgccttccgcatgtttgaccccagcggcaaaggggtggtgaacaaggatgaccaacccttcctgcgccatgggagcctccgtacccaccttcctgtgcagtcactcccccgcagtttctgctcagaccctcctcaccccccaggttcaagcagcttctcctgacccaggcagacaagttctctccagctgaggtggagcagatgttcgccctgacacccatggacctggcggggaacatcgactacaagtcactgtgctacatcatcacccatggagacgagaaagaggaatgaggggcagggccaggcccacgggggggcacctcaataaactctgttgcaaaattggaa

SEQ ID NO: 733849 - DNA, 429 bp, Homo sapiens
  misc_feature (353)..(353): n is a, c, g, or t
  misc_feature (360)..(360): n is a, c, g, or t
  misc_feature (367)..(367): n is a, c, g, or t
  misc_feature (370)..(370): n is a, c, g, or t
  misc_feature (377)..(377): n is a, c, g, or t
  misc_feature (388)..(388): n is a, c, g, or t
cacacctctgcagagagaatggccagcaggaaggcggggacccggggcaaggtggcagccaccaagcaggcccaacgtggttcttccaacgtcttttccatgtttgaacaagcccagatacaggagttcaaagaagccttcagctgtatcgaccagaatcgtgatggcatcatctgcaaggcagacctgagggagacctactcccagctggggaaggtgagtgtcccagaggaggagctggacgccatgctgcaagagggcaagggccccatcaacttcaccgtcttcctcacgctctttggggagaagctcaatggacaaccccaggagcatctgagtcctccgatgtttcnccagcgnaagggtngtnacagatngttagcgtttnctaccagagaaagttctcccctagggggcgatttgccctaa

SEQ ID NO: 733850 - DNA, 764 bp, Homo sapiens
cacacctctgcagagagaatggccagcaggaaggcggggacccggggcaaggtggcagccaccaagcaggcccaacgtggttcttccaacgtcttttccatgtttgaacaagcccagatacaggagttcaaagaagtctctcccccacctcccaccttccctagagctgggggctgctcccacctgaaggcccccatcccacaggccttcagctgtatcgaccagaatcgtgatggcatcatctgcaaggcagacctgagggagacctactcccagctggggaaggtgagtgtcccagaggaggagctggacgccatgctgcaagagggcaagggccccatcaacttcaccgtcttcctcacgctctttggggagaagctcaatgggacagaccccgaggaagccatcctgagtgccttccgcatgtttgaccccagcggcaaaggggtggtgaacaaggatgaccaacccttcctgcgccatgggagcctccgtacccaccttcctgtgcagtcactcccccgcagtttctgctcagaccctcctcaccccccaggttcaagcagcttctcctgacccaggcagacaagttctctccagctgaggtggagcagatgttcgccctgacacccatggacctggcggggaacatcgactacaagtcactgtgctacatcatcacccatggagacgagaaagaggaatgaggggcagggccaggcccacgggggggcacctcaataaactctgttgcaaaattggaa

SEQ ID NO: 733851 - DNA, 735 bp, Homo sapiens
cacacctctgcagagagaatggccagcaggaaggcggggacccggggcaaggtggcagccaccaagcaggcccaacgtggttcttccaacgtcttttccatgtttgaacaagcccagatacaggagttcaaagaaagctgggggctgctcccacctgaaggcccccatcccacaggccttcagctgtatcgaccagaatcgtgatggcatcatctgcaaggcagacctgagggagacctactcccagctggggaaggtgagtgtcccagaggaggagctggacgccatgctgcaagagggcaagggccccatcaacttcaccgtcttcctcacgctctttggggagaagctcaatgggacagaccccgaggaagccatcctgagtgccttccgcatgtttgaccccagcggcaaaggggtggtgaacaaggatgaccaacccttcctgcgccatgggagcctccgtacccaccttcctgtgcagtcactcccccgcagtttctgctcagaccctcctcaccccccaggttcaagcagcttctcctgacccaggcagacaagttctctccagctgaggtggagcagatgttcgccctgacacccatggacctggcggggaacatcgactacaagtcactgtgctacatcatcacccatggagacgagaaagaggaatgaggggcagggccaggcccacgggggggcacctcaataaactctgttgcaaaattggaa

SEQ ID NO: 733852 - DNA, 531 bp, Homo sapiens
cttgcttccacttcaccttcccgacccacagctgcctctgcccctccagcccctgtggccaggatggagggagggcggcctgggccttctgggggacacccagggtccctgtgtgcacctcatgccccacccccaccagggaaggtgagtgtcccagaggaggagctggacgccatgctgcaagagggcaagggccccatcaacttcaccgtcttcctcacgctctttggggagaagctcaatgggacagaccccgaggaagccatcctgagtgccttccgcatgtttgaccccagcggcaaaggggtggtgaacaaggatgagttcaagcagcttctcctgacccaggcagacaagttctctccagctgaggtggagcagatgttcgccctgacacccatggacctggcggggaacatcgactacaagtcactgtgctacatcatcacccatggagacgagaaagaggaatgaggggcagggccaggcccacgggggggcacctcaataaactctgttgcaaaattggaa

SEQ ID NO: 733853 - DNA, 630 bp, Homo sapiens
cttgcttccacttcaccttcccgacccacagctgcctctgcccctccagcccctgtggccaggatggagggagggcggcctgggccttctgggggacacccagggtccctgtgtgcacctcatgccccacccccaccagggaaggtgagtgtcccagaggaggagctggacgccatgctgcaagagggcaagggccccatcaacttcaccgtcttcctcacgctctttggggagaagctcaatgggacagaccccgaggaagccatcctgagtgccttccgcatgtttgaccccagcggcaaaggggtggtgaacaaggatgagttcaagcagcttctcctgacccaggcagacaagttctctccagctgaggtgaggctgcccagccccttcaatactcatccccagcaccttctctgggccttcacccatgacccagagcccagtaccagtgaggcagttgctggaagggtggagcagatgttcgccctgacacccatggacctggcggggaacatcgactacaagtcactgtgctacatcatcacccatggagacgagaaagaggaatgaggggcagggccaggcccacgggggggcacctcaataaactctgttgcaaaattggaa

SEQ ID NO: 733854 - DNA, 469 bp, Homo sapiens
cacacctctgcagagagaatggccagcaggaaggcggggacccggggcaaggtggcagccaccaagcaggcccaacgtggttcttccaacgtcttttccatgtttgaacaagcccagatacaggagttcaaagaagccttcagctgtatcgaccagaatcgtgatggcatcatctgcaaggcagacctgagggagacctactcccagctgggtgaggctgcccagccccttcaatactcatccccagcaccttctctgggccttcacccatgacccagagcccagtaccagtgaggcagttgctggaagggtggagcagatgttcgccctgacacccatggacctggcggggaacatcgactacaagtcactgtgctacatcatcacccatggagacgagaaagaggaatgaggggcagggccaggcccacgggggggcacctcaataaactctgttgcaaaattggaa

SEQ ID NO: 733855 - DNA, 623 bp, Homo sapiens
cacacctctgcagagagaatggccagcaggaaggcggggacccggggcaaggtggcagccaccaagcaggcccaacgtggttcttccaacgtcttttccatgtttgaacaagcccagatacaggagttcaaagaagtctctcccccacctcccaccttccctagagctgggggctgctcccacctgaaggcccccatcccacaggccttcagctgtatcgaccagaatcgtgatggcatcatctgcaaggcagacctgagggagacctactcccagctggggaaggtgagtgtcccagaggaggagctggacgccatgctgcaagagggcaagggccccatcaacttcaccgtcttcctcacgctctttggggagaagctcaatgggacagaccccgaggaagccatcctgagtgccttccgcatgtttgaccccagcggcaaaggggtggtgaacaaggatgagtggagcagatgttcgccctgacacccatggacctggcggggaacatcgactacaagtcactgtgctacatcatcacccatggagacgagaaagaggaatgaggggcagggccaggcccacgggggggcacctcaataaactctgttgcaaaattggaa

SEQ ID NO: 733856 - DNA, 240 bp, Homo sapiens
cacacctctgcagagagaatggccagcaggaaggcggggacccggggcaaggtggcagccaccaagcaggcccaacgtggttcttccaacgtcttttccatgtttgaacaagcccagatacaggagttcaaagaaggaaggtgagtgtcccagaggaggagctggacgccatgctgcaagagggcaagggccccatcaacttcaccgtcttcctcacgctctttggggagaagctcaatg

SEQ ID NO: 733857 - DNA, 289 bp, Homo sapiens; identical to SEQ ID NO: 445568

SEQ ID NO: 733858 - DNA, 647 bp, Homo sapiens
  misc_feature (164)..(164): n is a, c, g, or t
  misc_feature (479)..(479): n is a, c, g, or t
  misc_feature (503)..(503): n is a, c, g, or t
  misc_feature (514)..(514): n is a, c, g, or t
gcggacttcgacacctacgacgatcgggcctacagcagcttcggcggcggcagagggtcccgcggcagtgctggtggccatggttcccgtagccagaaggagttgcccacagagcccccctacacagcatactgtaggaaatctacctttcaatacggttcagnggcgacatagatgctatctttaaggatctcagcataaggagtgtacggctagtcagagacaaagacacagataaatttaaaggattctgctatgtagaattcgatgaagtggattcccttaaggaagccttgacatacgatggtgcactgttgggcgatcggtcacttcgtgtggacattgcagaaggcagaaaacaagataaaggtggctttggattcagaaaaggtggaccagatgacagaggcttcagggatgacttctatagggggcaggggaggtagtcgcccaggcgaccggctgaacaggcccccccnatgggcagccgcttcagagatggncctcccctccngtggatccaacatggatttcagagaaccacagaagaggaaagagccatgggaccgacgatcccgctgaagctcaacagtcgaagcccctcatcagtaggcatcccaacctgcaaaacgaggggcaggctaaaa

SEQ ID NO: 733859 - DNA, 957 bp, Homo sapiens
  misc_feature (164)..(164): n is a, c, g, or t
  misc_feature (479)..(479): n is a, c, g, or t
  misc_feature (505)..(506): n is a, c, g, or t
  misc_feature (520)..(520): n is a, c, g, or t
  misc_feature (533)..(533): n is a, c, g, or t
  misc_feature (582)..(582): n is a, c, g, or t
  misc_feature (588)..(588): n is a, c, g, or t
  misc_feature (600)..(600): n is a, c, g, or t
  misc_feature (608)..(609): n is a, c, g, or t
  misc_feature (621)..(621): n is a, c, g, or t
  misc_feature (683)..(683): n is a, c, g, or t
  misc_feature (690)..(690): n is a, c, g, or t
  misc_feature (692)..(692): n is a, c, g, or t
  misc_feature (728)..(728): n is a, c, g, or t
  misc_feature (745)..(745): n is a, c, g, or t
  misc_feature (748)..(748): n is a, c, g, or t
  misc_feature (758)..(758): n is a, c, g, or t
  misc_feature (780)..(780): n is a, c, g, or t
  misc_feature (800)..(800): n is a, c, g, or t
  misc_feature (802)..(803): n is a, c, g, or t
  misc_feature (811)..(811): n is a, c, g, or t
  misc_feature (846)..(846): n is a, c, g, or t
  misc_feature (957)..(957): n is a, c, g, or t
gcggacttcgacacctacgacgatcgggcctacagcagcttcggcggcggcagagggtcccgcggcagtgctggtggccatggttcccgtagccagaaggagttgcccacagagcccccctacacagcatactgtaggaaatctacctttcaatacggttcagnggcgacatagatgctatctttaaggatctcagcataaggagtgtacggctagtcagagacaaagacacagataaatttaaaggattctgctatgtagaattcgatgaagtggattcccttaaggaagccttgacatacgatggtgcactgttgggcgatcggtcacttcgtgtggacattgcagaaggcagaaaacaagataaaggtggctttggattcagaaaaggtggaccagatgacagaggcttcagggatgacttctatagggggcaggggaggtagtcgcccaggcgaccggctgaacaggcccccccnatgggcagccgcttcaaaaatagaanncccataaaataganaaaaaatagattnaaaaaaacccacagaagaggaaagagcacagagaccacgactccagctnaaaccncgaacagtcgcnacgccccnnaatcaagtagcnaatcccaactctgctatcttcggggggtgccaggcctagagaggaagtcgttcaaaaagagnaagaatnancctgcggttgggagggaatggggcgtggggggttanaacaagaccacagcctnggngagtcccagngcaaccgtcctgcagccgccantcctgcgcctgccattggcntnnaaaaaaangaaacacagcttgtgagtgcatgtcagctgttaanaagtggtttttagtacattctgggctttgctgtatctatctaatgcctgtttgtgcgtttttttctttcttccgctgcttccccattttcttctgtcctttttctcctgcn

SEQ ID NO: 733860 - DNA, 707 bp, Homo sapiens
  misc_feature (164)..(164): n is a, c, g, or t
  misc_feature (539)..(539): n is a, c, g, or t
  misc_feature (563)..(563): n is a, c, g, or t
  misc_feature (574)..(574): n is a, c, g, or t
gcggacttcgacacctacgacgatcgggcctacagcagcttcggcggcggcagagggtcccgcggcagtgctggtggccatggttcccgtagccagaaggagttgcccacagagcccccctacacagcatactgtaggaaatctacctttcaatacggttcagnggcgacatagatgctatctttaaggatctcagcataaggagtgtacggctagtcagagacaaagacacagataaatttaaaggattctgctatgtagaattcgatgaagtggattcccttaaggaagccttgacatacgatggtgcactgttgggcgatcggtcacttcgtgtggacattgcagaaggcagaaaacaagataaaggtggctttggattcagaaaaggtggaccagatgacagaggaatgggtagctctcgagaatctagaggtggatgggattcccgggatgacttcagttctggcttcagggatgacttctatagggggcaggggaggtagtcgcccaggcgaccggctgaacaggcccccccnatgggcagccgcttcagagatggncctcccctccngtggatccaacatggatttcagagaaccacagaagaggaaagagccatgggaccgacgatcccgctgaagctcaacagtcgaagcccctcatcagtaggcatcccaacctgcaaaacgaggggcaggctaaaa

SEQ ID NO: 733861 - DNA, 1547 bp, Homo sapiens
atcctgtgcggcgcgcgtgggcaggtcattgcagttgggcgctcagcagctgtggcagccggttgaggtctggaagtagcgttgggctgaagcagcggagttcgccatgcgcgagtgtatctctatccacgtggggcaggcgggtgtccagatcggcaatgcctgctgggaactgtactgccttgaacatggaattcagcccgatggtcaaatgccaagtgataaaaccattggtggcggggacgactccttcaacacgttcttcagtgagactggagctggcaagcacgtgcccagagcagtgtttgtggacctggagcccactgtggtcgatgaagtgcgcacagggacctacaggcagctcttccacccagagcagctgatcaccgggaaggaagatgcagccagtaattacgccaggggccattacaccatcggcaaggagattgttgacctagtcctggaccggatccgcaaactggcggatctgtgcacaggactgcagggcttcctcatcttccacagctttgggggcggcactggctctgggttcgcatctctgctcatggagcggctctcagtggattacagcaagaagtccaagctagagtttgccatttacccaggcccccaggtctccacagccgtggtggagccctacaactccatcctaaccacccacacgaccctggaacattctgactgtgccttcatggtcgacaatgaagccatctatgacatatgtcggcgcaacctggacattgaacgtcccacgtacaccaacctcaatcgcctgattgggcagatcgtgtcctccatcacggcctccctgcgatttgatggggccctgaatgtggacttgacggaattccagaccaacctcgtgccgtacccccgcatccacttccccctggccacctacgccccagtcatctcagctgagaaggcctaccacgagcagctgtctgtggctgagatcaccaatgcctgcttcgagccagccaatcagatggtcaagtgtgaccctcgccatggcaagtacatggcctgctgcatgttgtacaggggggacgtggtccccaaagacgtcaatgcggccatcgccaccatcaagaccaagcgcactatccagtttgtggattggtgcccgactggatttaaggtgggcattaactaccagccccccacagtggtccccgggggagacctggccaaggtgcagcgggccgtgtgcatgctgagcaacaccacggccattgcggaggcctgggcccgcctggtccataagttcgatctcatgtatgccaagtgggcctttgtgcactggtacgtgggcgaaggcatggaagagggagagttctctgaggcccgcgaggacctggcagctctagagaaggattgtgaagaggtgggcgtggattccgtggaagctgaggctgaagaaggcgaagaatactgaggggagggtgtggtgggttctcccctgccacccctaggatggctgctttcaagttgtttgcaattaaagattctgtataaaaccaaga

SEQ ID NO: 733862 - DNA, 1061 bp, Homo sapiens; identical to SEQ ID NO: 728853

SEQ ID NO: 733863 - DNA, 553 bp, Homo sapiens; identical to SEQ ID NO: 456541

SEQ ID NO: 733864 - DNA, 460 bp, Homo sapiens; identical to SEQ ID NO: 456544
  misc_feature (42)..(42): n is a, c, g, or t

SEQ ID NO: 733865 - DNA, 595 bp, Homo sapiens
gacagtctgcagtctacggcgaggcacaggccagcccagctccacgaggactgaacaaggtgctgtctcactgccaccatgccggaagtcgagagaaaacccaagatcactgcctcccgcaaactcttgctgaagagcctgatgctggccaaggccaaggaatgctgggagcaggagcacgaggagcgcgaggctgagaaggtgcgctacctggcagagcgcatccccacgctgcagacccgtggcctgtccctcagtgccctgcaggacctgtgccgggagctgcacgccaaggtggaggtggtggatgaggagcgatacgacattgaggccaaatgcctccacaacaccagggagattaaggacctgaagctgaaggtgatggacctccgtgggaagttcaagcgcccgcccctgcgtcgagtccgtgtctcggctgacgccatgctccgggccctgctgggctccaagcacaaggtgtccatggatctgcgggccaacctcaagtctgtgaagaaggaagacacagagaagatgtgtgtacagtgtccacaggcatcacaccttcttcattaaaaacccagtttcctggtca

SEQ ID NO: 733866 - DNA, 532 bp, Homo sapiens
gacagtctgcagtctacggcgaggcacaggccagcccagctccacgaggactgaacaaggtgctgtctcactgccaccatgccggaagtcgagagaaaacccaagatcactgcctcccgcaaactcttgctgaagagcctgatgctggccaaggccaaggaatgctgggagcaggagcacgaggagcgcgaggctgagaaggtgcgctacctggcagagcgcatccccacgctgcagacccgtggcctgtccctcagtgccctgcagtgcatgccctcctctggaactgggattaaacagatacccaagaggcaggaaaaacgcgagtgtctgaagacctcaccctggcagggtgggcttctatccacccatgaggcacctggggcttctcagccaccccgtggtgtaacaagtggaggaggaggagggggtgagaacacctttcctccagccctgtgccacactccttctatgtgtgtacagtgtccacaggcatcacaccttcttcattaaaaacccagtttcctggtca

SEQ ID NO: 733867 - DNA, 1033 bp, Homo sapiens
gacagtctgcagtctacggcgaggcacaggccagcccagctccacgaggactgaacaaggtgctgtctcactgccaccatgccggaagtcgagagaaaacccaagatcactgcctcccgcaaactcttgctgaagagcctgatgctggccaaggccaaggaatgctgggagcaggagcacgaggagcgcgaggctgagaaggtgcgctacctggcagagcgcatccccacgctgcagacccgtggcctgtccctcagtgccctgcaggacctgtgccgggagctgcacgccaaggtggaggtggtggatgaggagcgatacgacattgaggccaaatgcctccacaacaccagggagattaaggacctgaagctgaaggtgatggacctccgtgggaagttcaagcgcccgcccctgcgtcgagtccgtgtctcggctgacgccatgctccgggccctgctgggctccaagcacaaggtgtccatggatctgcgggccaacctcaagtctgtgaagaaggaagacacagagaaggagcggcctgtggaggtgggtgactggaggaagaacgtggaggccatgtctggcatggaaggccggaagaagatgtttgatgccgccaagtctccgacctcacaatagaggccagcttgctgtgctgcgctctgagctcctgcttcatgcttcttctccaacccagctcactcacctctctgcctgtgtctggagcatcccttcccacctctcccccacttcttccctccagcctgcatgccctcctctggaactgggattaaacagatacccaagaggcaggaaaaacgcgagtgtctgaagacctcaccctggcagggtgggcttctatccacccatgaggcacctggggcttctcagccaccccgtggtgtaacaagtggaggaggaggagggggtgagaacacctttcctccagccctgtgccacactccttctatgtgtgtacagtgtccacaggcatcacaccttcttcattaaaaacccagtttcctggtca

SEQ ID NO: 733868 - DNA, 751 bp, Homo sapiens
gacagtctgcagtctacggcgaggcacaggccagcccagctccacgaggactgaacaaggtgctgtctcactgccaccatgccggaagtcgagagaaaacccaagatcactgcctcccgcaaactcttgctgaagagcctgatgctggccaaggccaaggaatgctgggagcaggagcacgaggagcgcgaggctgagaaggtgcgctacctggcagagcgcatccccacgctgcagacccgtggcctgtccctcagtgccctgcaggacctgtgccgggagctgcacgccaaggtggaggtggtggatgaggagcgatacgacattgaggccaaatgcctccacaacaccagggagattaaggacctgaagctgaaggtgatggacctccgtgggaagttcaagcgcccgcccctgcgtcgagtccgtgtctcggctgacgccatgctccgggccctgctgggctccaagcacaaggtgtccatggatctgcgggccaacctcaagtctgtgaagaaggaagacacagagaaggaaaaacgcgagtgtctgaagacctcaccctggcagggtgggcttctatccacccatgaggcacctggggcttctcagccaccccgtggtgtaacaagtggaggaggaggagggggtgagaacacctttcctccagccctgtgccacactccttctatgtgtgtacagtgtccacaggcatcacaccttcttcattaaaaacccagtttcctggtca

SEQ ID NO: 733869 - DNA, 507 bp, Homo sapiens
cgagaagctgaggttttgtaggagcccttatgaatgaagatccagtccggggtgcgctagggctgagaagccctggggactgcatgtgctgtaggtaagtcagggattcatgcgctgcacacaggtccccgggaactgatggctttgcctctttgtccctacaggccagcttgctgtgctgcgctctgagctcctgcttcatgcttcttctccaacccagctcactcacctctctgcctgtgtctggagcatcccttcccacctctcccccacttcttccctccagcctgcatgccctcctctggaactgggattaaacagatacccaagaggcaggaaaaacgcgagtgtctgaagacctcaccctggcagggtgggcttctatccacccatgaggcacctggggcttctcaacctttcctccagccctgtgccacactccttctatgtgtgtacagtgtccacaggcatcacaccttcttcattaaaaacccagtttcctggtca

SEQ ID NO: 733870 - DNA, 414 bp, Homo sapiens
  misc_feature (42)..(42): n is a, c, g, or t
gggggggggggagggggcccatacggcgttgcgtagcgacgncgagctcgctgtctccgacctcacagagagccagcttgctgtgctgcgctctgagctcctgcttcatgcttcttctccaacccagctcactcacctctctgcctgtgtctggagcatcccttcccacctctcccccacttcttccctccagcctgcatgccctcctctggaactgggattaaacagatacccaagaggcaggaaaaacgcgagtgtctgaagacctcaccctggcagggtgggcttctatccacccatgaggcacctggggcttctcaacctttcctccagccctgtgccacactccttctatgtgtgtacagtgtccacaggcatcacaccttcttcattaaaaacccagtttcctggtca

SEQ ID NO: 733871 - DNA, 987 bp, Homo sapiens
gacagtctgcagtctacggcgaggcacaggccagcccagctccacgaggactgaacaaggtgctgtctcactgccaccatgccggaagtcgagagaaaacccaagatcactgcctcccgcaaactcttgctgaagagcctgatgctggccaaggccaaggaatgctgggagcaggagcacgaggagcgcgaggctgagaaggtgcgctacctggcagagcgcatccccacgctgcagacccgtggcctgtccctcagtgccctgcaggacctgtgccgggagctgcacgccaaggtggaggtggtggatgaggagcgatacgacattgaggccaaatgcctccacaacaccagggagattaaggacctgaagctgaaggtgatggacctccgtgggaagttcaagcgcccgcccctgcgtcgagtccgtgtctcggctgacgccatgctccgggccctgctgggctccaagcacaaggtgtccatggatctgcgggccaacctcaagtctgtgaagaaggaagacacagagaaggagcggcctgtggaggtgggtgactggaggaagaacgtggaggccatgtctggcatggaaggccggaagaagatgtttgatgccgccaagtctccgacctcacaatagaggccagcttgctgtgctgcgctctgagctcctgcttcatgcttcttctccaacccagctcactcacctctctgcctgtgtctggagcatcccttcccacctctcccccacttcttccctccagcctgcatgccctcctctggaactgggattaaacagatacccaagaggcaggaaaaacgcgagtgtctgaagacctcaccctggcagggtgggcttctatccacccatgaggcacctggggcttctcaacctttcctccagccctgtgccacactccttctatgtgtgtacagtgtccacaggcatcacaccttcttcattaaaaacccagtttcctggtca

SEQ ID NO: 733872 - DNA, 890 bp, Homo sapiens
gacagtctgcagtctacggcgaggcacaggccagcccagctccacgaggactgaacaaggtgctgtctcactgccaccatgccggaagtcgagagaaaacccaagatcactgcctcccgcaaactcttgctgaagagcctgatgctggccaaggccaaggaatgctgggagcaggagcacgaggagcgcgaggctgagaaggtgcgctacctggcagagcgcatccccacgctgcagacccgtggcctgtccctcagtgccctgcaggacctgtgccgggagctgcacgccaaggtggaggtggtggatgaggagcgatacgacattgaggccaaatgcctccacaacaccagggagattaaggacctgaagctgaaggtgatggacctccgtgggaagttcaagcgcccgcccctgcgtcgagtccgtgtctcggctgacgccatgctccgggccctgctgggctccaagcacaaggtgtccatggatctgcgggccaacctcaagtctgtgaagaaggaagacacagagaaggagcggcctgtggaggtgggtgactggaggaagaacgtggaggccatgtctggcatggaaggccggaagaagatgtttgatgccgccaagttgcatgccctcctctggaactgggattaaacagatacccaagaggcaggaaaaacgcgagtgtctgaagacctcaccctggcagggtgggcttctatccacccatgaggcacctggggcttctcagccaccccgtggtgtaacaagtggaggaggaggagggggtgagaacacctttcctccagccctgtgccacactccttctatgtgtgtacagtgtccacaggcatcacaccttcttcattaaaaacccagtttcctggtca

SEQ ID NO: 733873 - DNA, 844 bp, Homo sapiens
gacagtctgcagtctacggcgaggcacaggccagcccagctccacgaggactgaacaaggtgctgtctcactgccaccatgccggaagtcgagagaaaacccaagatcactgcctcccgcaaactcttgctgaagagcctgatgctggccaaggccaaggaatgctgggagcaggagcacgaggagcgcgaggctgagaaggtgcgctacctggcagagcgcatccccacgctgcagacccgtggcctgtccctcagtgccctgcaggacctgtgccgggagctgcacgccaaggtggaggtggtggatgaggagcgatacgacattgaggccaaatgcctccacaacaccagggagattaaggacctgaagctgaaggtgatggacctccgtgggaagttcaagcgcccgcccctgcgtcgagtccgtgtctcggctgacgccatgctccgggccctgctgggctccaagcacaaggtgtccatggatctgcgggccaacctcaagtctgtgaagaaggaagacacagagaaggagcggcctgtggaggtgggtgactggaggaagaacgtggaggccatgtctggcatggaaggccggaagaagatgtttgatgccgccaagttgcatgccctcctctggaactgggattaaacagatacccaagaggcaggaaaaacgcgagtgtctgaagacctcaccctggcagggtgggcttctatccacccatgaggcacctggggcttctcaacctttcctccagccctgtgccacactccttctatgtgtgtacagtgtccacaggcatcacaccttcttcattaaaaacccagtttcctggtca

SEQ ID NO: 733874 - DNA, 807 bp, Homo sapiens
gacagtctgcagtctacggcgaggcacaggccagcccagctccacgaggactgaacaaggtgctgtctcactgccaccatgccggaagtcgagagaaaacccaagatcactgcctcccgcaaactcttgctgaagagcctgatgctggccaaggccaaggaatgctgggagcaggagcacgaggagcgcgaggctgagaaggtgcgctacctggcagagcgcatccccacgctgcagacccgtggcctgtccctcagtgccctgcaggacctgtgccgggagctgcacgccaaggtggaggtggtggatgaggagcgatacgacattgaggccaaatgcctccacaacaccagggagattaaggacctgaagctgaaggtgatggacctccgtgggaagttcaagcgcccgcccctgcgtcgagtccgtgtctcggctgacgccatgctccgggccctgctgggtccaacccagctcactcacctctctgcctgtgtctggagcatcccttcccacctctcccccacttcttccctccagcctgcatgccctcctctggaactgggattaaacagatacccaagaggcaggaaaaacgcgagtgtctgaagacctcaccctggcagggtgggcttctatccacccatgaggcacctggggcttctcagccaccccgtggtgtaacaagtggaggaggaggagggggtgagaacacctttcctccagccctgtgccacactccttctatgtgtgtacagtgtccacaggcatcacaccttcttcattaaaaacccagtttcctggtca

SEQ ID NO: 733875 - DNA, 412 bp, Homo sapiens
  misc_feature (341)..(341): n is a, c, g, or t
  misc_feature (351)..(351): n is a, c, g, or t
  misc_feature (363)..(363): n is a, c, g, or t
cggcacgagctggagcagacgcctccaggatctgtcggcagctgctgttctgagggagagcagagaccatgtctgacatagaagaggtggtggaagagtacgaggaggaggagcaggaagaagcagctgttgaagagcaggaggaggcagcggaagaggatgctgaagcagaggctgagaccgaggagaccagggcagaagaagatgaagaagaagaggaagcaaaggaggctgaagatggcccaatggaggagtccaaaccaaagcccaggtcgttcatgcccaacttggtgcctccaagatccccgatggagagagatggactttgatgacatccaccngaagcgcatngagaaggacctnaattagttgcaggcgctgattgaggctactttgagaacacggagaaaga

SEQ ID NO: 733876 - DNA, 471 bp, Homo sapiens
  misc_feature (182)..(182): n is a, c, g, or t
  misc_feature (223)..(223): n is a, c, g, or t
cggcacgagctggagcagacgcctccaggatctgtcggcagctgctgttctgagggagagcagagaccatgtctgacatagaagaggtggtggaagagtacgaggaggaggagcaggaagaagcagctgttgaagaagaggaggacttgagagaggacgaagacgagcaggaggaggcagcngaagaggattcttaagcagaggcttagacccaggagaccanggcagaagaagattaagaagaagaggcagactgagcgggaaaagaagaagaagattctggcttagaaggaggaaggttctggccattaccaccttaattaagatcaacttagggagaaggccaaggagctttggcaaacatctataacttggaggcgaaaagttcacctccagagagttcagcagcgaattttagatcattttctccaacaggatcacgataccagaagtctccaacccgcggaggct

SEQ ID NO: 733877 - DNA, 464 bp, Homo sapiens
  misc_feature (393)..(393): n is a, c, g, or t
  misc_feature (403)..(403): n is a, c, g, or t
  misc_feature (415)..(415): n is a, c, g, or t
gattccccctaagcctcgctgatctctgtacaacgggggccagagcctcctctgaggaaggcaggcttccctttgtacctgcactgacttttttctccttttggagggagagcagagaccatgtctgacatagaagaggtggtggaagagtacgaggaggaggagcaggaagaagcagctgttgaagagcaggaggaggcagcggaagaggatgctgaagcagaggctgagaccgaggagaccagggcagaagaagatgaagaagaagaggaagcaaaggaggctgaagatggcccaatggaggagtccaaaccaaagcccaggtcgttcatgcccaacttggtgcctccaagatccccgatggagagagatggactttgatgacatccaccngaagcgcatngagaaggacctnaattagttgcaggcgctgattgaggctactttgagaacacggagaaaga

SEQ ID NO: 733878 - DNA, 442 bp, Homo sapiens
  misc_feature (371)..(371): n is a, c, g, or t
  misc_feature (381)..(381): n is a, c, g, or t
  misc_feature (393)..(393): n is a, c, g, or t
cggcacgagctggagcagacgcctccaggatctgtcggcagctgctgttctgagggagagcagagaccatgtctgacatagaagaggtggtggaagagtacgaggaggaggagcaggaagaagcagctgttgaagaagaggaggacttgagagaggacgaagacgagcaggaggaggcagcggaagaggatgctgaagcagaggctgagaccgaggagaccagggcagaagaagatgaagaagaagaggaagcaaaggaggctgaagatggcccaatggaggagtccaaaccaaagcccaggtcgttcatgcccaacttggtgcctccaagatccccgatggagagagatggactttgatgacatccaccngaagcgcatngagaaggacctnaattagttgcaggcgctgattgaggctactttgagaacacggagaaaga

SEQ ID NO: 733879 - DNA, 801 bp, Homo sapiens
gctggagtgcaatggtgccatcttggctcactacaacctccgcctcccaggttcaagggattctgcctcagcctcctgagtaactggggttacaggcgcgcgataccacgcctggctaatttttctatttttagtagagatggggtttcgccatgttggccacgctggtcttaaactcctgacctcaagtgatccgcccgccttggtcttccaaagtgctgggattacaggtgtgagtcaccgtgcccagcctggacttgccttttacctcatccgtggtgtcttttgaagaaaaagattctttagaaatgttttttctttcatagcttgtgttttatgtattactttcaagatcccaactagatctaggtcctaaaaatagtatcctacctattgtttttttaatcaacttaattgtggtataattgcacactgcagataaactgcacatgtttgaagtgagtaatgtaagtttttttgtcttggagccctgaggtaaacttttatttcttagctgacaggacttccacacccatgctcctctcggcacctttcacccagcccaagcagcggcggcccagtggtggaaaaggtgccacggccaaacggattggagactcaccccgcattctaggccggagaagcgggcgggcttgggatgccggcaggaggcaatgactctccccaggcgctgcatcctggctccggggcacaagcgcctctccgccctgacgctgatgctcgtctggctgcccgttctttggcatcaaaataccagacgatggtggcgcaccctgtggc

SEQ ID NO: 733880 - DNA, 613 bp, Homo sapiens
gaaggatcatacatcactcaatcatcagcaaacatttatgaagcacctgctctcgtgcccagcctggacttgccttttacctcatccgtggtgtcttttgaagaaaaagattctttagaaatgttttttctttcatagcttgtgttttatgtattactttcaagatcccaactagatctaggtcctaaaaatagtatcctacctattgtttttttaatcaacttaattgtggtataattgcacactgcagataaactgcacatgtttgaagtgagtaatgtaagtttttttgtcttggagccctgaggtaaacttttatttcttagctgacaggacttccacacccatgctcctctcggcacctttcacccagcccaagcagcggcggcccagtggtggaaaaggtgccacggccaaacggattggagactcaccccgcattctaggccggagaagcgggcgggcttgggatgccggcaggaggcaatgactctccccaggcgctgcatcctggctccggggcacaagcgcctctccgccctgacgctgatgctcgtctggctgcccgttctttggcatcaaaataccagacgatggtggcgcaccctgtggc

SEQ ID NO: 733881 - DNA, 3001 bp, Homo sapiens
atttcaattaaagtttgtaattatgtgccatgttggtgtgctgcacccattaactcgtcatttagcattaggtatatctcccaatgctatccctcccccgtcccccatcccacaacagtccccagtgtgtgatgttccccttcctgtgtccatgtgttctcatcgttcaattcccacctatgaatacaatgaaggcaagagggacacctgttgtacttctttagataaaccaacccttggtaggaagctgcccaacaaagggcccatgacactgaacacggcagcttcttggaccaagaacaattcctgtgagggattcaattgtgatccaacagcaagaaattctcctaaatatatctccaacagagtaaacaagagattaggaaacttgtccttcattcaattacacctggcaggtgaatgggagtggagcagtaagagatgctgcttccagtagttttctacctctcaatccttgctattcaaagtatggtccacagtccagcagctttggcatcacctgggaacttgatggaaatgcagataagttcaaattcccactactgatatactgaattagaaacatctgcccttcaagaagatccactggtgataatatgcatattaaagtttgagtagcaccgccattctatatcagcttgcaaaatgaaagcaagaagaaacaaaacaaagcattagccagtttggattttctgaagtgcactaaatgtcaaactcaagaaaaggtagtagaaaataaatttctcttcaaccaagtcattagtatggaatcatctactctgttttgaggcgacaccagccaataccagccacattttcggaatcatcattttctggtgaaataaactgacttgcataatttaataaattttggtgaataacaagacttactctcagataccaacatttcctagcttgcaagacagtagttatagaaggaaactaatagacatggtttaaaacaccttctaatgcaaagtagaagatttacaatgctgcttcattgtcaggttccagtgtcctccttttatccaacaaaatctaaagagttatctcattggaattttcagcttcagtgaaaattctgtgatgatctcaaatgttgctgcataaaatgtataattaatggagtgaagtggtttgtaaagaaacattttattagaacaagtgagggtaaatgaactaatagagttcaattctatgcttcaatttccaatataatatgcaaatatctactctgcaaaaccgtataaaacgactttctgaactattattctaggtttaatacagtgattagactgggtcatcatttctgcattgtcagaaactgtgctattttgcagtatctaattgttgttttatttcctttttaattattttattcactgtgttattattttggctttaacatcagacacattctttgatattaaaattgcatttgattagcttttaactgtctcagacatattaatacatgatgatgggttttaagtcaatgaatgtattcttctatgttatggcctatttcattgttctaattcgagtgtcaaaattgctatttatttgaggactgtcattatcaaatatttcagaatgtgagttgccattattcaaaggaataagtcaacagacatttacataacatgtaatagtaaaacgaaattattcatattataacgttttataatgtttggcttagaagacttgctacagatgttatagacaaacaaaaattgtatggttaatgcaacaggaacctggtttcagataggtgacatgacattttcaaagtctcacagcaattttgattgagctaagcctcaaccattggtcaatttctttagtcttttttttttaacactgaaatcaaccatgctatttctagcccccattttttaaacttggataatcaaaatgagtttaataaaacatcgtcaaccaaatatcacattatgcataataacacgtatcttgaaggttatagtaaatggaaagatgaatctggaaagctaagagaattagaggtcatggctggatgtaaaatcaccatggaaacagctttcatggccaatttgtggggatatgtcaaaaggcagtaacctgtgacttatttttttccaaagccctttctatgaaggttacaggctctatatctgctttcatgatgacatttgtctatgtttttgtaggattctattctgacaagcacaaaaccctgcaccaagttgaacctgtcctttgtgatgaggctgttgaacagaagagcagcgtagcagtctgtctattcttgctccacattcagctaaatgccaactccgatccctttgagatggtgaacaggctgaacccagggatcgtgtcatccctcagtatccagacttcttcagagaaccatgtggtgaaacttcttgattaaggtcgcaaaagaagagacaactatacattttgtgatgctgaagggaaatgtacaagagcactactgaagaagtccagccaaaaaaaaaaaaaaaaagcccagtagtattcttatcaagcctgtatatccagtttataggaaatataagagacagagacacatgttaaatggcaacagtagaatgtaatacacaaaatccagacttgaaaatgttataaaatatgcaaaaaagatttcttaagaataatattagaagaaaaatgagtttgtgggagaacttatagagtctttaaaaaatatattaattacagtgtatgaattcactttgtttcatgattcaaacaacaagctggttaaaagtttaagagaaaattccatcatgatattgactttgaatttttattagatttttcttgaaatctttttcactactttttattttctcacctttattcgggtataattgacaaaattgtatgtaagttgtacaacatgatgatttgatatgtgtacacattgtaaaataattaccacagtcaaattttttaacatattccttat

SEQ ID NO: 733882 - DNA, 603 bp, Homo sapiens
atgttgacagtcgctctcctagcccttctctgtgcctcagcctctggcaatgccattcaggccaggtcttcctcctatagtggagagtatggaagtggtggtggaaagcgattctctcattctggcaaccagttggacggccccatcaccgccctccgggtccgagtcaacacatactacatcgtaggtcttcaggtgcgctatggcaaggtgtggagcgactatgtgggtggtcgcaacggagacctggaggagatctttctgcaccctggggaatcagtgatccaggtttctgggaagtacaagtggtacctgaagaagctggtatttgtgacagacaagggccgctatctgtcttttgggaaagacagtggcacaagtttcaatgccgtccccttgcaccccaacaccgtgctccgcttcatcagtggccggtctggttctctcatcgatgccattggcctgcactgggatgtttaccccactagctgcagcagatgctgagcctcctctccttggcaggggcactgtgatgaggagtaagaactcccttatcactaacccccatccaaatggctcaataaaaaaatatggttaaggcta

SEQ ID NO: 733883 - DNA, 668 bp, Homo sapiens; identical to SEQ ID NO: 300990

SEQ ID NO: 733884 - DNA, 729 bp, Homo sapiens
  misc_feature (143)..(143): n is a, c, g, or t
  misc_feature (436)..(436): n is a, c, g, or t
  misc_feature (444)..(445): n is a, c, g, or t
  misc_feature (489)..(489): n is a, c, g, or t
  misc_feature (497)..(498): n is a, c, g, or t
  misc_feature (500)..(501): n is a, c, g, or t
  misc_feature (516)..(516): n is a, c, g, or t
  misc_feature (533)..(533): n is a, c, g, or t
  misc_feature (547)..(547): n is a, c, g, or t
  misc_feature (550)..(550): n is a, c, g, or t
  misc_feature (558)..(558): n is a, c, g, or t
  misc_feature (571)..(571): n is a, c, g, or t
  misc_feature (591)..(591): n is a, c, g, or t
  misc_feature (603)..(603): n is a, c, g, or t
  misc_feature (611)..(611): n is a, c, g, or t
  misc_feature (618)..(618): n is a, c, g, or t
  misc_feature (624)..(624): n is a, c, g, or t
  misc_feature (627)..(627): n is a, c, g, or t
  misc_feature (630)..(630): n is a, c, g, or t
  misc_feature (633)..(633): n is a, c, g, or t
  misc_feature (639)..(639): n is a, c, g, or t
  misc_feature (645)..(645): n is a, c, g, or t
  misc_feature (649)..(649): n is a, c, g, or t
gatcccagcatctcagagtgcagtcaagttccctcctgcagcctgccccctaggcagctcgagcatgccctgagctctctgaaagttgtcgccctggaatagggtcctgcagggtagaataaaaaggcccctgtggtcacttntcctgacacattttcaagtgatacaactgagtctcgagggacgtgtgttccccagctgatcgtgtcagcctcatgccccaggcctcatctttcatggaccaggccttgttccaggagtgggcgttgggtcctctgcttcctgtgctgtcccctggggaaggtcccaaggatgctgtcaggagatggaagagtcatgtggggtgggaacctggggtgtggttccagaaatgtttttggcaacaggagagacaggattgggccaacaaggactcagacgagttttattgactcanttctctgnntgatacggagccatgtcatgtgccacgacctggggtgggcacanggaggctnnannttcctgctgaacctngctgggcctatttgctnctagccacagaganagntgcccctnctgaacggccatncccagtgctccgtgcagganaggaacacccgnttgagagngtcccanccgacngcnttnttncatggntttatnaggnaaagacacccacccctcctggggtgtgaagacaaaacattgtccccctgaagggggaacccttggatattcccggggggg

SEQ ID NO: 733885 - DNA, 711 bp, Homo sapiens
  misc_feature (386)..(386): n is a, c, g, or t
  misc_feature (394)..(395): n is a, c, g, or t
  misc_feature (439)..(439): n is a, c, g, or t
  misc_feature (447)..(448): n is a, c, g, or t
  misc_feature (450)..(451): n is a, c, g, or t
  misc_feature (466)..(466): n is a, c, g, or t
  misc_feature (483)..(483): n is a, c, g, or t
  misc_feature (497)..(497): n is a, c, g, or t
  misc_feature (500)..(500): n is a, c, g, or t
  misc_feature (508)..(508): n is a, c, g, or t
  misc_feature (521)..(521): n is a, c, g, or t
  misc_feature (541)..(541): n is a, c, g, or t
  misc_feature (553)..(553): n is a, c, g, or t
  misc_feature (561)..(561): n is a, c, g, or t
  misc_feature (568)..(568): n is a, c, g, or t
  misc_feature (574)..(574): n is a, c, g, or t
  misc_feature (577)..(577): n is a, c, g, or t
  misc_feature (580)..(580): n is a, c, g, or t
  misc_feature (583)..(583): n is a, c, g, or t
  misc_feature (589)..(589): n is a, c, g, or t
  misc_feature (595)..(595): n is a, c, g, or t
  misc_feature (599)..(599): n is a, c, g, or t
gatcccagcatctcagagtgcagtcaagttccctcctgcagcctgccccctaggcagctcgagcatgccctgagctctctgaaagttgtcgccctggaatagggtcctgcagggtagaatagagtctcgagggacgtgtgttccccagctgatcgtgtcagcctcatgccccaggcctcatctttcatggaccaggccttgttccaggagtgggcgttgggtcctctgcttcctgtgctgtcccctggggaaggtcccaaggatgctgtcaggagatggaagagtcatgtggggtgggaacctggggtgtggttccagaaatgtttttggcaacaggagagacaggattgggccaacaaggactcagacgagttttattgactcanttctctgnntgatacggagccatgtcatgtgccacgacctggggtgggcacanggaggctnnannttcctgctgaacctngctgggcctatttgctnctagccacagaganagntgcccctnctgaacggccatncccagtgctccgtgcagganaggaacacccgnttgagagngtcccanccgacngcnttnttncatggntttatnaggnaaagatcacagcaggcacctcctggtggttgttaagatcagagccttttgtccccttgaaggggaaatccttatgcatcattccacgtggtcagtaaaccagaacccctgcc

SEQ ID NO: 733886 - DNA, 520 bp, Homo sapiens
  misc_feature (4)..(7): n is a, c, g, or t
  misc_feature (10)..(11): n is a, c, g, or t
atgnnnntgnnccaggggctgctgctgttgctgctgctgagcatgggcggggcatgggcatccagggagccgcttcggccatggtgccaccccatcaatgccatcctggctgtcgagaaggagggctgcccagtgtgcatcaccgtcaacaccaccatctgtgccggctactgccccaccatgatgcgcgtgctgcaggcggtcctgccgcccctgcctcaggtggtgtgcacctaccgtgatgtgcgcttcgagtccatccggctccctggctgcccgcgtggtgtggaccccgtggtctccttccctgtggctctcagctgtcgctgtggaccctgccgccgcagcacctctgactgtgggggtcccaaagaccaccccttgacctgtgaccacccccaactctcaggcctcctcttcctctaaagaccctccccgcagccttccaagtccatcccgactcctggagccctgacaccccgatcctcccacaataaaggcttctcaatccgcaaaaaga

SEQ ID NO: 733887 - DNA, 1768 bp, Homo sapiens
tgaaccagttgtttccgtcttgtcggtctgtcagggttggaaagtccaagccataggacccagtttcctttcttagcttacgttatctaccagagcaccgtgggctgttacttgccttgagttggaagcggttcgcatttataccggaatataaatagtttctggaaaggacactgacaacttcaaagcaaaatgaagctcttttggttgcttttcaccattgggttctgctgggctcagtattcctcaaatacacaacaaggacgaacatctattgttcatctgtttgaatggcgatgggttgatattgctcttgaatgtgagcgatatttagctcccaagggatttggaggggttcaggtctctccaccaaatgaaaatgttgccattcacaaccctttcagaccttggtgggaaagataccaaccagttagctataaattatgcacaagatctggaaatgaagatgaatttagaaacatggtgactagatgcaacaatgttggggttcgtatttatgtggatgctgtaattaatcatatgtgtggtaatgctgtgagtgcaggaacaagcagtacctgtggaagttacttcaaccctggaagtagggactttccagcagtcccatattctggatgggattttaatgatggtaaatgtaaaactggaagtggagatatcgagaactataatgatgctactcaggtcagagattgtcgtctgtctggtcttctcgatcttgcactggggaaggattatgtgcgttctaagattgccgaatatatgaaccatctcattgacattggtgttgcagggttcagaattgatgcttccaagcacatgtggcctggagacataaaggcaattttggacaaactgcataatctaaacagtaactggttcccggaaggtagtaaacctttcatttaccaggaggtaattgatctgggtggtgagccaattaaaagcagtgactactttggtaatggccgggtgacagaattcaagtatggtgcaaaactcggcacagttattcgcaagtggaatggagagaagatgtcttacttaaagaactgggagaaggttggggtttcatgccttctgacagagcgcttgtctttgtggataaccatgacaatcaacgaggacatggcgctggaggagcctctatacttaccttctgggatgctaggctgtacaaaatggcagttggatttatgcttgctcatccttatggatttacacgagtaatgtcaagctaccgttggccaagatattttgaaaatggaaaagatgttaatgattgggttgggccaccaaatgataatggagtaactaaagaagttactattaatccagacactacttgtggcaatgactgggtctgtgaacatcgatggcgccaaataaggaacatggttaatttccgcaatgtagtggatggccagccttttacaaactggtatgataatgggagcaaccaagtggcttttgggagaggaaacagaggattcattgttttcaacaatgatgactggacattttctttaactttgcaaactggtcttcctgctggcacatactgtgatgtcatttctggagataaaattaatggcaactgcacaggcattaaaatctacgtttctgatgatggcaaagctcatttttctattagtaactctgctgaagatccatttattgcaattcatgctgaatctaaattgtaaaatttaaaattaaatgcaaatccgcaaagcaataaaaaaat

SEQ ID NO: 733888 - DNA, 1654 bp, Homo sapiens
ggggggcggtgccgttgggaccacggcggccagagcggcaggatggcttccggcttcaagaagcccagcgctgcctccaccggccaaaagagaaaggtggcacctaagcccgagctcactgaggatcagaagcaagaagttcgggaagcatttgacctcttcgacgtggacggaagtgggaccatcgacgcgaaggagctgaaggtggccatgagagcgctgggcttcgaacccaggaaggaagagatgaagaaaatgatctccgaggtggacagggaaggcacggggaagatcagcttcaatgacttcctggccgtgatgacgcagaagatgtccgagaaggacaccaaagaagaaatcctgaaggccttcaggctctttgatgacgatgagaccgggaagatctcgttcaaaaacctgaagcgtgtggccaacgagctgggggagaacctcacggatgaggagctgcaggagatgatcgacgaagctgatcgggatggggacggcgaagtgaacgaggaggagttccttcggatcatgaagaagaccagcctttactgaagtcggttcagaagctaaagtgactctctgggttgcctgcttccattttgtgaaaccttagaggacagcggctgcctgtcccttcttcaccccctcacccccataatttgtctagatctatttccatatctctagttcaataatagaatttgaaagatgcttgtaatgtgagttttgggttttaattctcaagagccaacctggagcacatgaggttaaacaaagggccctgaagtttgagtgcgccctccatttgccctgtgctgaacttgctgttcatctgttgatctggaggcaggacagcttctgggacacacaaaaatgtggttccctttgtcacttctttggtggtcttaaattatcttgcttcatatatcattccttaaattccagtcattgttccagcataatgagatggaatctgccagtagatttgcctagcctgtccacttagctgaataccagtttgaaggaaaacagggtggccacttacaaacttacggagctcaggacagatattcttataaagaatagacttgcttgggtggtagtacgttgtgcaattttgactattcactggctttatacctgcaaatgattcttcgttcatgtgtaaattgtccaccatgggtttatctagggctagtatgtatacctgggctacagaataaaaataaaatctaatactggcccaagcaaagtataatttgcttaagaggttacgctaacaaacgattttgagtaaatatttacaaatgtaggatcttagtttaggaaattataacaaataccttaatataacattttaagctacttatagtccttggaaatagcaacaaatatcttagttattggactattataaccttagtcatcttattactgcttgattatgagacactctccctgctaatccttagaacatcttggttcttggtacttgacttttagcccctctgacatatagttgatgtcagagtgtctggcatttcagtagtgctctattttacaaatcccagtaaactgctccactgtggcttgtttatgtgttaatactgcttgttttctgttataaattattttttgctttgga

SEQ ID NO: 733889 - DNA, 919 bp, Homo sapiens
  misc_feature (29)..(29): n is a, c, g, or t
  misc_feature (889)..(889): n is a, c, g, or t
  misc_feature (891)..(891): n is a, c, g, or t
  misc_feature (893)..(893): n is a, c, g, or t
ggaagcagggagagagaactggccagggnataaaaagggcccacaagagaccggctctaggatcccaaggcccaactccccgaaccactcagggtcctgtggacagctcacctagtggcaatggctccaggctcccggacgtccctgctcctggcttttgccctgctctgcctgccctggcttcaagaggctggtgccgtccaaaccgttccgttatccaggctttttgaccacgctatgctccaagcccatcgcgcgcaccagctggccattgacacctaccaggagtttgaagaaacctatatcccaaaggaccagaagtattcattcctgcatgactcccagacctccttctgcttctcagactctattccgacaccctccaacatggaggaaacgcaacagaaatccaatctagagctgctccgcatctccctgctgctcatcgagtcgtggctggagcccgtgcggttcctcaggagtatgttcgccaacaacctggtgtatgacacctcggacagcgatgactatcacctcctaaaggacctagaggaaggcatccaaacgctgatggggaggctggaagacggcagccgccggactgggcagatcctcaagcagacctacagcaagtttgacacaaactcgcacaaccatgacgcactgctcaagaactacgggctgctctactgcttcaggaaggacatggacaaggtcgagacattcctgcgcatggtgcagtgccgctctgtggagggcagctgtggcttctaggtgcccgagtagcatcctgtgacccctccccagtgcctctcctggccctgaaggtgccactccagtgcccaccagccttgtcctaataaaattaagttgtatcatttcaaaaaanancncaaaacaacacaaaacacaaacatcc

SEQ ID NO: 733890 - DNA, 299 bp, Homo sapiens
  misc_feature (293)..(294): n is a, c, g, or t
gcccgagttagaggggctgcaagaagaaggtcgtccacatatgaagatgactgggagacaggtttaaggaagtgaggtttcgggctagagcttgtccaaagaaatgagggctatccctgaagccctgagggaggacagtccatgtgagttgttgtgactggagggtgtcagggtcagtccaggtgaaagcaaataggtgcccgagtagcatcctgtgacccctccccagtgcctctcctggccctgaaggtgccactccatgtgcccaccatgcccggtgtaccggagctcgnnaattc

SEQ ID NO: 733891 - DNA, 651 bp, Homo sapiens
  misc_feature (19)..(19): n is a, c, g, or t
  misc_feature (183)..(183): n is a, c, g, or t
caggtctgtgcgtactagngatgtcagtccgacgtccttgtctggtttgcctgtctgctgcctggttcaagagctggtgccgtccaaaccgttccgttatccaggctttttgaccacgctatgctccaagcccatcgcgcgcaccagctggccattgacacctaccagtgagttttgaagaanacctatatcccaaaggaccagaagtattcattcctgcatgactcccagacctccttctgcttctcagactctattccgacaccctccaacatggaggaaacgcaacagaaatccaatctagagctgctccgcatctccctgctgctcatcgagtcgtggctggagcccgtgcggttcctcaggagtatgttcgccaacaacctggtgtatgacacctcggacagcaacgtctatgacctcctaaaagtacctaaaggcagggctccacaagctgattgcgccgctgtgccgattgcaacccccgtgactgggccgatctttcaaacagacctacaacaagttcgacaccaacccaacaacactgacgccccaaatccaaccaacgggcttatccgctaacgacggacacggccaggccactccccagcaccggccacgccgcacgccgccggcaccacagcgacccgc

SEQ ID NO: 733892 - DNA, 802 bp, Homo sapiens
  misc_feature (19)..(19): n is a, c, g, or t
  misc_feature (772)..(772): n is a, c, g, or t
  misc_feature (774)..(774): n is a, c, g, or t
  misc_feature (776)..(776): n is a, c, g, or t
caggtctgtgcgtactagngatgtcagtccgacgtccttgtctggtttgcctgtctgctgcctggttcaagagctggtgccgtccaaaccgttccgttatccaggctttttgaccacgctatgctccaagcccatcgcgcgcaccagctggccattgacacctaccaggagtttgaagaaacctatatcccaaaggaccagaagtattcattcctgcatgactcccagacctccttctgcttctcagactctattccgacaccctccaacatggaggaaacgcaacagaaatccaatctagagctgctccgcatctccctgctgctcatcgagtcgtggctggagcccgtgcggttcctcaggagtatgttcgccaacaacctggtgtatgacacctcggacagcgatgactatcacctcctaaaggacctagaggaaggcatccaaacgctgatggggaggctggaagacggcagccgccggactgggcagatcctcaagcagacctacagcaagtttgacacaaactcgcacaaccatgacgcactgctcaagaactacgggctgctctactgcttcaggaaggacatggacaaggtcgagacattcctgcgcatggtgcagtgccgctctgtggagggcagctgtggcttctaggtgcccgagtagcatcctgtgacccctccccagtgcctctcctggccctgaaggtgccactccagtgcccaccagccttgtcctaataaaattaagttgtatcatttcaaaaaanancncaaaacaacacaaaacacaaacatcc

SEQ ID NO: 733893 - DNA, 919 bp, Homo sapiens
  misc_feature (29)..(29): n is a, c, g, or t
  misc_feature (270)..(270): n is a, c, g, or t
  misc_feature (889)..(889): n is a, c, g, or t
  misc_feature (891)..(891): n is a, c, g, or t
  misc_feature (893)..(893): n is a, c, g, or t
ggaagcagggagagagaactggccagggnataaaaagggcccacaagagaccggctctaggatcccaaggcccaactccccgaaccactcagggtcctgtggacagctcacctagtggcaatggctccaggctcccggacgtccctgctcctggcttttgccctgctctgcctgccctggcttcaagagggcagtgccttcccaaccattcccttatccaggctttttgacaacgctatgctccgcgcccatcgtctgcaccagctggcntttgacacctaccaggagtttgaagaaacctatatcccaaaggaccagaagtattcattcctgcatgactcccagacctccttctgcttctcagactctattccgacaccctccaacatggaggaaacgcaacagaaatccaatctagagctgctccgcatctccctgctgctcatcgagtcgtggctggagcccgtgcggttcctcaggagtatgttcgccaacaacctggtgtatgacacctcggacagcgatgactatcacctcctaaaggacctagaggaaggcatccaaacgctgatggggaggctggaagacggcagccgccggactgggcagatcctcaagcagacctacagcaagtttgacacaaactcgcacaaccatgacgcactgctcaagaactacgggctgctctactgcttcaggaaggacatggacaaggtcgagacattcctgcgcatggtgcagtgccgctctgtggagggcagctgtggcttctaggtgcccgagtagcatcctgtgacccctccccagtgcctctcctggccctgaaggtgccactccagtgcccaccagccttgtcctaataaaattaagttgtatcatttcaaaaaanancncaaaacaacacaaaacacaaacatcc

SEQ ID NO: 733894 - DNA, 863 bp, Homo sapiens
  misc_feature (10)..(10): n is a, c, g, or t
  misc_feature (833)..(833): n is a, c, g, or t
  misc_feature (835)..(835): n is a, c, g, or t
  misc_feature (837)..(837): n is a, c, g, or t
ccggaggcgnttgaatggccccctcgaaccactcagggtcctgtggacagctcacctagtggcaatggctccaggctcccggacgtccctgctcctggcttttgccctgctctgcctgccctggcttcaagaggctggtgccgtccaaaccgttccgttatccaggctttttgaccacgctatgctccaagcccatcgcgcgcaccagctggccattgacacctaccaggagtttgaagaaacctatatcccaaaggaccagaagtattcattcctgcatgactcccagacctccttctgcttctcagactctattccgacaccctccaacatggaggaaacgcaacagaaatccaatctagagctgctccgcatctccctgctgctcatcgagtcgtggctggagcccgtgcggttcctcaggagtatgttcgccaacaacctggtgtatgacacctcggacagcgatgactatcacctcctaaaggacctagaggaaggcatccaaacgctgatggggaggctggaagacggcagccgccggactgggcagatcctcaagcagacctacagcaagtttgacacaaactcgcacaaccatgacgcactgctcaagaactacgggctgctctactgcttcaggaaggacatggacaaggtcgagacattcctgcgcatggtgcagtgccgctctgtggagggcagctgtggcttctaggtgcccgagtagcatcctgtgacccctccccagtgcctctcctggccctgaaggtgccactccagtgcccaccagccttgtcctaataaaattaagttgtatcatttcaaaaaanancncaaaacaacacaaaacacaaacatcc

SEQ ID NO: 733895 - DNA, 863 bp, Homo sapiens
  misc_feature (10)..(10): n is a, c, g, or t
  misc_feature (214)..(214): n is a, c, g, or t
  misc_feature (833)..(833): n is a, c, g, or t
  misc_feature (835)..(835): n is a, c, g, or t
  misc_feature (837)..(837): n is a, c, g, or t
ccggaggcgnttgaatggccccctcgaaccactcagggtcctgtggacagctcacctagtggcaatggctccaggctcccggacgtccctgctcctggcttttgccctgctctgcctgccctggcttcaagagggcagtgccttcccaaccattcccttatccaggctttttgacaacgctatgctccgcgcccatcgtctgcaccagctggcntttgacacctaccaggagtttgaagaaacctatatcccaaaggaccagaagtattcattcctgcatgactcccagacctccttctgcttctcagactctattccgacaccctccaacatggaggaaacgcaacagaaatccaatctagagctgctccgcatctccctgctgctcatcgagtcgtggctggagcccgtgcggttcctcaggagtatgttcgccaacaacctggtgtatgacacctcggacagcgatgactatcacctcctaaaggacctagaggaaggcatccaaacgctgatggggaggctggaagacggcagccgccggactgggcagatcctcaagcagacctacagcaagtttgacacaaactcgcacaaccatgacgcactgctcaagaactacgggctgctctactgcttcaggaaggacatggacaaggtcgagacattcctgcgcatggtgcagtgccgctctgtggagggcagctgtggcttctaggtgcccgagtagcatcctgtgacccctccccagtgcctctcctggccctgaaggtgccactccagtgcccaccagccttgtcctaataaaattaagttgtatcatttcaaaaaanancncaaaacaacacaaaacacaaacatcc

SEQ ID NO: 733896 - DNA, 837 bp, Homo sapiens
  misc_feature (29)..(29): n is a, c, g, or t
  misc_feature (691)..(691): n is a, c, g, or t
  misc_feature (693)..(693): n is a, c, g, or t
  misc_feature (732)..(732): n is a, c, g, or t
  misc_feature (735)..(735): n is a, c, g, or t
  misc_feature (739)..(739): n is a, c, g, or t
  misc_feature (741)..(744): n is a, c, g, or t
  misc_feature (767)..(771): n is a, c, g, or t
  misc_feature (802)..(802): n is a, c, g, or t
ggaagcagggagagagaactggccagggnataaaaagggcccacaagagaccggctctaggatcccaaggcccaactccccgaaccactcagggtcctgtggacagctcacctagtggcaatggctccaggctcccggacgtccctgctcctggcttttgccctgctctgcctgccctggcttcaagaggctggtgccgtccaaaccgttccgttatccaggctttttgaccacgctatgctccaagcccatcgcgcgcaccagctggccattgacacctaccaggagtttgaagaaacctatatcccaaaggaccagaagtattcattcctgcatgactcccagacctccttctgcttctcagactctattccgacaccctccaacatggaggaaacgcaacagaaatccaatctagagctgctccgcatctccctgctgctcatcgagtcgtggctggagcccgtgcggttcctcaggagtatgttcgccaacaacctggtgtatgacacctcggacagcgatgactatcacctcctaaaggacctagaggaaggcatccaaacgctgatggggaggctggaagacggcagccgccggactgggcagatcctcaagcagacctacagcaagttacacaaactacagaaacaaccaataaacgcacagctacaagaacaacgagacatgntnaaacagctatacgaggaaagaaacaatagaaacaaaggncanaaanannnnagacagacaatagagaagaaagnnnnnctctgtggaagaagacaagaatgtggcttcnaggtagacaccaaagataagacaaaacaaaaaccc

SEQ ID NO: 733897 - DNA, 827 bp, Homo sapiens
  misc_feature (44)..(44): n is a, c, g, or t
  misc_feature (51)..(51): n is a, c, g, or t
  misc_feature (797)..(797): n is a, c, g, or t
  misc_feature (799)..(799): n is a, c, g, or t
  misc_feature (801)..(801): n is a, c, g, or t
cacccaggcgcacttcttgccctccggtttctccccaggctccnggacgtncctgctcctggcttttgccctgctctgcctgccctggcttcaagaggctggtgccgtccaaaccgttccgttatccaggctttttgaccacgctatgctccaagcccatcgcgcgcaccagctggccattgacacctaccaggagtttgaagaaacctatatcccaaaggaccagaagtattcattcctgcatgactcccagacctccttctgcttctcagactctattccgacaccctccaacatggaggaaacgcaacagaaatccaatctagagctgctccgcatctccctgctgctcatcgagtcgtggctggagcccgtgcggttcctcaggagtatgttcgccaacaacctggtgtatgacacctcggacagcgatgactatcacctcctaaaggacctagaggaaggcatccaaacgctgatggggaggctggaagacggcagccgccggactgggcagatcctcaagcagacctacagcaagtttgacacaaactcgcacaaccatgacgcactgctcaagaactacgggctgctctactgcttcaggaaggacatggacaaggtcgagacattcctgcgcatggtgcagtgccgctctgtggagggcagctgtggcttctaggtgcccgagtagcatcctgtgacccctccccagtgcctctcctggccctgaaggtgccactccagtgcccaccagccttgtcctaataaaattaagttgtatcatttcaaaaaanancncaaaacaacacaaaacacaaacatcc

SEQ ID NO: 733898 - DNA, 745 bp, Homo sapiens
  misc_feature (44)..(44): n is a, c, g, or t
  misc_feature (51)..(51): n is a, c, g, or t
  misc_feature (599)..(599): n is a, c, g, or t
  misc_feature (601)..(601): n is a, c, g, or t
  misc_feature (640)..(640): n is a, c, g, or t
  misc_feature (643)..(643): n is a, c, g, or t
  misc_feature (647)..(647): n is a, c, g, or t
  misc_feature (649)..(652): n is a, c, g, or t
  misc_feature (675)..(679): n is a, c, g, or t
  misc_feature (710)..(710): n is a, c, g, or t
cacccaggcgcacttcttgccctccggtttctccccaggctccnggacgtncctgctcctggcttttgccctgctctgcctgccctggcttcaagaggctggtgccgtccaaaccgttccgttatccaggctttttgaccacgctatgctccaagcccatcgcgcgcaccagctggccattgacacctaccaggagtttgaagaaacctatatcccaaaggaccagaagtattcattcctgcatgactcccagacctccttctgcttctcagactctattccgacaccctccaacatggaggaaacgcaacagaaatccaatctagagctgctccgcatctccctgctgctcatcgagtcgtggctggagcccgtgcggttcctcaggagtatgttcgccaacaacctggtgtatgacacctcggacagcgatgactatcacctcctaaaggacctagaggaaggcatccaaacgctgatggggaggctggaagacggcagccgccggactgggcagatcctcaagcagacctacagcaagttacacaaactacagaaacaaccaataaacgcacagctacaagaacaacgagacatgntnaaacagctatacgaggaaagaaacaatagaaacaaaggncanaaanannnnagacagacaatagagaagaaagnnnnnctctgtggaagaagacaagaatgtggcttcnaggtagacaccaaagataagacaaaacaaaaaccc

SEQ ID NO: 733899 - DNA, 781 bp, Homo sapiens
  misc_feature (10)..(10): n is a, c, g, or t
  misc_feature (635)..(635): n is a, c, g, or t
  misc_feature (637)..(637): n is a, c, g, or t
  misc_feature (676)..(676): n is a, c, g, or t
  misc_feature (679)..(679): n is a, c, g, or t
  misc_feature (683)..(683): n is a, c, g, or t
  misc_feature (685)..(688): n is a, c, g, or t
  misc_feature (711)..(715): n is a, c, g, or t
  misc_feature (746)..(746): n is a, c, g, or t
ccggaggcgnttgaatggccccctcgaaccactcagggtcctgtggacagctcacctagtggcaatggctccaggctcccggacgtccctgctcctggcttttgccctgctctgcctgccctggcttcaagaggctggtgccgtccaaaccgttccgttatccaggctttttgaccacgctatgctccaagcccatcgcgcgcaccagctggccattgacacctaccaggagtttgaagaaacctatatcccaaaggaccagaagtattcattcctgcatgactcccagacctccttctgcttctcagactctattccgacaccctccaacatggaggaaacgcaacagaaatccaatctagagctgctccgcatctccctgctgctcatcgagtcgtggctggagcccgtgcggttcctcaggagtatgttcgccaacaacctggtgtatgacacctcggacagcgatgactatcacctcctaaaggacctagaggaaggcatccaaacgctgatggggaggctggaagacggcagccgccggactgggcagatcctcaagcagacctacagcaagttacacaaactacagaaacaaccaataaacgcacagctacaagaacaacgagacatgntnaaacagctatacgaggaaagaaacaatagaaacaaaggncanaaanannnnagacagacaatagagaagaaagnnnnnctctgtggaagaagacaagaatgtggcttcnaggtagacaccaaagataagacaaaacaaaaaccc

SEQ ID NO: 733900 - DNA, 866 bp, Homo sapiens
  misc_feature (10)..(10): n is a, c, g, or t
  misc_feature (244)..(244): n is a, c, g, or t
  misc_feature (836)..(836): n is a, c, g, or t
  misc_feature (838)..(838): n is a, c, g, or t
  misc_feature (840)..(840): n is a, c, g, or t
ccggaggcgnttgaatggccccctcgaaccactcagggtcctgtggacagctcacctagtggcaatggctccaggctcccggacgtccctgctcctggcttttgccctgctctgcctgccctggcttcaagaggctggtgccgtccaaaccgttccgttatccaggctttttgaccacgctatgctccaagcccatcgcgcgcaccagctggccattgacacctaccagtgagttttgaagaanacctatatcccaaaggaccagaagtattcattcctgcatgactcccagacctccttctgcttctcagactctattccgacaccctccaacatggaggaaacgcaacagaaatccaatctagagctgctccgcatctccctgctgctcatcgagtcgtggctggagcccgtgcggttcctcaggagtatgttcgccaacaacctggtgtatgacacctcggacagcgatgactatcacctcctaaaggacctagaggaaggcatccaaacgctgatggggaggctggaagacggcagccgccggactgggcagatcctcaagcagacctacagcaagtttgacacaaactcgcacaaccatgacgcactgctcaagaactacgggctgctctactgcttcaggaaggacatggacaaggtcgagacattcctgcgcatggtgcagtgccgctctgtggagggcagctgtggcttctaggtgcccgagtagcatcctgtgacccctccccagtgcctctcctggccctgaaggtgccactccagtgcccaccagccttgtcctaataaaattaagttgtatcatttcaaaaaanancncaaaacaacacaaaacacaaacatcc

SEQ ID NO: 733901 - DNA, 784 bp, Homo sapiens
  misc_feature (10)..(10): n is a, c, g, or t
  misc_feature (244)..(244): n is a, c, g, or t
  misc_feature (638)..(638): n is a, c, g, or t
  misc_feature (640)..(640): n is a, c, g, or t
  misc_feature (679)..(679): n is a, c, g, or t
  misc_feature (682)..(682): n is a, c, g, or t
  misc_feature (686)..(686): n is a, c, g, or t
  misc_feature (688)..(691): n is a, c, g, or t
  misc_feature (714)..(718): n is a, c, g, or t
  misc_feature (749)..(749): n is a, c, g, or t
ccggaggcgnttgaatggccccctcgaaccactcagggtcctgtggacagctcacctagtggcaatggctccaggctcccggacgtccctgctcctggcttttgccctgctctgcctgccctggcttcaagaggctggtgccgtccaaaccgttccgttatccaggctttttgaccacgctatgctccaagcccatcgcgcgcaccagctggccattgacacctaccagtgagttttgaagaanacctatatcccaaaggaccagaagtattcattcctgcatgactcccagacctccttctgcttctcagactctattccgacaccctccaacatggaggaaacgcaacagaaatccaatctagagctgctccgcatctccctgctgctcatcgagtcgtggctggagcccgtgcggttcctcaggagtatgttcgccaacaacctggtgtatgacacctcggacagcgatgactatcacctcctaaaggacctagaggaaggcatccaaacgctgatggggaggctggaagacggcagccgccggactgggcagatcctcaagcagacctacagcaagttacacaaactacagaaacaaccaataaacgcacagctacaagaacaacgagacatgntnaaacagctatacgaggaaagaaacaatagaaacaaaggncanaaanannnnagacagacaatagagaagaaagnnnnnctctgtggaagaagacaagaatgtggcttcnaggtagacaccaaagataagacaaaacaaaaaccc

SEQ ID NO: 733902 - DNA, 863 bp, Homo sapiens
  misc_feature (10)..(10): n is a, c, g, or t
  misc_feature (228)..(228): n is a, c, g, or t
  misc_feature (240)..(240): n is a, c, g, or t
  misc_feature (833)..(833): n is a, c, g, or t
  misc_feature (835)..(835): n is a, c, g, or t
  misc_feature (837)..(837): n is a, c, g, or t
ccggaggcgnttgaatggccccctcgaaccactcagggtcctgtggacagctcacctagtggcaatggctccaggctcccggacgtccctgctcctggcttttgccctgctctgcctgccctggcttcaagaggctggtgccgtccaaaccgttccgttatccaggctttttgaccacgctatgctccaagcccatcgcgcgcaccagctggccattcccccctcccnggcgtttgcagncccctctctccccccggccccgccgtcttcattcctgcatgactcccagacctccttctgcttctcagactctattccgacaccctccaacatggaggaaacgcaacagaaatccaatctagagctgctccgcatctccctgctgctcatcgagtcgtggctggagcccgtgcggttcctcaggagtatgttcgccaacaacctggtgtatgacacctcggacagcgatgactatcacctcctaaaggacctagaggaaggcatccaaacgctgatggggaggctggaagacggcagccgccggactgggcagatcctcaagcagacctacagcaagtttgacacaaactcgcacaaccatgacgcactgctcaagaactacgggctgctctactgcttcaggaaggacatggacaaggtcgagacattcctgcgcatggtgcagtgccgctctgtggagggcagctgtggcttctaggtgcccgagtagcatcctgtgacccctccccagtgcctctcctggccctgaaggtgccactccagtgcccaccagccttgtcctaataaaattaagttgtatcatttcaaaaaanancncaaaacaacacaaaacacaaacatcc

SEQ ID NO: 733903 - DNA, 771 bp, Homo sapiens
  misc_feature (10)..(10): n is a, c, g, or t
  misc_feature (214)..(214): n is a, c, g, or t
  misc_feature (532)..(532): n is a, c, g, or t
  misc_feature (539)..(539): n is a, c, g, or t
  misc_feature (547)..(547): n is a, c, g, or t
  misc_feature (552)..(554): n is a, c, g, or t
  misc_feature (565)..(566): n is a, c, g, or t
  misc_feature (568)..(568): n is a, c, g, or t
  misc_feature (571)..(571): n is a, c, g, or t
  misc_feature (580)..(580): n is a, c, g, or t
  misc_feature (582)..(582): n is a, c, g, or t
  misc_feature (589)..(589): n is a, c, g, or t
  misc_feature (593)..(593): n is a, c, g, or t
  misc_feature (597)..(597): n is a, c, g, or t
  misc_feature (599)..(601): n is a, c, g, or t
  misc_feature (605)..(605): n is a, c, g, or t
  misc_feature (608)..(608): n is a, c, g, or t
  misc_feature (610)..(610): n is a, c, g, or t
  misc_feature (625)..(625): n is a, c, g, or t
  misc_feature (636)..(636): n is a, c, g, or t
  misc_feature (639)..(639): n is a, c, g, or t
  misc_feature (654)..(654): n is a, c, g, or t
  misc_feature (672)..(672): n is a, c, g, or t
  misc_feature (681)..(681): n is a, c, g, or t
  misc_feature (686)..(686): n is a, c, g, or t
  misc_feature (708)..(708): n is a, c, g, or t
  misc_feature (729)..(729): n is a, c, g, or t
  misc_feature (731)..(731): n is a, c, g, or t
  misc_feature (736)..(736): n is a, c, g, or t
  misc_feature (738)..(738): n is a, c, g, or t
  misc_feature (740)..(740): n is a, c, g, or t
  misc_feature (742)..(744): n is a, c, g, or t
  misc_feature (746)..(746): n is a, c, g, or t
  misc_feature (748)..(748): n is a, c, g, or t
  misc_feature (752)..(752): n is a, c, g, or t
  misc_feature (754)..(754): n is a, c, g, or t
  misc_feature (756)..(756): n is a, c, g, or t
ccggaggcgnttgaatggccccctcgaaccactcagggtcctgtggacagctcacctagtggcaatggctccaggctcccggacgtccctgctcctggcttttgccctgctctgcctgccctggcttcaagagggcagtgccttcccaaccattcccttatccaggctttttgacaacgctatgctccgcgcccatcgtctgcaccagctggcntttgacacctaccaggagtttgaagaaacctatatcccaaaggaccagaagtattcattcctgcatgactcccagacctccttctgcttctcagactctattccgacaccctccaacatggaggaaacgcaacagaaatccaatctagagctgctccgcatctccctgctgctcatcgagtcgtggctggagcccgtgcggttcctcaggagtatgttcgccaacaacctggtgtatgacacctcggacagcgatgactatcacctcctaaaggacctagaggaaggcatccaaacgctgatgggggtgagggtggcnccagggntccccaancctgnnnccccactggcnncnagngctggggananaaacacngctncccncnnnttancantnaggcgctgacccaanagaactcaccntantcttcatttcccctngtgaatcctccaggcctntctctacancctgnaggggagggaggaaaatggatnaatgagagagggagggaacantnccaancncntnnncncncccncncntccttcactttgcag

SEQ ID NO: 733904 - DNA, 781 bp, Homo sapiens
  misc_feature (10)..(10): n is a, c, g, or t
  misc_feature (214)..(214): n is a, c, g, or t
  misc_feature (635)..(635): n is a, c, g, or t
  misc_feature (637)..(637): n is a, c, g, or t
  misc_feature (676)..(676): n is a, c, g, or t
  misc_feature (679)..(679): n is a, c, g, or t
  misc_feature (683)..(683): n is a, c, g, or t
  misc_feature (685)..(688): n is a, c, g, or t
  misc_feature (711)..(715): n is a, c, g, or t
  misc_feature (746)..(746): n is a, c, g, or t
ccggaggcgnttgaatggccccctcgaaccactcagggtcctgtggacagctcacctagtggcaatggctccaggctcccggacgtccctgctcctggcttttgccctgctctgcctgccctggcttcaagagggcagtgccttcccaaccattcccttatccaggctttttgacaacgctatgctccgcgcccatcgtctgcaccagctggcntttgacacctaccaggagtttgaagaaacctatatcccaaaggaccagaagtattcattcctgcatgactcccagacctccttctgcttctcagactctattccgacaccctccaacatggaggaaacgcaacagaaatccaatctagagctgctccgcatctccctgctgctcatcgagtcgtggctggagcccgtgcggttcctcaggagtatgttcgccaacaacctggtgtatgacacctcggacagcgatgactatcacctcctaaaggacctagaggaaggcatccaaacgctgatggggaggctggaagacggcagccgccggactgggcagatcctcaagcagacctacagcaagttacacaaactacagaaacaaccaataaacgcacagctacaagaacaacgagacatgntnaaacagctatacgaggaaagaaacaatagaaacaaaggncanaaanannnnagacagacaatagagaagaaagnnnnnctctgtggaagaagacaagaatgtggcttcnaggtagacaccaaagataagacaaaacaaaaaccc

SEQ ID NO: 733905 - DNA, 495 bp, Homo sapiens
  misc_feature (465)..(465): n is a, c, g, or t
  misc_feature (467)..(467): n is a, c, g, or t
  misc_feature (469)..(469): n is a, c, g, or t
tcgagcggccgcccgggcaggtcgagtcgtggctggagcccgtgcggttcctcaggagtatgttcgccaacaacctggtgtatgacacctcggacagcgatgactatcacctcctaaaggacctagaggaaggcatccaaacgctgatggggaggctggaagacggcagccgccggactgggcagatcctcaagcagacctacagcaagtttgacacaaactcgcacaaccatgacgcactgctcaagaactacgggctgctctactgcttcaggaaggacatggacaaggtcgagacattcctgcgcatggtgcagtgccgctctgtggagggcagctgtggcttctaggtgcccgagtagcatcctgtgacccctccccagtgcctctcctggccctgaaggtgccactccagtgcccaccagccttgtcctaataaaattaagttgtatcatttcaaaaaanancncaaaacaacacaaaacacaaacatcc

SEQ ID NO: 733906 - DNA, 413 bp, Homo sapiens
  misc_feature (267)..(267): n is a, c, g, or t
  misc_feature (269)..(269): n is a, c, g, or t
  misc_feature (308)..(308): n is a, c, g, or t
  misc_feature (311)..(311): n is a, c, g, or t
  misc_feature (315)..(315): n is a, c, g, or t
  misc_feature (317)..(320): n is a, c, g, or t
  misc_feature (343)..(347): n is a, c, g, or t
  misc_feature (378)..(378): n is a, c, g, or t
tcgagcggccgcccgggcaggtcgagtcgtggctggagcccgtgcggttcctcaggagtatgttcgccaacaacctggtgtatgacacctcggacagcgatgactatcacctcctaaaggacctagaggaaggcatccaaacgctgatggggaggctggaagacggcagccgccggactgggcagatcctcaagcagacctacagcaagttacacaaactacagaaacaaccaataaacgcacagctacaagaacaacgagacatgntnaaacagctatacgaggaaagaaacaatagaaacaaaggncanaaanannnnagacagacaatagagaagaaagnnnnnctctgtggaagaagacaagaatgtggcttcnaggtagacaccaaagataagacaaaacaaaaaccc

SEQ ID NO: 733907 - DNA, 720 bp, Homo sapiens
  misc_feature (19)..(19): n is a, c, g, or t
  misc_feature (574)..(574): n is a, c, g, or t
  misc_feature (576)..(576): n is a, c, g, or t
  misc_feature (615)..(615): n is a, c, g, or t
  misc_feature (618)..(618): n is a, c, g, or t
  misc_feature (622)..(622): n is a, c, g, or t
  misc_feature (624)..(627): n is a, c, g, or t
  misc_feature (650)..(654): n is a, c, g, or t
  misc_feature (685)..(685): n is a, c, g, or t
caggtctgtgcgtactagngatgtcagtccgacgtccttgtctggtttgcctgtctgctgcctggttcaagagctggtgccgtccaaaccgttccgttatccaggctttttgaccacgctatgctccaagcccatcgcgcgcaccagctggccattgacacctaccaggagtttgaagaaacctatatcccaaaggaccagaagtattcattcctgcatgactcccagacctccttctgcttctcagactctattccgacaccctccaacatggaggaaacgcaacagaaatccaatctagagctgctccgcatctccctgctgctcatcgagtcgtggctggagcccgtgcggttcctcaggagtatgttcgccaacaacctggtgtatgacacctcggacagcgatgactatcacctcctaaaggacctagaggaaggcatccaaacgctgatggggaggctggaagacggcagccgccggactgggcagatcctcaagcagacctacagcaagttacacaaactacagaaacaaccaataaacgcacagctacaagaacaacgagacatgntnaaacagctatacgaggaaagaaacaatagaaacaaaggncanaaanannnnagacagacaatagagaagaaagnnnnnctctgtggaagaagacaagaatgtggcttcnaggtagacaccaaagataagacaaaacaaaaaccc

SEQ ID NO: 733908 - DNA, 805 bp, Homo sapiens
  misc_feature (19)..(19): n is a, c, g, or t
  misc_feature (183)..(183): n is a, c, g, or t
  misc_feature (775)..(775): n is a, c, g, or t
  misc_feature (777)..(777): n is a, c, g, or t
  misc_feature (779)..(779): n is a, c, g, or t
caggtctgtgcgtactagngatgtcagtccgacgtccttgtctggtttgcctgtctgctgcctggttcaagagctggtgccgtccaaaccgttccgttatccaggctttttgaccacgctatgctccaagcccatcgcgcgcaccagctggccattgacacctaccagtgagttttgaagaanacctatatcccaaaggaccagaagtattcattcctgcatgactcccagacctccttctgcttctcagactctattccgacaccctccaacatggaggaaacgcaacagaaatccaatctagagctgctccgcatctccctgctgctcatcgagtcgtggctggagcccgtgcggttcctcaggagtatgttcgccaacaacctggtgtatgacacctcggacagcgatgactatcacctcctaaaggacctagaggaaggcatccaaacgctgatggggaggctggaagacggcagccgccggactgggcagatcctcaagcagacctacagcaagtttgacacaaactcgcacaaccatgacgcactgctcaagaactacgggctgctctactgcttcaggaaggacatggacaaggtcgagacattcctgcgcatggtgcagtgccgctctgtggagggcagctgtggcttctaggtgcccgagtagcatcctgtgacccctccccagtgcctctcctggccctgaaggtgccactccagtgcccaccagccttgtcctaataaaattaagttgtatcatttcaaaaaanancncaaaacaacacaaaacacaaacatcc

SEQ ID NO: 733909 - DNA, 723 bp, Homo sapiens
  misc_feature (19)..(19): n is a, c, g, or t
  misc_feature (183)..(183): n is a, c, g, or t
  misc_feature (577)..(577): n is a, c, g, or t
  misc_feature (579)..(579): n is a, c, g, or t
  misc_feature (618)..(618): n is a, c, g, or t
  misc_feature (621)..(621): n is a, c, g, or t
  misc_feature (625)..(625): n is a, c, g, or t
  misc_feature (627)..(630): n is a, c, g, or t
  misc_feature (653)..(657): n is a, c, g, or t
  misc_feature (688)..(688): n is a, c, g, or t
caggtctgtgcgtactagngatgtcagtccgacgtccttgtctggtttgcctgtctgctgcctggttcaagagctggtgccgtccaaaccgttccgttatccaggctttttgaccacgctatgctccaagcccatcgcgcgcaccagctggccattgacacctaccagtgagttttgaagaanacctatatcccaaaggaccagaagtattcattcctgcatgactcccagacctccttctgcttctcagactctattccgacaccctccaacatggaggaaacgcaacagaaatccaatctagagctgctccgcatctccctgctgctcatcgagtcgtggctggagcccgtgcggttcctcaggagtatgttcgccaacaacctggtgtatgacacctcggacagcgatgactatcacctcctaaaggacctagaggaaggcatccaaacgctgatggggaggctggaagacggcagccgccggactgggcagatcctcaagcagacctacagcaagttacacaaactacagaaacaaccaataaacgcacagctacaagaacaacgagacatgntnaaacagctatacgaggaaagaaacaatagaaacaaaggncanaaanannnnagacagacaatagagaagaaagnnnnnctctgtggaagaagacaagaatgtggcttcnaggtagacaccaaagataagacaaaacaaaaaccc

SEQ ID NO: 733910 - DNA, 881 bp, Homo sapiens
  misc_feature (29)..(29): n is a, c, g, or t
  misc_feature (875)..(876): n is a, c, g, or t
ggaagcagggagagagaactggccagggnataaaaagggcccacaagagaccggctctaggatcccaaggcccaactccccgaaccactcagggtcctgtggacagctcacctagtggcaatggctccaggctcccggacgtccctgctcctggcttttgccctgctctgcctgccctggcttcaagaggctggtgccgtccaaaccgttccgttatccaggctttttgaccacgctatgctccaagcccatcgcgcgcaccagctggccattgacacctaccaggagtttgaagaaacctatatcccaaaggaccagaagtattcattcctgcatgactcccagacctccttctgcttctcagactctattccgacaccctccaacatggaggaaacgcaacagaaatccaatctagagctgctccgcatctccctgctgctcatcgagtcgtggctggagcccgtgcggttcctcaggagtatgttcgccaacaacctggtgtatgacacctcggacagcgatgactatcacctcctaaaggacctagaggaaggcatccaaacgctgatggggaggctggaagacggcagccgccggactgggcagatcctcaagcagacctacagcaagtttgacacaaactcgcacaaccatgacgcactgctcaagaactacgggctgctctactgcttcaggaaggacatggacaaggtcgagacattcctgcgcatggtgcagtgccgctctgtggacgggcagcgtgtgtgcttctagtgtgcccgagtagcatcctgtgacccctccccagtgcctctcctggccctgaaggtgccactccatgtgcccaccatgcccggtgtaccggagctcgnnaattc

SEQ ID NO: 733911 - DNA, 836 bp, Homo sapiens
  misc_feature (29)..(29): n is a, c, g, or t
  misc_feature (778)..(778): n is a, c, g, or t
  misc_feature (813)..(813): n is a, c, g, or t
ggaagcagggagagagaactggccagggnataaaaagggcccacaagagaccggctctaggatcccaaggcccaactccccgaaccactcagggtcctgtggacagctcacctagtggcaatggctccaggctcccggacgtccctgctcctggcttttgccctgctctgcctgccctggcttcaagaggctggtgccgtccaaaccgttccgttatccaggctttttgaccacgctatgctccaagcccatcgcgcgcaccagctggccattgacacctaccaggagtttgaagaaacctatatcccaaaggaccagaagtattcattcctgcatgactcccagacctccttctgcttctcagactctattccgacaccctccaacatggaggaaacgcaacagaaatccaatctagagctgctccgcatctccctgctgctcatcgagtcgtggctggagcccgtgcggttcctcaggagtatgttcgccaacaacctggtgtatgacacctcggacagcgatgactatcacctcctaaaggacctagaggaaggcatccaaacgctgatggggaggctggaagacggcagccgccggactgggcagatcctcaagcagacctacagcaagtttgacacaaactcgcacaaccatgacgcactgctcaagaactacgggctgctctactgcttcaggaaggacatggacaaggtcgagacattcctgcgcatggtgcagtgccgctctgtggagggaactgtggtttactgccggnggatcctggacctccagtgcttctgcctgagtgcntcaggccacactgctattagtgt

SEQ ID NO: 733912 - DNA, 751 bp, Homo sapiens
  misc_feature (29)..(29): n is a, c, g, or t
  misc_feature (668)..(668): n is a, c, g, or t
  misc_feature (672)..(672): n is a, c, g, or t
  misc_feature (720)..(720): n is a, c, g, or t
  misc_feature (722)..(722): n is a, c, g, or t
  misc_feature (735)..(735): n is a, c, g, or t
  misc_feature (739)..(741): n is a, c, g, or t
  misc_feature (743)..(743): n is a, c, g, or t
ggaagcagggagagagaactggccagggnataaaaagggcccacaagagaccggctctaggatcccaaggcccaactccccgaaccactcagggtcctgtggacagctcacctagtggcaatggctccaggctcccggacgtccctgctcctggcttttgccctgctctgcctgccctggcttcaagaggctggtgccgtccaaaccgttccgttatccaggctttttgaccacgctatgctccaagcccatcgcgcgcaccagctggccattgacacctaccaggagtttgaagaaacctatatcccaaaggaccagaagtattcattcctgcatgactcccagacctccttctgcttctcagactctattccgacaccctccaacatggaggaaacgcaacagaaatccaatctagagctgctccgcatctccctgctgctcatcgagtcgtggctggagcccgtgcggttcctcaggagtatgttcgccaacaacctggtgtatgacacctcggacagctcacctagtggcaatggctccaggctcccggacgtccctgctcctggcttttgccctgctctgcctgccctggcttcaagaggctggtgccgtccaaaccgttccgttatccaggctttttgaccacgctatgctccaagcccatngcgngcaccagctggccattgacacctaccaggagtttgaagaaacctatancncaaaggaccaggnactnnngnccagcgta

SEQ ID NO: 733913 - DNA, 1110 bp, Homo sapiens
  misc_feature (29)..(29): n is a, c, g, or t
ggaagcagggagagagaactggccagggnataaaaagggcccacaagagaccggctctaggatcccaaggcccaactccccgaaccactcagggtcctgtggacagctcacctagtggcaatggctccaggctcccggacgtccctgctcctggcttttgccctgctctgcctgccctggcttcaagaggctggtgccgtccaaaccgttccgttatccaggctttttgaccacgctatgctccaagcccatcgcgcgcaccagctggccattgacacctaccaggagtttgaagaaacctatatcccaaaggaccagaagtattcattcctgcatgactcccagacctccttctgcttctcagactctattccgacaccctccaacatggaggaaacgcaacagaaatccaatctagagctgctccgcatctccctgctgctcatcgagtcgtggctggagcccgtgcggttcctcaggagtatgttcgccaacaacctggtgtatgacacctcggacagcgatgactatcacctcctaaaggacctagaggaaggcatccaaacgctgatggggaggctggaagacggcagccgccggactgggcagatcctcaagcagacctacagcaagtttgacacaatagcttcgccgacaagcacttgacgtcactgctcaaagaagcttgacggggcttgctcatacatgactttcacggcaaatggtactatggcacaaagggtcgaggaacaattctctgggcggcattgtgctgccaggtggtcccgtcttcttgtgagatggtggcagccctggttgggtctttctgaagagtgccccagagtaggcatacctgtggactcccttcctctcaggtgccctctcgctgggggcccatggaaaagggtggggcactatcccaggtgtggccccgaacccgaagtccattggtttccctaaattaacatcactttaaaggttgggttattcttattcgcaaataataacccatgtaattaatggaatcaattaccagaatataagaacaatatttcgcgaggcctctcaattgtgggccgtatgaaaaagaatgttatgtaataaccgcag

SEQ ID NO: 733914 - DNA, 1132 bp, Homo sapiens
  misc_feature (29)..(29): n is a, c, g, or t
  misc_feature (588)..(588): n is a, c, g, or t
  misc_feature (595)..(595): n is a, c, g, or t
  misc_feature (603)..(603): n is a, c, g, or t
  misc_feature (608)..(610): n is a, c, g, or t
  misc_feature (621)..(622): n is a, c, g, or t
  misc_feature (624)..(624): n is a, c, g, or t
  misc_feature (627)..(627): n is a, c, g, or t
  misc_feature (636)..(636): n is a, c, g, or t
  misc_feature (638)..(638): n is a, c, g, or t
  misc_feature (645)..(645): n is a, c, g, or t
  misc_feature (649)..(649): n is a, c, g, or t
  misc_feature (653)..(653): n is a, c, g, or t
  misc_feature (655)..(657): n is a, c, g, or t
  misc_feature (661)..(661): n is a, c, g, or t
  misc_feature (664)..(664): n is a, c, g, or t
  misc_feature (666)..(666): n is a, c, g, or t
  misc_feature (681)..(681): n is a, c, g, or t
  misc_feature (692)..(692): n is a, c, g, or t
  misc_feature (695)..(695): n is a, c, g, or t
  misc_feature (710)..(710): n is a, c, g, or t
  misc_feature (728)..(728): n is a, c, g, or t
  misc_feature (737)..(737): n is a, c, g, or t
  misc_feature (742)..(742): n is a, c, g, or t
  misc_feature (764)..(764): n is a, c, g, or t
  misc_feature (785)..(785): n is a, c, g, or t
  misc_feature (787)..(787): n is a, c, g, or t
  misc_feature (792)..(792): n is a, c, g, or t
  misc_feature (794)..(794): n is a, c, g, or t
  misc_feature (796)..(796): n is a, c, g, or t
  misc_feature (798)..(800): n is a, c, g, or t
  misc_feature (802)..(802): n is a, c, g, or t
  misc_feature (804)..(804): n is a, c, g, or t
  misc_feature (808)..(808): n is a, c, g, or t
  misc_feature (810)..(810): n is a, c, g, or t
  misc_feature (812)..(812): n is a, c, g, or t
  misc_feature (1126)..(1127): n is a, c, g, or t
ggaagcagggagagagaactggccagggnataaaaagggcccacaagagaccggctctaggatcccaaggcccaactccccgaaccactcagggtcctgtggacagctcacctagtggcaatggctccaggctcccggacgtccctgctcctggcttttgccctgctctgcctgccctggcttcaagaggctggtgccgtccaaaccgttccgttatccaggctttttgaccacgctatgctccaagcccatcgcgcgcaccagctggccattgacacctaccaggagtttgaagaaacctatatcccaaaggaccagaagtattcattcctgcatgactcccagacctccttctgcttctcagactctattccgacaccctccaacatggaggaaacgcaacagaaatccaatctagagctgctccgcatctccctgctgctcatcgagtcgtggctggagcccgtgcggttcctcaggagtatgttcgccaacaacctggtgtatgacacctcggacagcgatgactatcacctcctaaaggacctagaggaaggcatccaaacgctgatgggggtgagggtggcnccagggntccccaancctgnnnccccactggcnncnagngctggggananaaacacngctncccncnnnttancantnaggcgctgacccaanagaactcaccntantcttcatttcccctngtgaatcctccaggcctntctctacancctgnaggggagggaggaaaatggatnaatgagagagggagggaacantnccaancncntnnncncncccncncntccttcactttgcagaggctggaagacggcagccgccggactgggcagatcctcaagcagacctacagcaagtttgacacaaactcgcacaaccatgacgcactgctcaagaactacgggctgctctactgcttcaggaaggacatggacaaggtcgagacattcctgcgcatggtgcagtgccgctctgtggacgggcagcgtgtgtgcttctagtgtgcccgagtagcatcctgtgacccctccccagtgcctctcctggccctgaaggtgccactccatgtgcccaccatgcccggtgtaccggagctcgnnaattc

SEQ ID NO: 733915 - DNA, 1170 bp, Homo sapiens
  misc_feature (29)..(29): n is a, c, g, or t
  misc_feature (588)..(588): n is a, c, g, or t
  misc_feature (595)..(595): n is a, c, g, or t
  misc_feature (603)..(603): n is a, c, g, or t
  misc_feature (608)..(610): n is a, c, g, or t
  misc_feature (621)..(622): n is a, c, g, or t
  misc_feature (624)..(624): n is a, c, g, or t
  misc_feature (627)..(627): n is a, c, g, or t
  misc_feature (636)..(636): n is a, c, g, or t
  misc_feature (638)..(638): n is a, c, g, or t
  misc_feature (645)..(645): n is a, c, g, or t
  misc_feature (649)..(649): n is a, c, g, or t
  misc_feature (653)..(653): n is a, c, g, or t
  misc_feature (655)..(657): n is a, c, g, or t
  misc_feature (661)..(661): n is a, c, g, or t
  misc_feature (664)..(664): n is a, c, g, or t
  misc_feature (666)..(666): n is a, c, g, or t
  misc_feature (681)..(681): n is a, c, g, or t
  misc_feature (692)..(692): n is a, c, g, or t
  misc_feature (695)..(695): n is a, c, g, or t
  misc_feature (710)..(710): n is a, c, g, or t
  misc_feature (728)..(728): n is a, c, g, or t
  misc_feature (737)..(737): n is a, c, g, or t
  misc_feature (742)..(742): n is a, c, g, or t
  misc_feature (764)..(764): n is a, c, g, or t
  misc_feature (785)..(785): n is a, c, g, or t
  misc_feature (787)..(787): n is a, c, g, or t
  misc_feature (792)..(792): n is a, c, g, or t
  misc_feature (794)..(794): n is a, c, g, or t
  misc_feature (796)..(796): n is a, c, g, or t
  misc_feature (798)..(800): n is a, c, g, or t
  misc_feature (802)..(802): n is a, c, g, or t
  misc_feature (804)..(804): n is a, c, g, or t
  misc_feature (808)..(808): n is a, c, g, or t
  misc_feature (810)..(810): n is a, c, g, or t
  misc_feature (812)..(812): n is a, c, g, or t
  misc_feature (1140)..(1140): n is a, c, g, or t
  misc_feature (1142)..(1142): n is a, c, g, or t
  misc_feature (1144)..(1144): n is a, c, g, or t
ggaagcagggagagagaactggccagggnataaaaagggcccacaagagaccggctctaggatcccaaggcccaactccccgaaccactcagggtcctgtggacagctcacctagtggcaatggctccaggctcccggacgtccctgctcctggcttttgccctgctctgcctgccctggcttcaagaggctggtgccgtccaaaccgttccgttatccaggctttttgaccacgctatgctccaagcccatcgcgcgcaccagctggccattgacacctaccaggagtttgaagaaacctatatcccaaaggaccagaagtattcattcctgcatgactcccagacctccttctgcttctcagactctattccgacaccctccaacatggaggaaacgcaacagaaatccaatctagagctgctccgcatctccctgctgctcatcgagtcgtggctggagcccgtgcggttcctcaggagtatgttcgccaacaacctggtgtatgacacctcggacagcgatgactatcacctcctaaaggacctagaggaaggcatccaaacgctgatgggggtgagggtggcnccagggntccccaancctgnnnccccactggcnncnagngctggggananaaacacngctncccncnnnttancantnaggcgctgacccaanagaactcaccntantcttcatttcccctngtgaatcctccaggcctntctctacancctgnaggggagggaggaaaatggatnaatgagagagggagggaacantnccaancncntnnncncncccncncntccttcactttgcagaggctggaagacggcagccgccggactgggcagatcctcaagcagacctacagcaagtttgacacaaactcgcacaaccatgacgcactgctcaagaactacgggctgctctactgcttcaggaaggacatggacaaggtcgagacattcctgcgcatggtgcagtgccgctctgtggagggcagctgtggcttctaggtgcccgagtagcatcctgtgacccctccccagtgcctctcctggccctgaaggtgccactccagtgcccaccagccttgtcctaataaaattaagttgtatcatttcaaaaaanancncaaaacaacacaaaacacaaacatcc

SEQ ID NO: 733916 - DNA, 726 bp, Homo sapiens
  misc_feature (169)..(169): n is a, c, g, or t
  misc_feature (487)..(487): n is a, c, g, or t
  misc_feature (494)..(494): n is a, c, g, or t
  misc_feature (502)..(502): n is a, c, g, or t
  misc_feature (507)..(509): n is a, c, g, or t
  misc_feature (520)..(521): n is a, c, g, or t
  misc_feature (523)..(523): n is a, c, g, or t
  misc_feature (526)..(526): n is a, c, g, or t
  misc_feature (535)..(535): n is a, c, g, or t
  misc_feature (537)..(537): n is a, c, g, or t
  misc_feature (544)..(544): n is a, c, g, or t
  misc_feature (548)..(548): n is a, c, g, or t
  misc_feature (552)..(552): n is a, c, g, or t
  misc_feature (554)..(556): n is a, c, g, or t
  misc_feature (560)..(560): n is a, c, g, or t
  misc_feature (563)..(563): n is a, c, g, or t
  misc_feature (565)..(565): n is a, c, g, or t
  misc_feature (580)..(580): n is a, c, g, or t
  misc_feature (591)..(591): n is a, c, g, or t
  misc_feature (594)..(594): n is a, c, g, or t
  misc_feature (609)..(609): n is a, c, g, or t
  misc_feature (627)..(627): n is a, c, g, or t
  misc_feature (636)..(636): n is a, c, g, or t
  misc_feature (641)..(641): n is a, c, g, or t
  misc_feature (663)..(663): n is a, c, g, or t
  misc_feature (684)..(684): n is a, c, g, or t
  misc_feature (686)..(686): n is a, c, g, or t
  misc_feature (691)..(691): n is a, c, g, or t
  misc_feature (693)..(693): n is a, c, g, or t
  misc_feature (695)..(695): n is a, c, g, or t
  misc_feature (697)..(699): n is a, c, g, or t
  misc_feature (701)..(701): n is a, c, g, or t
  misc_feature (703)..(703): n is a, c, g, or t
  misc_feature (707)..(707): n is a, c, g, or t
  misc_feature (709)..(709): n is a, c, g, or t
  misc_feature (711)..(711): n is a, c, g, or t
cgatctagaggaccccgcgtacagttgcgggacgtccctgctctggtttttgcctgttctgcttgcctggtttcaagaggctggtgcgggcagtgccttcccaaccattcccttatccaggctttttgacaacgctatgctccgcgcccatcgtctgcaccagctggcntttgacacctaccaggagtttgaagaaacctatatcccaaaggaccagaagtattcattcctgcatgactcccagacctccttctgcttctcagactctattccgacaccctccaacatggaggaaacgcaacagaaatccaatctagagctgctccgcatctccctgctgctcatcgagtcgtggctggagcccgtgcggttcctcaggagtatgttcgccaacaacctggtgtatgacacctcggacagcgatgactatcacctcctaaaggacctagaggaaggcatccaaacgctgatgggggtgagggtggcnccagggntccccaancctgnnnccccactggcnncnagngctggggananaaacacngctncccncnnnttancantnaggcgctgacccaanagaactcaccntantcttcatttcccctngtgaatcctccaggcctntctctacancctgnaggggagggaggaaaatggatnaatgagagagggagggaacantnccaancncntnnncncncccncncntccttcactttgcag

SEQ ID NO: 733917 - DNA, 650 bp, Homo sapiens
  misc_feature (169)..(169): n is a, c, g, or t
  misc_feature (567)..(567): n is a, c, g, or t
  misc_feature (571)..(571): n is a, c, g, or t
  misc_feature (619)..(619): n is a, c, g, or t
  misc_feature (621)..(621): n is a, c, g, or t
  misc_feature (634)..(634): n is a, c, g, or t
  misc_feature (638)..(640): n is a, c, g, or t
  misc_feature (642)..(642): n is a, c, g, or t
cgatctagaggaccccgcgtacagttgcgggacgtccctgctctggtttttgcctgttctgcttgcctggtttcaagaggctggtgcgggcagtgccttcccaaccattcccttatccaggctttttgacaacgctatgctccgcgcccatcgtctgcaccagctggcntttgacacctaccaggagtttgaagaaacctatatcccaaaggaccagaagtattcattcctgcatgactcccagacctccttctgcttctcagactctattccgacaccctccaacatggaggaaacgcaacagaaatccaatctagagctgctccgcatctccctgctgctcatcgagtcgtggctggagcccgtgcggttcctcaggagtatgttcgccaacaacctggtgtatgacacctcggacagctcacctagtggcaatggctccaggctcccggacgtccctgctcctggcttttgccctgctctgcctgccctggcttcaagaggctggtgccgtccaaaccgttccgttatccaggctttttgaccacgctatgctccaagcccatngcgngcaccagctggccattgacacctaccaggagtttgaagaaacctatancncaaaggaccaggnactnnngnccagcgta

SEQ ID NO: 733918 - DNA, 818 bp, Homo sapiens
  misc_feature (169)..(169): n is a, c, g, or t
  misc_feature (788)..(788): n is a, c, g, or t
  misc_feature (790)..(790): n is a, c, g, or t
  misc_feature (792)..(792): n is a, c, g, or t
cgatctagaggaccccgcgtacagttgcgggacgtccctgctctggtttttgcctgttctgcttgcctggtttcaagaggctggtgcgggcagtgccttcccaaccattcccttatccaggctttttgacaacgctatgctccgcgcccatcgtctgcaccagctggcntttgacacctaccaggagtttgaagaaacctatatcccaaaggaccagaagtattcattcctgcatgactcccagacctccttctgcttctcagactctattccgacaccctccaacatggaggaaacgcaacagaaatccaatctagagctgctccgcatctccctgctgctcatcgagtcgtggctggagcccgtgcggttcctcaggagtatgttcgccaacaacctggtgtatgacacctcggacagcgatgactatcacctcctaaaggacctagaggaaggcatccaaacgctgatggggaggctggaagacggcagccgccggactgggcagatcctcaagcagacctacagcaagtttgacacaaactcgcacaaccatgacgcactgctcaagaactacgggctgctctactgcttcaggaaggacatggacaaggtcgagacattcctgcgcatggtgcagtgccgctctgtggagggcagctgtggcttctaggtgcccgagtagcatcctgtgacccctccccagtgcctctcctggccctgaaggtgccactccagtgcccaccagccttgtcctaataaaattaagttgtatcatttcaaaaaanancncaaaacaacacaaaacacaaacatcc

SEQ ID NO: 733919 - DNA, 780 bp, Homo sapiens
  misc_feature (169)..(169): n is a, c, g, or t
  misc_feature (774)..(775): n is a, c, g, or t
cgatctagaggaccccgcgtacagttgcgggacgtccctgctctggtttttgcctgttctgcttgcctggtttcaagaggctggtgcgggcagtgccttcccaaccattcccttatccaggctttttgacaacgctatgctccgcgcccatcgtctgcaccagctggcntttgacacctaccaggagtttgaagaaacctatatcccaaaggaccagaagtattcattcctgcatgactcccagacctccttctgcttctcagactctattccgacaccctccaacatggaggaaacgcaacagaaatccaatctagagctgctccgcatctccctgctgctcatcgagtcgtggctggagcccgtgcggttcctcaggagtatgttcgccaacaacctggtgtatgacacctcggacagcgatgactatcacctcctaaaggacctagaggaaggcatccaaacgctgatggggaggctggaagacggcagccgccggactgggcagatcctcaagcagacctacagcaagtttgacacaaactcgcacaaccatgacgcactgctcaagaactacgggctgctctactgcttcaggaaggacatggacaaggtcgagacattcctgcgcatggtgcagtgccgctctgtggacgggcagcgtgtgtgcttctagtgtgcccgagtagcatcctgtgacccctccccagtgcctctcctggccctgaaggtgccactccatgtgcccaccatgcccggtgtaccggagctcgnnaattc

SEQ ID NO: 733920 - DNA, 735 bp, Homo sapiens
  misc_feature (169)..(169): n is a, c, g, or t
  misc_feature (677)..(677): n is a, c, g, or t
  misc_feature (712)..(712): n is a, c, g, or t
cgatctagaggaccccgcgtacagttgcgggacgtccctgctctggtttttgcctgttctgcttgcctggtttcaagaggctggtgcgggcagtgccttcccaaccattcccttatccaggctttttgacaacgctatgctccgcgcccatcgtctgcaccagctggcntttgacacctaccaggagtttgaagaaacctatatcccaaaggaccagaagtattcattcctgcatgactcccagacctccttctgcttctcagactctattccgacaccctccaacatggaggaaacgcaacagaaatccaatctagagctgctccgcatctccctgctgctcatcgagtcgtggctggagcccgtgcggttcctcaggagtatgttcgccaacaacctggtgtatgacacctcggacagcgatgactatcacctcctaaaggacctagaggaaggcatccaaacgctgatggggaggctggaagacggcagccgccggactgggcagatcctcaagcagacctacagcaagtttgacacaaactcgcacaaccatgacgcactgctcaagaactacgggctgctctactgcttcaggaaggacatggacaaggtcgagacattcctgcgcatggtgcagtgccgctctgtggagggaactgtggtttactgccggnggatcctggacctccagtgcttctgcctgagtgcntcaggccacactgctattagtgt

SEQ ID NO: 733921 - DNA, 736 bp, Homo sapiens
  misc_feature (169)..(169): n is a, c, g, or t
  misc_feature (590)..(590): n is a, c, g, or t
  misc_feature (592)..(592): n is a, c, g, or t
  misc_feature (631)..(631): n is a, c, g, or t
  misc_feature (634)..(634): n is a, c, g, or t
  misc_feature (638)..(638): n is a, c, g, or t
  misc_feature (640)..(643): n is a, c, g, or t
  misc_feature (666)..(670): n is a, c, g, or t
  misc_feature (701)..(701): n is a, c, g, or t
cgatctagaggaccccgcgtacagttgcgggacgtccctgctctggtttttgcctgttctgcttgcctggtttcaagaggctggtgcgggcagtgccttcccaaccattcccttatccaggctttttgacaacgctatgctccgcgcccatcgtctgcaccagctggcntttgacacctaccaggagtttgaagaaacctatatcccaaaggaccagaagtattcattcctgcatgactcccagacctccttctgcttctcagactctattccgacaccctccaacatggaggaaacgcaacagaaatccaatctagagctgctccgcatctccctgctgctcatcgagtcgtggctggagcccgtgcggttcctcaggagtatgttcgccaacaacctggtgtatgacacctcggacagcgatgactatcacctcctaaaggacctagaggaaggcatccaaacgctgatggggaggctggaagacggcagccgccggactgggcagatcctcaagcagacctacagcaagttacacaaactacagaaacaaccaataaacgcacagctacaagaacaacgagacatgntnaaacagctatacgaggaaagaaacaatagaaacaaaggncanaaanannnnagacagacaatagagaagaaagnnnnnctctgtggaagaagacaagaatgtggcttcnaggtagacaccaaagataagacaaaacaaaaaccc

SEQ ID NO: 733922 - DNA, 1009 bp, Homo sapiens
  misc_feature (169)..(169): n is a, c, g, or t
cgatctagaggaccccgcgtacagttgcgggacgtccctgctctggtttttgcctgttctgcttgcctggtttcaagaggctggtgcgggcagtgccttcccaaccattcccttatccaggctttttgacaacgctatgctccgcgcccatcgtctgcaccagctggcntttgacacctaccaggagtttgaagaaacctatatcccaaaggaccagaagtattcattcctgcatgactcccagacctccttctgcttctcagactctattccgacaccctccaacatggaggaaacgcaacagaaatccaatctagagctgctccgcatctccctgctgctcatcgagtcgtggctggagcccgtgcggttcctcaggagtatgttcgccaacaacctggtgtatgacacctcggacagcgatgactatcacctcctaaaggacctagaggaaggcatccaaacgctgatggggaggctggaagacggcagccgccggactgggcagatcctcaagcagacctacagcaagtttgacacaatagcttcgccgacaagcacttgacgtcactgctcaaagaagcttgacggggcttgctcatacatgactttcacggcaaatggtactatggcacaaagggtcgaggaacaattctctgggcggcattgtgctgccaggtggtcccgtcttcttgtgagatggtggcagccctggttgggtctttctgaagagtgccccagagtaggcatacctgtggactcccttcctctcaggtgccctctcgctgggggcccatggaaaagggtggggcactatcccaggtgtggccccgaacccgaagtccattggtttccctaaattaacatcactttaaaggttgggttattcttattcgcaaataataacccatgtaattaatggaatcaattaccagaatataagaacaatatttcgcgaggcctctcaattgtgggccgtatgaaaaagaatgttatgtaataaccgcag

SEQ ID NO: 733923 - DNA, 790 bp, Homo sapiens
  misc_feature (760)..(760): n is a, c, g, or t
  misc_feature (762)..(762): n is a, c, g, or t
  misc_feature (764)..(764): n is a, c, g, or t
ggaggtgacgtctagatgatccccgttcgcgccttttctggtattaaatcagagcaggctgccgtgcagtccgttcctgttagtccagagctaatgactcatcgctcattctgccaatctcattgcgcgcaccacctggctatttatacctacccagattttgcgcacgatgatcttgcagcataccgtaattattcattcctgcatgactcccagacctccttctgcttctcagactctattccgacaccctccaacatggaggaaacgcaacagaaatccaatctagagctgctccgcatctccctgctgctcatcgagtcgtggctggagcccgtgcggttcctcaggagtatgttcgccaacaacctggtgtatgacacctcggacagcgatgactatcacctcctaaaggacctagaggaaggcatccaaacgctgatggggaggctggaagacggcagccgccggactgggcagatcctcaagcagacctacagcaagtttgacacaaactcgcacaaccatgacgcactgctcaagaactacgggctgctctactgcttcaggaaggacatggacaaggtcgagacattcctgcgcatggtgcagtgccgctctgtggagggcagctgtggcttctaggtgcccgagtagcatcctgtgacccctccccagtgcctctcctggccctgaaggtgccactccagtgcccaccagccttgtcctaataaaattaagttgtatcatttcaaaaaanancncaaaacaacacaaaacacaaacatcc

SEQ ID NO: 733924 - DNA, 752 bp, Homo sapiens
  misc_feature (746)..(747): n is a, c, g, or t
ggaggtgacgtctagatgatccccgttcgcgccttttctggtattaaatcagagcaggctgccgtgcagtccgttcctgttagtccagagctaatgactcatcgctcattctgccaatctcattgcgcgcaccacctggctatttatacctacccagattttgcgcacgatgatcttgcagcataccgtaattattcattcctgcatgactcccagacctccttctgcttctcagactctattccgacaccctccaacatggaggaaacgcaacagaaatccaatctagagctgctccgcatctccctgctgctcatcgagtcgtggctggagcccgtgcggttcctcaggagtatgttcgccaacaacctggtgtatgacacctcggacagcgatgactatcacctcctaaaggacctagaggaaggcatccaaacgctgatggggaggctggaagacggcagccgccggactgggcagatcctcaagcagacctacagcaagtttgacacaaactcgcacaaccatgacgcactgctcaagaactacgggctgctctactgcttcaggaaggacatggacaaggtcgagacattcctgcgcatggtgcagtgccgctctgtggacgggcagcgtgtgtgcttctagtgtgcccgagtagcatcctgtgacccctccccagtgcctctcctggccctgaaggtgccactccatgtgcccaccatgcccggtgtaccggagctcgnnaattc

SEQ ID NO: 733925 - DNA, 707 bp, Homo sapiens
  misc_feature (649)..(649): n is a, c, g, or t
  misc_feature (684)..(684): n is a, c, g, or t
ggaggtgacgtctagatgatccccgttcgcgccttttctggtattaaatcagagcaggctgccgtgcagtccgttcctgttagtccagagctaatgactcatcgctcattctgccaatctcattgcgcgcaccacctggctatttatacctacccagattttgcgcacgatgatcttgcagcataccgtaattattcattcctgcatgactcccagacctccttctgcttctcagactctattccgacaccctccaacatggaggaaacgcaacagaaatccaatctagagctgctccgcatctccctgctgctcatcgagtcgtggctggagcccgtgcggttcctcaggagtatgttcgccaacaacctggtgtatgacacctcggacagcgatgactatcacctcctaaaggacctagaggaaggcatccaaacgctgatggggaggctggaagacggcagccgccggactgggcagatcctcaagcagacctacagcaagtttgacacaaactcgcacaaccatgacgcactgctcaagaactacgggctgctctactgcttcaggaaggacatggacaaggtcgagacattcctgcgcatggtgcagtgccgctctgtggagggaactgtggtttactgccggnggatcctggacctccagtgcttctgcctgagtgcntcaggccacactgctattagtgt

SEQ ID NO: 733926 - DNA, 652 bp, Homo sapiens
  misc_feature (622)..(622): n is a, c, g, or t
  misc_feature (624)..(624): n is a, c, g, or t
  misc_feature (626)..(626): n is a, c, g, or t
gtcacgcctatcatgcaggtttgtagacacctctgtccctttggacactataagtgttcattcctgcatgactcccagacctccttctgcttctcagactctattccgacaccctccaacatggaggaaacgcaacagaaatccaatctagagctgctccgcatctccctgctgctcatcgagtcgtggctggagcccgtgcggttcctcaggagtatgttcgccaacaacctggtgtatgacacctcggacagcgatgactatcacctcctaaaggacctagaggaaggcatccaaacgctgatggggaggctggaagacggcagccgccggactgggcagatcctcaagcagacctacagcaagtttgacacaaactcgcacaaccatgacgcactgctcaagaactacgggctgctctactgcttcaggaaggacatggacaaggtcgagacattcctgcgcatggtgcagtgccgctctgtggagggcagctgtggcttctaggtgcccgagtagcatcctgtgacccctccccagtgcctctcctggccctgaaggtgccactccagtgcccaccagccttgtcctaataaaattaagttgtatcatttcaaaaaanancncaaaacaacacaaaacacaaacatcc

SEQ ID NO: 733927 - DNA, 614 bp, Homo sapiens
  misc_feature (608)..(609): n is a, c, g, or t
gtcacgcctatcatgcaggtttgtagacacctctgtccctttggacactataagtgttcattcctgcatgactcccagacctccttctgcttctcagactctattccgacaccctccaacatggaggaaacgcaacagaaatccaatctagagctgctccgcatctccctgctgctcatcgagtcgtggctggagcccgtgcggttcctcaggagtatgttcgccaacaacctggtgtatgacacctcggacagcgatgactatcacctcctaaaggacctagaggaaggcatccaaacgctgatggggaggctggaagacggcagccgccggactgggcagatcctcaagcagacctacagcaagtttgacacaaactcgcacaaccatgacgcactgctcaagaactacgggctgctctactgcttcaggaaggacatggacaaggtcgagacattcctgcgcatggtgcagtgccgctctgtggacgggcagcgtgtgtgcttctagtgtgcccgagtagcatcctgtgacccctccccagtgcctctcctggccctgaaggtgccactccatgtgcccaccatgcccggtgtaccggagctcgnnaattc

SEQ ID NO: 733928 - DNA, 569 bp, Homo sapiens
  misc_feature (511)..(511): n is a, c, g, or t
  misc_feature (546)..(546): n is a, c, g, or t
gtcacgcctatcatgcaggtttgtagacacctctgtccctttggacactataagtgttcattcctgcatgactcccagacctccttctgcttctcagactctattccgacaccctccaacatggaggaaacgcaacagaaatccaatctagagctgctccgcatctccctgctgctcatcgagtcgtggctggagcccgtgcggttcctcaggagtatgttcgccaacaacctggtgtatgacacctcggacagcgatgactatcacctcctaaaggacctagaggaaggcatccaaacgctgatggggaggctggaagacggcagccgccggactgggcagatcctcaagcagacctacagcaagtttgacacaaactcgcacaaccatgacgcactgctcaagaactacgggctgctctactgcttcaggaaggacatggacaaggtcgagacattcctgcgcatggtgcagtgccgctctgtggagggaactgtggtttactgccggnggatcctggacctccagtgcttctgcctgagtgcntcaggccacactgctattagtgt

SEQ ID NO: 733929 - DNA, 570 bp, Homo sapiens
  misc_feature (424)..(424): n is a, c, g, or t
  misc_feature (426)..(426): n is a, c, g, or t
  misc_feature (465)..(465): n is a, c, g, or t
  misc_feature (468)..(468): n is a, c, g, or t
  misc_feature (472)..(472): n is a, c, g, or t
  misc_feature (474)..(477): n is a, c, g, or t
  misc_feature (500)..(504): n is a, c, g, or t
  misc_feature (535)..(535): n is a, c, g, or t
gtcacgcctatcatgcaggtttgtagacacctctgtccctttggacactataagtgttcattcctgcatgactcccagacctccttctgcttctcagactctattccgacaccctccaacatggaggaaacgcaacagaaatccaatctagagctgctccgcatctccctgctgctcatcgagtcgtggctggagcccgtgcggttcctcaggagtatgttcgccaacaacctggtgtatgacacctcggacagcgatgactatcacctcctaaaggacctagaggaaggcatccaaacgctgatggggaggctggaagacggcagccgccggactgggcagatcctcaagcagacctacagcaagttacacaaactacagaaacaaccaataaacgcacagctacaagaacaacgagacatgntnaaacagctatacgaggaaagaaacaatagaaacaaaggncanaaanannnnagacagacaatagagaagaaagnnnnnctctgtggaagaagacaagaatgtggcttcnaggtagacaccaaagataagacaaaacaaaaaccc

SEQ ID NO: 733930 - DNA, 388 bp, Homo sapiens
  misc_feature (382)..(383): n is a, c, g, or t
cagagtggcgggagcccgtgcgctaccgaacacctcggacagcgatgacacccagagaggaaggcatccaaacgctgatggggaggctggaagacggcagccgccggactgggcagatcctcaagcagacctacagcaagtttgacacaaactcgcacaaccatgacgcactgctcaagaactacgggctgctctactgcttcaggaaggacatggacaaggtcgagacattcctgcgcatggtgcagtgccgctctgtggacgggcagcgtgtgtgcttctagtgtgcccgagtagcatcctgtgacccctccccagtgcctctcctggccctgaaggtgccactccatgtgcccaccatgcccggtgtaccggagctcgnnaattc

SEQ ID NO: 733931 - DNA, 426 bp, Homo sapiens
  misc_feature (396)..(396): n is a, c, g, or t
  misc_feature (398)..(398): n is a, c, g, or t
  misc_feature (400)..(400): n is a, c, g, or t
cagagtggcgggagcccgtgcgctaccgaacacctcggacagcgatgacacccagagaggaaggcatccaaacgctgatggggaggctggaagacggcagccgccggactgggcagatcctcaagcagacctacagcaagtttgacacaaactcgcacaaccatgacgcactgctcaagaactacgggctgctctactgcttcaggaaggacatggacaaggtcgagacattcctgcgcatggtgcagtgccgctctgtggagggcagctgtggcttctaggtgcccgagtagcatcctgtgacccctccccagtgcctctcctggccctgaaggtgccactccagtgcccaccagccttgtcctaataaaattaagttgtatcatttcaaaaaanancncaaaacaacacaaaacacaaacatcc

SEQ ID NO: 733932 - DNA, 343 bp, Homo sapiens
  misc_feature (285)..(285): n is a, c, g, or t
  misc_feature (320)..(320): n is a, c, g, or t
cagagtggcgggagcccgtgcgctaccgaacacctcggacagcgatgacacccagagaggaaggcatccaaacgctgatggggaggctggaagacggcagccgccggactgggcagatcctcaagcagacctacagcaagtttgacacaaactcgcacaaccatgacgcactgctcaagaactacgggctgctctactgcttcaggaaggacatggacaaggtcgagacattcctgcgcatggtgcagtgccgctctgtggagggaactgtggtttactgccggnggatcctggacctccagtgcttctgcctgagtgcntcaggccacactgctattagtgt

SEQ ID NO: 733933 - DNA, 683 bp, Homo sapiens
  misc_feature (677)..(678): n is a, c, g, or t
ggcaatacagcaagatcccatctctattttaaagaaaagtctcactttgggaggccaaggcgggtggatcacaaggtcaggagatcgagaccatcctggccaacatagtaaaaccccatctccactaaaaatacaaaaaagtagctgggactacaggcgcccgcctacacgcccggctaattttttgtatttttttttagtagagatggggtttcactgtgttagccaggatggcctcaatctcctgacctcgtgatccgcccgtctcggcctcccaaagtgctgggattacaggcgtgagccaccgcgcccggcccaagaattctttctggaaacaaagaaaaggacctagaggaaggcatccaaacgctgatggggaggctggaagacggcagccgccggactgggcagatcctcaagcagacctacagcaagtttgacacaaactcgcacaaccatgacgcactgctcaagaactacgggctgctctactgcttcaggaaggacatggacaaggtcgagacattcctgcgcatggtgcagtgccgctctgtggacgggcagcgtgtgtgcttctagtgtgcccgagtagcatcctgtgacccctccccagtgcctctcctggccctgaaggtgccactccatgtgcccaccatgcccggtgtaccggagctcgnnaattc

SEQ ID NO: 733934 - DNA, 721 bp, Homo sapiens
  misc_feature (691)..(691): n is a, c, g, or t
  misc_feature (693)..(693): n is a, c, g, or t
  misc_feature (695)..(695): n is a, c, g, or t
ggcaatacagcaagatcccatctctattttaaagaaaagtctcactttgggaggccaaggcgggtggatcacaaggtcaggagatcgagaccatcctggccaacatagtaaaaccccatctccactaaaaatacaaaaaagtagctgggactacaggcgcccgcctacacgcccggctaattttttgtatttttttttagtagagatggggtttcactgtgttagccaggatggcctcaatctcctgacctcgtgatccgcccgtctcggcctcccaaagtgctgggattacaggcgtgagccaccgcgcccggcccaagaattctttctggaaacaaagaaaaggacctagaggaaggcatccaaacgctgatggggaggctggaagacggcagccgccggactgggcagatcctcaagcagacctacagcaagtttgacacaaactcgcacaaccatgacgcactgctcaagaactacgggctgctctactgcttcaggaaggacatggacaaggtcgagacattcctgcgcatggtgcagtgccgctctgtggagggcagctgtggcttctaggtgcccgagtagcatcctgtgacccctccccagtgcctctcctggccctgaaggtgccactccagtgcccaccagccttgtcctaataaaattaagttgtatcatttcaaaaaanancncaaaacaacacaaaacacaaacatcc

SEQ ID NO: 733935 - DNA, 638 bp, Homo sapiens
  misc_feature (580)..(580): n is a, c, g, or t
  misc_feature (615)..(615): n is a, c, g, or t
ggcaatacagcaagatcccatctctattttaaagaaaagtctcactttgggaggccaaggcgggtggatcacaaggtcaggagatcgagaccatcctggccaacatagtaaaaccccatctccactaaaaatacaaaaaagtagctgggactacaggcgcccgcctacacgcccggctaattttttgtatttttttttagtagagatggggtttcactgtgttagccaggatggcctcaatctcctgacctcgtgatccgcccgtctcggcctcccaaagtgctgggattacaggcgtgagccaccgcgcccggcccaagaattctttctggaaacaaagaaaaggacctagaggaaggcatccaaacgctgatggggaggctggaagacggcagccgccggactgggcagatcctcaagcagacctacagcaagtttgacacaaactcgcacaaccatgacgcactgctcaagaactacgggctgctctactgcttcaggaaggacatggacaaggtcgagacattcctgcgcatggtgcagtgccgctctgtggagggaactgtggtttactgccggnggatcctggacctccagtgcttctgcctgagtgcntcaggccacactgctattagtgt

SEQ ID NO: 733936 - DNA, 789 bp, Homo sapiens
  misc_feature (44)..(44): n is a, c, g, or t
  misc_feature (51)..(51): n is a, c, g, or t
  misc_feature (783)..(784): n is a, c, g, or t
cacccaggcgcacttcttgccctccggtttctccccaggctccnggacgtncctgctcctggcttttgccctgctctgcctgccctggcttcaagaggctggtgccgtccaaaccgttccgttatccaggctttttgaccacgctatgctccaagcccatcgcgcgcaccagctggccattgacacctaccaggagtttgaagaaacctatatcccaaaggaccagaagtattcattcctgcatgactcccagacctccttctgcttctcagactctattccgacaccctccaacatggaggaaacgcaacagaaatccaatctagagctgctccgcatctccctgctgctcatcgagtcgtggctggagcccgtgcggttcctcaggagtatgttcgccaacaacctggtgtatgacacctcggacagcgatgactatcacctcctaaaggacctagaggaaggcatccaaacgctgatggggaggctggaagacggcagccgccggactgggcagatcctcaagcagacctacagcaagtttgacacaaactcgcacaaccatgacgcactgctcaagaactacgggctgctctactgcttcaggaaggacatggacaaggtcgagacattcctgcgcatggtgcagtgccgctctgtggacgggcagcgtgtgtgcttctagtgtgcccgagtagcatcctgtgacccctccccagtgcctctcctggccctgaaggtgccactccatgtgcccaccatgcccggtgtaccggagctcgnnaattc

SEQ ID NO: 733937 - DNA, 744 bp, Homo sapiens
  misc_feature (44)..(44): n is a, c, g, or t
  misc_feature (51)..(51): n is a, c, g, or t
  misc_feature (686)..(686): n is a, c, g, or t
  misc_feature (721)..(721): n is a, c, g, or t
cacccaggcgcacttcttgccctccggtttctccccaggctccnggacgtncctgctcctggcttttgccctgctctgcctgccctggcttcaagaggctggtgccgtccaaaccgttccgttatccaggctttttgaccacgctatgctccaagcccatcgcgcgcaccagctggccattgacacctaccaggagtttgaagaaacctatatcccaaaggaccagaagtattcattcctgcatgactcccagacctccttctgcttctcagactctattccgacaccctccaacatggaggaaacgcaacagaaatccaatctagagctgctccgcatctccctgctgctcatcgagtcgtggctggagcccgtgcggttcctcaggagtatgttcgccaacaacctggtgtatgacacctcggacagcgatgactatcacctcctaaaggacctagaggaaggcatccaaacgctgatggggaggctggaagacggcagccgccggactgggcagatcctcaagcagacctacagcaagtttgacacaaactcgcacaaccatgacgcactgctcaagaactacgggctgctctactgcttcaggaaggacatggacaaggtcgagacattcctgcgcatggtgcagtgccgctctgtggagggaactgtggtttactgccggnggatcctggacctccagtgcttctgcctgagtgcntcaggccacactgctattagtgt

SEQ ID NO: 733938 - DNA, 1018 bp, Homo sapiens
  misc_feature (44)..(44): n is a, c, g, or t
  misc_feature (51)..(51): n is a, c, g, or t
cacccaggcgcacttcttgccctccggtttctccccaggctccnggacgtncctgctcctggcttttgccctgctctgcctgccctggcttcaagaggctggtgccgtccaaaccgttccgttatccaggctttttgaccacgctatgctccaagcccatcgcgcgcaccagctggccattgacacctaccaggagtttgaagaaacctatatcccaaaggaccagaagtattcattcctgcatgactcccagacctccttctgcttctcagactctattccgacaccctccaacatggaggaaacgcaacagaaatccaatctagagctgctccgcatctccctgctgctcatcgagtcgtggctggagcccgtgcggttcctcaggagtatgttcgccaacaacctggtgtatgacacctcggacagcgatgactatcacctcctaaaggacctagaggaaggcatccaaacgctgatggggaggctggaagacggcagccgccggactgggcagatcctcaagcagacctacagcaagtttgacacaatagcttcgccgacaagcacttgacgtcactgctcaaagaagcttgacggggcttgctcatacatgactttcacggcaaatggtactatggcacaaagggtcgaggaacaattctctgggcggcattgtgctgccaggtggtcccgtcttcttgtgagatggtggcagccctggttgggtctttctgaagagtgccccagagtaggcatacctgtggactcccttcctctcaggtgccctctcgctgggggcccatggaaaagggtggggcactatcccaggtgtggccccgaacccgaagtccattggtttccctaaattaacatcactttaaaggttgggttattcttattcgcaaataataacccatgtaattaatggaatcaattaccagaatataagaacaatatttcgcgaggcctctcaattgtgggccgtatgaaaaagaatgttatgtaataaccgcag

SEQ ID NO: 733939 - DNA, 659 bp, Homo sapiens
  misc_feature (44)..(44): n is a, c, g, or t
  misc_feature (51)..(51): n is a, c, g, or t
  misc_feature (576)..(576): n is a, c, g, or t
  misc_feature (580)..(580): n is a, c, g, or t
  misc_feature (628)..(628): n is a, c, g, or t
  misc_feature (630)..(630): n is a, c, g, or t
  misc_feature (643)..(643): n is a, c, g, or t
  misc_feature (647)..(649): n is a, c, g, or t
  misc_feature (651)..(651): n is a, c, g, or t
cacccaggcgcacttcttgccctccggtttctccccaggctccnggacgtncctgctcctggcttttgccctgctctgcctgccctggcttcaagaggctggtgccgtccaaaccgttccgttatccaggctttttgaccacgctatgctccaagcccatcgcgcgcaccagctggccattgacacctaccaggagtttgaagaaacctatatcccaaaggaccagaagtattcattcctgcatgactcccagacctccttctgcttctcagactctattccgacaccctccaacatggaggaaacgcaacagaaatccaatctagagctgctccgcatctccctgctgctcatcgagtcgtggctggagcccgtgcggttcctcaggagtatgttcgccaacaacctggtgtatgacacctcggacagctcacctagtggcaatggctccaggctcccggacgtccctgctcctggcttttgccctgctctgcctgccctggcttcaagaggctggtgccgtccaaaccgttccgttatccaggctttttgaccacgctatgctccaagcccatngcgngcaccagctggccattgacacctaccaggagtttgaagaaacctatancncaaaggaccaggnactnnngnccagcgta

SEQ ID NO: 733940 - DNA, 1040 bp, Homo sapiens
  misc_feature (44)..(44): n is a, c, g, or t
  misc_feature (51)..(51): n is a, c, g, or t
  misc_feature (496)..(496): n is a, c, g, or t
  misc_feature (503)..(503): n is a, c, g, or t
  misc_feature (511)..(511): n is a, c, g, or t
  misc_feature (516)..(518): n is a, c, g, or t
  misc_feature (529)..(530): n is a, c, g, or t
  misc_feature (532)..(532): n is a, c, g, or t
  misc_feature (535)..(535): n is a, c, g, or t
  misc_feature (544)..(544): n is a, c, g, or t
  misc_feature (546)..(546): n is a, c, g, or t
  misc_feature (553)..(553): n is a, c, g, or t
  misc_feature (557)..(557): n is a, c, g, or t
  misc_feature (561)..(561): n is a, c, g, or t
  misc_feature (563)..(565): n is a, c, g, or t
  misc_feature (569)..(569): n is a, c, g, or t
  misc_feature (572)..(572): n is a, c, g, or t
  misc_feature (574)..(574): n is a, c, g, or t
  misc_feature (589)..(589): n is a, c, g, or t
  misc_feature (600)..(600): n is a, c, g, or t
  misc_feature (603)..(603): n is a, c, g, or t
  misc_feature (618)..(618): n is a, c, g, or t
  misc_feature (636)..(636): n is a, c, g, or t
  misc_feature (645)..(645): n is a, c, g, or t
  misc_feature (650)..(650): n is a, c, g, or t
  misc_feature (672)..(672): n is a, c, g, or t
  misc_feature (693)..(693): n is a, c, g, or t
  misc_feature (695)..(695): n is a, c, g, or t
  misc_feature (700)..(700): n is a, c, g, or t
  misc_feature (702)..(702): n is a, c, g, or t
  misc_feature (704)..(704): n is a, c, g, or t
  misc_feature (706)..(708): n is a, c, g, or t
  misc_feature (710)..(710): n is a, c, g, or t
  misc_feature (712)..(712): n is a, c, g, or t
  misc_feature (716)..(716): n is a, c, g, or t
  misc_feature (718)..(718): n is a, c, g, or t
  misc_feature (720)..(720): n is a, c, g, or t
  misc_feature (1034)..(1035): n is a, c, g, or t
cacccaggcgcacttcttgccctccggtttctccccaggctccnggacgtncctgctcctggcttttgccctgctctgcctgccctggcttcaagaggctggtgccgtccaaaccgttccgttatccaggctttttgaccacgctatgctccaagcccatcgcgcgcaccagctggccattgacacctaccaggagtttgaagaaacctatatcccaaaggaccagaagtattcattcctgcatgactcccagacctccttctgcttctcagactctattccgacaccctccaacatggaggaaacgcaacagaaatccaatctagagctgctccgcatctccctgctgctcatcgagtcgtggctggagcccgtgcggttcctcaggagtatgttcgccaacaacctggtgtatgacacctcggacagcgatgactatcacctcctaaaggacctagaggaaggcatccaaacgctgatgggggtgagggtggcnccagggntccccaancctgnnnccccactggcnncnagngctggggananaaacacngctncccncnnnttancantnaggcgctgacccaanagaactcaccntantcttcatttcccctngtgaatcctccaggcctntctctacancctgnaggggagggaggaaaatggatnaatgagagagggagggaacantnccaancncntnnncncncccncncntccttcactttgcagaggctggaagacggcagccgccggactgggcagatcctcaagcagacctacagcaagtttgacacaaactcgcacaaccatgacgcactgctcaagaactacgggctgctctactgcttcaggaaggacatggacaaggtcgagacattcctgcgcatggtgcagtgccgctctgtggacgggcagcgtgtgtgcttctagtgtgcccgagtagcatcctgtgacccctccccagtgcctctcctggccctgaaggtgccactccatgtgcccaccatgcccggtgtaccggagctcgnnaattc

SEQ ID NO: 733941 - DNA, 1078 bp, Homo sapiens
  misc_feature (44)..(44): n is a, c, g, or t
  misc_feature (51)..(51): n is a, c, g, or t
  misc_feature (496)..(496): n is a, c, g, or t
  misc_feature (503)..(503): n is a, c, g, or t
  misc_feature (511)..(511): n is a, c, g, or t
  misc_feature (516)..(518): n is a, c, g, or t
  misc_feature (529)..(530): n is a, c, g, or t
  misc_feature (532)..(532): n is a, c, g, or t
  misc_feature (535)..(535): n is a, c, g, or t
  misc_feature (544)..(544): n is a, c, g, or t
  misc_feature (546)..(546): n is a, c, g, or t
  misc_feature (553)..(553): n is a, c, g, or t
  misc_feature (557)..(557): n is a, c, g, or t
  misc_feature (561)..(561): n is a, c, g, or t
  misc_feature (563)..(565): n is a, c, g, or t
  misc_feature (569)..(569): n is a, c, g, or t
  misc_feature (572)..(572): n is a, c, g, or t
  misc_feature (574)..(574): n is a, c, g, or t
  misc_feature (589)..(589): n is a, c, g, or t
  misc_feature (600)..(600): n is a, c, g, or t
  misc_feature (603)..(603): n is a, c, g, or t
  misc_feature (618)..(618): n is a, c, g, or t
  misc_feature (636)..(636): n is a, c, g, or t
  misc_feature (645)..(645): n is a, c, g, or t
  misc_feature (650)..(650): n is a, c, g, or t
  misc_feature (672)..(672): n is a, c, g, or t
  misc_feature (693)..(693): n is a, c, g, or t
  misc_feature (695)..(695): n is a, c, g, or t
  misc_feature (700)..(700): n is a, c, g, or t
  misc_feature (702)..(702): n is a, c, g, or t
  misc_feature (704)..(704): n is a, c, g, or t
  misc_feature (706)..(708): n is a, c, g, or t
  misc_feature (710)..(710): n is a, c, g, or t
  misc_feature (712)..(712): n is a, c, g, or t
  misc_feature (716)..(716): n is a, c, g, or t
  misc_feature (718)..(718): n is a, c, g, or t
  misc_feature (720)..(720): n is a, c, g, or t
  misc_feature (1048)..(1048): n is a, c, g, or t
  misc_feature (1050)..(1050): n is a, c, g, or t
  misc_feature (1052)..(1052): n is a, c, g, or t
cacccaggcgcacttcttgccctccggtttctccccaggctccnggacgtncctgctcctggcttttgccctgctctgcctgccctggcttcaagaggctggtgccgtccaaaccgttccgttatccaggctttttgaccacgctatgctccaagcccatcgcgcgcaccagctggccattgacacctaccaggagtttgaagaaacctatatcccaaaggaccagaagtattcattcctgcatgactcccagacctccttctgcttctcagactctattccgacaccctccaacatggaggaaacgcaacagaaatccaatctagagctgctccgcatctccctgctgctcatcgagtcgtggctggagcccgtgcggttcctcaggagtatgttcgccaacaacctggtgtatgacacctcggacagcgatgactatcacctcctaaaggacctagaggaaggcatccaaacgctgatgggggtgagggtggcnccagggntccccaancctgnnnccccactggcnncnagngctggggananaaacacngctncccncnnnttancantnaggcgctgacccaanagaactcaccntantcttcatttcccctngtgaatcctccaggcctntctctacancctgnaggggagggaggaaaatggatnaatgagagagggagggaacantnccaancncntnnncncncccncncntccttcactttgcagaggctggaagacggcagccgccggactgggcagatcctcaagcagacctacagcaagtttgacacaaactcgcacaaccatgacgcactgctcaagaactacgggctgctctactgcttcaggaaggacatggacaaggtcgagacattcctgcgcatggtgcagtgccgctctgtggagggcagctgtggcttctaggtgcccgagtagcatcctgtgacccctccccagtgcctctcctggccctgaaggtgccactccagtgcccaccagccttgtcctaataaaattaagttgtatcatttcaaaaaanancncaaaacaacacaaaacacaaacatcc

SEQ ID NO: 733942 - DNA, 832 bp, Homo sapiens
  misc_feature (802)..(802): n is a, c, g, or t
  misc_feature (804)..(804): n is a, c, g, or t
  misc_feature (806)..(806): n is a, c, g, or t
cgtgtgctgggtgatctagaggcatccggtaggcctgaagcctgcagtccggcagtcctgctcctggcttttgccctgctctgcctgccctggcttcaagaggctggtgccgtccaaaccgttccgttatccaggctttttgaccacgctatgctccaagcccatcgcgcgcaccagctggccattgacacctaccaggagtttgaagaaacctatatcccaaaggaccagaagtattcattcctgcatgactcccagacctccttctgcttctcagactctattccgacaccctccaacatggaggaaacgcaacagaaatccaatctagagctgctccgcatctccctgctgctcatcgagtcgtggctggagcccgtgcggttcctcaggagtatgttcgccaacaacctggtgtatgacacctcggacagcgatgactatcacctcctaaaggacctagaggaaggcatccaaacgctgatggggaggctggaagacggcagccgccggactgggcagatcctcaagcagacctacagcaagtttgacacaaactcgcacaaccatgacgcactgctcaagaactacgggctgctctactgcttcaggaaggacatggacaaggtcgagacattcctgcgcatggtgcagtgccgctctgtggagggcagctgtggcttctaggtgcccgagtagcatcctgtgacccctccccagtgcctctcctggccctgaaggtgccactccagtgcccaccagccttgtcctaataaaattaagttgtatcatttcaaaaaanancncaaaacaacacaaaacacaaacatcc

SEQ ID NO: 733943 - DNA, 794 bp, Homo sapiens
  misc_feature (788)..(789): n is a, c, g, or t
cgtgtgctgggtgatctagaggcatccggtaggcctgaagcctgcagtccggcagtcctgctcctggcttttgccctgctctgcctgccctggcttcaagaggctggtgccgtccaaaccgttccgttatccaggctttttgaccacgctatgctccaagcccatcgcgcgcaccagctggccattgacacctaccaggagtttgaagaaacctatatcccaaaggaccagaagtattcattcctgcatgactcccagacctccttctgcttctcagactctattccgacaccctccaacatggaggaaacgcaacagaaatccaatctagagctgctccgcatctccctgctgctcatcgagtcgtggctggagcccgtgcggttcctcaggagtatgttcgccaacaacctggtgtatgacacctcggacagcgatgactatcacctcctaaaggacctagaggaaggcatccaaacgctgatggggaggctggaagacggcagccgccggactgggcagatcctcaagcagacctacagcaagtttgacacaaactcgcacaaccatgacgcactgctcaagaactacgggctgctctactgcttcaggaaggacatggacaaggtcgagacattcctgcgcatggtgcagtgccgctctgtggacgggcagcgtgtgtgcttctagtgtgcccgagtagcatcctgtgacccctccccagtgcctctcctggccctgaaggtgccactccatgtgcccaccatgcccggtgtaccggagctcgnnaattc

SEQ ID NO: 733944 - DNA, 749 bp, Homo sapiens
  misc_feature (691)..(691): n is a, c, g, or t
  misc_feature (726)..(726): n is a, c, g, or t
cgtgtgctgggtgatctagaggcatccggtaggcctgaagcctgcagtccggcagtcctgctcctggcttttgccctgctctgcctgccctggcttcaagaggctggtgccgtccaaaccgttccgttatccaggctttttgaccacgctatgctccaagcccatcgcgcgcaccagctggccattgacacctaccaggagtttgaagaaacctatatcccaaaggaccagaagtattcattcctgcatgactcccagacctccttctgcttctcagactctattccgacaccctccaacatggaggaaacgcaacagaaatccaatctagagctgctccgcatctccctgctgctcatcgagtcgtggctggagcccgtgcggttcctcaggagtatgttcgccaacaacctggtgtatgacacctcggacagcgatgactatcacctcctaaaggacctagaggaaggcatccaaacgctgatggggaggctggaagacggcagccgccggactgggcagatcctcaagcagacctacagcaagtttgacacaaactcgcacaaccatgacgcactgctcaagaactacgggctgctctactgcttcaggaaggacatggacaaggtcgagacattcctgcgcatggtgcagtgccgctctgtggagggaactgtggtttactgccggnggatcctggacctccagtgcttctgcctgagtgcntcaggccacactgctattagtgt

SEQ ID NO: 733945 - DNA, 750 bp, Homo sapiens
  misc_feature (604)..(604): n is a, c, g, or t
  misc_feature (606)..(606): n is a, c, g, or t
  misc_feature (645)..(645): n is a, c, g, or t
  misc_feature (648)..(648): n is a, c, g, or t
  misc_feature (652)..(652): n is a, c, g, or t
  misc_feature (654)..(657): n is a, c, g, or t
  misc_feature (680)..(684): n is a, c, g, or t
  misc_feature (715)..(715): n is a, c, g, or t
cgtgtgctgggtgatctagaggcatccggtaggcctgaagcctgcagtccggcagtcctgctcctggcttttgccctgctctgcctgccctggcttcaagaggctggtgccgtccaaaccgttccgttatccaggctttttgaccacgctatgctccaagcccatcgcgcgcaccagctggccattgacacctaccaggagtttgaagaaacctatatcccaaaggaccagaagtattcattcctgcatgactcccagacctccttctgcttctcagactctattccgacaccctccaacatggaggaaacgcaacagaaatccaatctagagctgctccgcatctccctgctgctcatcgagtcgtggctggagcccgtgcggttcctcaggagtatgttcgccaacaacctggtgtatgacacctcggacagcgatgactatcacctcctaaaggacctagaggaaggcatccaaacgctgatggggaggctggaagacggcagccgccggactgggcagatcctcaagcagacctacagcaagttacacaaactacagaaacaaccaataaacgcacagctacaagaacaacgagacatgntnaaacagctatacgaggaaagaaacaatagaaacaaaggncanaaanannnnagacagacaatagagaagaaagnnnnnctctgtggaagaagacaagaatgtggcttcnaggtagacaccaaagataagacaaaacaaaaaccc

SEQ ID NO: 733946 - DNA, 1023 bp, Homo sapiens
cgtgtgctgggtgatctagaggcatccggtaggcctgaagcctgcagtccggcagtcctgctcctggcttttgccctgctctgcctgccctggcttcaagaggctggtgccgtccaaaccgttccgttatccaggctttttgaccacgctatgctccaagcccatcgcgcgcaccagctggccattgacacctaccaggagtttgaagaaacctatatcccaaaggaccagaagtattcattcctgcatgactcccagacctccttctgcttctcagactctattccgacaccctccaacatggaggaaacgcaacagaaatccaatctagagctgctccgcatctccctgctgctcatcgagtcgtggctggagcccgtgcggttcctcaggagtatgttcgccaacaacctggtgtatgacacctcggacagcgatgactatcacctcctaaaggacctagaggaaggcatccaaacgctgatggggaggctggaagacggcagccgccggactgggcagatcctcaagcagacctacagcaagtttgacacaatagcttcgccgacaagcacttgacgtcactgctcaaagaagcttgacggggcttgctcatacatgactttcacggcaaatggtactatggcacaaagggtcgaggaacaattctctgggcggcattgtgctgccaggtggtcccgtcttcttgtgagatggtggcagccctggttgggtctttctgaagagtgccccagagtaggcatacctgtggactcccttcctctcaggtgccctctcgctgggggcccatggaaaagggtggggcactatcccaggtgtggccccgaacccgaagtccattggtttccctaaattaacatcactttaaaggttgggttattcttattcgcaaataataacccatgtaattaatggaatcaattaccagaatataagaacaatatttcgcgaggcctctcaattgtgggccgtatgaaaaagaatgttatgtaataaccgcag

SEQ ID NO: 733947 - DNA, 664 bp, Homo sapiens
  misc_feature (581)..(581): n is a, c, g, or t
  misc_feature (585)..(585): n is a, c, g, or t
  misc_feature (633)..(633): n is a, c, g, or t
  misc_feature (635)..(635): n is a, c, g, or t
  misc_feature (648)..(648): n is a, c, g, or t
  misc_feature (652)..(654): n is a, c, g, or t
  misc_feature (656)..(656): n is a, c, g, or t
cgtgtgctgggtgatctagaggcatccggtaggcctgaagcctgcagtccggcagtcctgctcctggcttttgccctgctctgcctgccctggcttcaagaggctggtgccgtccaaaccgttccgttatccaggctttttgaccacgctatgctccaagcccatcgcgcgcaccagctggccattgacacctaccaggagtttgaagaaacctatatcccaaaggaccagaagtattcattcctgcatgactcccagacctccttctgcttctcagactctattccgacaccctccaacatggaggaaacgcaacagaaatccaatctagagctgctccgcatctccctgctgctcatcgagtcgtggctggagcccgtgcggttcctcaggagtatgttcgccaacaacctggtgtatgacacctcggacagctcacctagtggcaatggctccaggctcccggacgtccctgctcctggcttttgccctgctctgcctgccctggcttcaagaggctggtgccgtccaaaccgttccgttatccaggctttttgaccacgctatgctccaagcccatngcgngcaccagctggccattgacacctaccaggagtttgaagaaacctatancncaaaggaccaggnactnnngnccagcgta

SEQ ID NO: 733948 - DNA, 1045 bp, Homo sapiens
  misc_feature (501)..(501): n is a, c, g, or t
  misc_feature (508)..(508): n is a, c, g, or t
  misc_feature (516)..(516): n is a, c, g, or t
  misc_feature (521)..(523): n is a, c, g, or t
  misc_feature (534)..(535): n is a, c, g, or t
  misc_feature (537)..(537): n is a, c, g, or t
  misc_feature (540)..(540): n is a, c, g, or t
  misc_feature (549)..(549): n is a, c, g, or t
  misc_feature (551)..(551): n is a, c, g, or t
  misc_feature (558)..(558): n is a, c, g, or t
  misc_feature (562)..(562): n is a, c, g, or t
  misc_feature (566)..(566): n is a, c, g, or t
  misc_feature (568)..(570): n is a, c, g, or t
  misc_feature (574)..(574): n is a, c, g, or t
  misc_feature (577)..(577): n is a, c, g, or t
  misc_feature (579)..(579): n is a, c, g, or t
  misc_feature (594)..(594): n is a, c, g, or t
  misc_feature (605)..(605): n is a, c, g, or t
  misc_feature (608)..(608): n is a, c, g, or t
  misc_feature (623)..(623): n is a, c, g, or t
  misc_feature (641)..(641): n is a, c, g, or t
  misc_feature (650)..(650): n is a, c, g, or t
  misc_feature (655)..(655): n is a, c, g, or t
  misc_feature (677)..(677): n is a, c, g, or t
  misc_feature (698)..(698): n is a, c, g, or t
  misc_feature (700)..(700): n is a, c, g, or t
  misc_feature (705)..(705): n is a, c, g, or t
  misc_feature (707)..(707): n is a, c, g, or t
  misc_feature (709)..(709): n is a, c, g, or t
  misc_feature (711)..(713): n is a, c, g, or t
  misc_feature (715)..(715): n is a, c, g, or t
  misc_feature (717)..(717): n is a, c, g, or t
  misc_feature (721)..(721): n is a, c, g, or t
  misc_feature (723)..(723): n is a, c, g, or t
  misc_feature (725)..(725): n is a, c, g, or t
  misc_feature (1039)..(1040): n is a, c, g, or t
cgtgtgctgggtgatctagaggcatccggtaggcctgaagcctgcagtccggcagtcctgctcctggcttttgccctgctctgcctgccctggcttcaagaggctggtgccgtccaaaccgttccgttatccaggctttttgaccacgctatgctccaagcccatcgcgcgcaccagctggccattgacacctaccaggagtttgaagaaacctatatcccaaaggaccagaagtattcattcctgcatgactcccagacctccttctgcttctcagactctattccgacaccctccaacatggaggaaacgcaacagaaatccaatctagagctgctccgcatctccctgctgctcatcgagtcgtggctggagcccgtgcggttcctcaggagtatgttcgccaacaacctggtgtatgacacctcggacagcgatgactatcacctcctaaaggacctagaggaaggcatccaaacgctgatgggggtgagggtggcnccagggntccccaancctgnnnccccactggcnncnagngctggggananaaacacngctncccncnnnttancantnaggcgctgacccaanagaactcaccntantcttcatttcccctngtgaatcctccaggcctntctctacancctgnaggggagggaggaaaatggatnaatgagagagggagggaacantnccaancncntnnncncncccncncntccttcactttgcagaggctggaagacggcagccgccggactgggcagatcctcaagcagacctacagcaagtttgacacaaactcgcacaaccatgacgcactgctcaagaactacgggctgctctactgcttcaggaaggacatggacaaggtcgagacattcctgcgcatggtgcagtgccgctctgtggacgggcagcgtgtgtgcttctagtgtgcccgagtagcatcctgtgacccctccccagtgcctctcctggccctgaaggtgccactccatgtgcccaccatgcccggtgtaccggagctcgnnaattc

SEQ ID NO: 733949 - DNA, 1083 bp, Homo sapiens
  misc_feature (501)..(501): n is a, c, g, or t
  misc_feature (508)..(508): n is a, c, g, or t
  misc_feature (516)..(516): n is a, c, g, or t
  misc_feature (521)..(523): n is a, c, g, or t
  misc_feature (534)..(535): n is a, c, g, or t
  misc_feature (537)..(537): n is a, c, g, or t
  misc_feature (540)..(540): n is a, c, g, or t
  misc_feature (549)..(549): n is a, c, g, or t
  misc_feature (551)..(551): n is a, c, g, or t
  misc_feature (558)..(558): n is a, c, g, or t
  misc_feature (562)..(562): n is a, c, g, or t
  misc_feature (566)..(566): n is a, c, g, or t
  misc_feature (568)..(570): n is a, c, g, or t
  misc_feature (574)..(574): n is a, c, g, or t
  misc_feature (577)..(577): n is a, c, g, or t
  misc_feature (579)..(579): n is a, c, g, or t
  misc_feature (594)..(594): n is a, c, g, or t
  misc_feature (605)..(605): n is a, c, g, or t
  misc_feature (608)..(608): n is a, c, g, or t
  misc_feature (623)..(623): n is a, c, g, or t
  misc_feature (641)..(641): n is a, c, g, or t
  misc_feature (650)..(650): n is a, c, g, or t
  misc_feature (655)..(655): n is a, c, g, or t
  misc_feature (677)..(677): n is a, c, g, or t
  misc_feature (698)..(698): n is a, c, g, or t
  misc_feature (700)..(700): n is a, c, g, or t
  misc_feature (705)..(705): n is a, c, g, or t
  misc_feature (707)..(707): n is a, c, g, or t
  misc_feature (709)..(709): n is a, c, g, or t
  misc_feature (711)..(713): n is a, c, g, or t
  misc_feature (715)..(715): n is a, c, g, or t
  misc_feature (717)..(717): n is a, c, g, or t
  misc_feature (721)..(721): n is a, c, g, or t
  misc_feature (723)..(723): n is a, c, g, or t
  misc_feature (725)..(725): n is a, c, g, or t
  misc_feature (1053)..(1053): n is a, c, g, or t
  misc_feature (1055)..(1055): n is a, c, g, or t
  misc_feature (1057)..(1057): n is a, c, g, or t
cgtgtgctgggtgatctagaggcatccggtaggcctgaagcctgcagtccggcagtcctgctcctggcttttgccctgctctgcctgccctggcttcaagaggctggtgccgtccaaaccgttccgttatccaggctttttgaccacgctatgctccaagcccatcgcgcgcaccagctggccattgacacctaccaggagtttgaagaaacctatatcccaaaggaccagaagtattcattcctgcatgactcccagacctccttctgcttctcagactctattccgacaccctccaacatggaggaaacgcaacagaaatccaatctagagctgctccgcatctccctgctgctcatcgagtcgtggctggagcccgtgcggttcctcaggagtatgttcgccaacaacctggtgtatgacacctcggacagcgatgactatcacctcctaaaggacctagaggaaggcatccaaacgctgatgggggtgagggtggcnccagggntccccaancctgnnnccccactggcnncnagngctggggananaaacacngctncccncnnnttancantnaggcgctgacccaanagaactcaccntantcttcatttcccctngtgaatcctccaggcctntctctacancctgnaggggagggaggaaaatggatnaatgagagagggagggaacantnccaancncntnnncncncccncncntccttcactttgcagaggctggaagacggcagccgccggactgggcagatcctcaagcagacctacagcaagtttgacacaaactcgcacaaccatgacgcactgctcaagaactacgggctgctctactgcttcaggaaggacatggacaaggtcgagacattcctgcgcatggtgcagtgccgctctgtggagggcagctgtggcttctaggtgcccgagtagcatcctgtgacccctccccagtgcctctcctggccctgaaggtgccactccagtgcccaccagccttgtcctaataaaattaagttgtatcatttcaaaaaanancncaaaacaacacaaaacacaaacatcc

SEQ ID NO: 733950 - DNA, 667 bp, Homo sapiens
  misc_feature (213)..(213): n is a, c, g, or t
  misc_feature (584)..(584): n is a, c, g, or t
  misc_feature (588)..(588): n is a, c, g, or t
  misc_feature (636)..(636): n is a, c, g, or t
  misc_feature (638)..(638): n is a, c, g, or t
  misc_feature (651)..(651): n is a, c, g, or t
  misc_feature (655)..(657): n is a, c, g, or t
  misc_feature (659)..(659): n is a, c, g, or t
cgtgtgctgggtgatctagaggcatccggtaggcctgaagcctgcagtccggcagtcctgctcctggcttttgccctgctctgcctgccctggcttcaagaggctggtgccgtccaaaccgttccgttatccaggctttttgaccacgctatgctccaagcccatcgcgcgcaccagctggccattgacacctaccagtgagttttgaagaanacctatatcccaaaggaccagaagtattcattcctgcatgactcccagacctccttctgcttctcagactctattccgacaccctccaacatggaggaaacgcaacagaaatccaatctagagctgctccgcatctccctgctgctcatcgagtcgtggctggagcccgtgcggttcctcaggagtatgttcgccaacaacctggtgtatgacacctcggacagctcacctagtggcaatggctccaggctcccggacgtccctgctcctggcttttgccctgctctgcctgccctggcttcaagaggctggtgccgtccaaaccgttccgttatccaggctttttgaccacgctatgctccaagcccatngcgngcaccagctggccattgacacctaccaggagtttgaagaaacctatancncaaaggaccaggnactnnngnccagcgta

SEQ ID NO: 733951 - DNA, 835 bp, Homo sapiens
  misc_feature (213)..(213): n is a, c, g, or t
  misc_feature (805)..(805): n is a, c, g, or t
  misc_feature (807)..(807): n is a, c, g, or t
  misc_feature (809)..(809): n is a, c, g, or t
cgtgtgctgggtgatctagaggcatccggtaggcctgaagcctgcagtccggcagtcctgctcctggcttttgccctgctctgcctgccctggcttcaagaggctggtgccgtccaaaccgttccgttatccaggctttttgaccacgctatgctccaagcccatcgcgcgcaccagctggccattgacacctaccagtgagttttgaagaanacctatatcccaaaggaccagaagtattcattcctgcatgactcccagacctccttctgcttctcagactctattccgacaccctccaacatggaggaaacgcaacagaaatccaatctagagctgctccgcatctccctgctgctcatcgagtcgtggctggagcccgtgcggttcctcaggagtatgttcgccaacaacctggtgtatgacacctcggacagcgatgactatcacctcctaaaggacctagaggaaggcatccaaacgctgatggggaggctggaagacggcagccgccggactgggcagatcctcaagcagacctacagcaagtttgacacaaactcgcacaaccatgacgcactgctcaagaactacgggctgctctactgcttcaggaaggacatggacaaggtcgagacattcctgcgcatggtgcagtgccgctctgtggagggcagctgtggcttctaggtgcccgagtagcatcctgtgacccctccccagtgcctctcctggccctgaaggtgccactccagtgcccaccagccttgtcctaataaaattaagttgtatcatttcaaaaaanancncaaaacaacacaaaacacaaacatcc

SEQ ID NO: 733952 - DNA, 797 bp, Homo sapiens
  misc_feature (213)..(213): n is a, c, g, or t
  misc_feature (791)..(792): n is a, c, g, or t
cgtgtgctgggtgatctagaggcatccggtaggcctgaagcctgcagtccggcagtcctgctcctggcttttgccctgctctgcctgccctggcttcaagaggctggtgccgtccaaaccgttccgttatccaggctttttgaccacgctatgctccaagcccatcgcgcgcaccagctggccattgacacctaccagtgagttttgaagaanacctatatcccaaaggaccagaagtattcattcctgcatgactcccagacctccttctgcttctcagactctattccgacaccctccaacatggaggaaacgcaacagaaatccaatctagagctgctccgcatctccctgctgctcatcgagtcgtggctggagcccgtgcggttcctcaggagtatgttcgccaacaacctggtgtatgacacctcggacagcgatgactatcacctcctaaaggacctagaggaaggcatccaaacgctgatggggaggctggaagacggcagccgccggactgggcagatcctcaagcagacctacagcaagtttgacacaaactcgcacaaccatgacgcactgctcaagaactacgggctgctctactgcttcaggaaggacatggacaaggtcgagacattcctgcgcatggtgcagtgccgctctgtggacgggcagcgtgtgtgcttctagtgtgcccgagtagcatcctgtgacccctccccagtgcctctcctggccctgaaggtgccactccatgtgcccaccatgcccggtgtaccggagctcgnnaattc

SEQ ID NO: 733953 - DNA, 752 bp, Homo sapiens
  misc_feature (213)..(213): n is a, c, g, or t
  misc_feature (694)..(694): n is a, c, g, or t
  misc_feature (729)..(729): n is a, c, g, or t
cgtgtgctgggtgatctagaggcatccggtaggcctgaagcctgcagtccggcagtcctgctcctggcttttgccctgctctgcctgccctggcttcaagaggctggtgccgtccaaaccgttccgttatccaggctttttgaccacgctatgctccaagcccatcgcgcgcaccagctggccattgacacctaccagtgagttttgaagaanacctatatcccaaaggaccagaagtattcattcctgcatgactcccagacctccttctgcttctcagactctattccgacaccctccaacatggaggaaacgcaacagaaatccaatctagagctgctccgcatctccctgctgctcatcgagtcgtggctggagcccgtgcggttcctcaggagtatgttcgccaacaacctggtgtatgacacctcggacagcgatgactatcacctcctaaaggacctagaggaaggcatccaaacgctgatggggaggctggaagacggcagccgccggactgggcagatcctcaagcagacctacagcaagtttgacacaaactcgcacaaccatgacgcactgctcaagaactacgggctgctctactgcttcaggaaggacatggacaaggtcgagacattcctgcgcatggtgcagtgccgctctgtggagggaactgtggtttactgccggnggatcctggacctccagtgcttctgcctgagtgcntcaggccacactgctattagtgt

SEQ ID NO: 733954 - DNA, 753 bp, Homo sapiens
  misc_feature (213)..(213): n is a, c, g, or t
  misc_feature (607)..(607): n is a, c, g, or t
  misc_feature (609)..(609): n is a, c, g, or t
  misc_feature (648)..(648): n is a, c, g, or t
  misc_feature (651)..(651): n is a, c, g, or t
  misc_feature (655)..(655): n is a, c, g, or t
  misc_feature (657)..(660): n is a, c, g, or t
  misc_feature (683)..(687): n is a, c, g, or t
  misc_feature (718)..(718): n is a, c, g, or t
cgtgtgctgggtgatctagaggcatccggtaggcctgaagcctgcagtccggcagtcctgctcctggcttttgccctgctctgcctgccctggcttcaagaggctggtgccgtccaaaccgttccgttatccaggctttttgaccacgctatgctccaagcccatcgcgcgcaccagctggccattgacacctaccagtgagttttgaagaanacctatatcccaaaggaccagaagtattcattcctgcatgactcccagacctccttctgcttctcagactctattccgacaccctccaacatggaggaaacgcaacagaaatccaatctagagctgctccgcatctccctgctgctcatcgagtcgtggctggagcccgtgcggttcctcaggagtatgttcgccaacaacctggtgtatgacacctcggacagcgatgactatcacctcctaaaggacctagaggaaggcatccaaacgctgatggggaggctggaagacggcagccgccggactgggcagatcctcaagcagacctacagcaagttacacaaactacagaaacaaccaataaacgcacagctacaagaacaacgagacatgntnaaacagctatacgaggaaagaaacaatagaaacaaaggncanaaanannnnagacagacaatagagaagaaagnnnnnctctgtggaagaagacaagaatgtggcttcnaggtagacaccaaagataagacaaaacaaaaaccc

SEQ ID NO: 733955 - DNA, 424 bp, Homo sapiens
  misc_feature (394)..(394): n is a, c, g, or t
  misc_feature (396)..(396): n is a, c, g, or t
  misc_feature (398)..(398): n is a, c, g, or t
cactaggcagtggtgggcaaaagccaggagcagggacgtcaggagcctggagccattgccactaggtgagctgtccacaggaccctgagtggttcggggagttgtggccttgggatcctcaagcagacctacagcaagtttgacacaaactcgcacaaccatgacgcactgctcaagaactacgggctgctctactgcttcaggaaggacatggacaaggtcgagacattcctgcgcatggtgcagtgccgctctgtggagggcagctgtggcttctaggtgcccgagtagcatcctgtgacccctccccagtgcctctcctggccctgaaggtgccactccagtgcccaccagccttgtcctaataaaattaagttgtatcatttcaaaaaanancncaaaacaacacaaaacacaaacatcc

SEQ ID NO: 733956 - DNA, 835 bp, Homo sapiens
  misc_feature (805)..(805): n is a, c, g, or t
  misc_feature (807)..(807): n is a, c, g, or t
  misc_feature (809)..(809): n is a, c, g, or t
gatgtagtcaggacgatgacgtgtggacagatgtactggtcagggaccgcactcggagtcctgctcctggcttttgccctgctctgcctgccctggcttcaagaggctggtgccgtccaaaccgttccgttatccaggctttttgaccacgctatgctccaagcccatcgcgcgcaccagctggccattgacacctaccaggagtttgaagaaacctatatcccaaaggaccagaagtattcattcctgcatgactcccagacctccttctgcttctcagactctattccgacaccctccaacatggaggaaacgcaacagaaatccaatctagagctgctccgcatctccctgctgctcatcgagtcgtggctggagcccgtgcggttcctcaggagtatgttcgccaacaacctggtgtatgacacctcggacagcgatgactatcacctcctaaaggacctagaggaaggcatccaaacgctgatggggaggctggaagacggcagccgccggactgggcagatcctcaagcagacctacagcaagtttgacacaaactcgcacaaccatgacgcactgctcaagaactacgggctgctctactgcttcaggaaggacatggacaaggtcgagacattcctgcgcatggtgcagtgccgctctgtggagggcagctgtggcttctaggtgcccgagtagcatcctgtgacccctccccagtgcctctcctggccctgaaggtgccactccagtgcccaccagccttgtcctaataaaattaagttgtatcatttcaaaaaanancncaaaacaacacaaaacacaaacatcc

SEQ ID NO: 733957 - DNA, 797 bp, Homo sapiens
  misc_feature (791)..(792): n is a, c, g, or t
gatgtagtcaggacgatgacgtgtggacagatgtactggtcagggaccgcactcggagtcctgctcctggcttttgccctgctctgcctgccctggcttcaagaggctggtgccgtccaaaccgttccgttatccaggctttttgaccacgctatgctccaagcccatcgcgcgcaccagctggccattgacacctaccaggagtttgaagaaacctatatcccaaaggaccagaagtattcattcctgcatgactcccagacctccttctgcttctcagactctattccgacaccctccaacatggaggaaacgcaacagaaatccaatctagagctgctccgcatctccctgctgctcatcgagtcgtggctggagcccgtgcggttcctcaggagtatgttcgccaacaacctggtgtatgacacctcggacagcgatgactatcacctcctaaaggacctagaggaaggcatccaaacgctgatggggaggctggaagacggcagccgccggactgggcagatcctcaagcagacctacagcaagtttgacacaaactcgcacaaccatgacgcactgctcaagaactacgggctgctctactgcttcaggaaggacatggacaaggtcgagacattcctgcgcatggtgcagtgccgctctgtggacgggcagcgtgtgtgcttctagtgtgcccgagtagcatcctgtgacccctccccagtgcctctcctggccctgaaggtgccactccatgtgcccaccatgcccggtgtaccggagctcgnnaattc

SEQ ID NO: 733958 - DNA, 752 bp, Homo sapiens
  misc_feature (694)..(694): n is a, c, g, or t
  misc_feature (729)..(729): n is a, c, g, or t
gatgtagtcaggacgatgacgtgtggacagatgtactggtcagggaccgcactcggagtcctgctcctggcttttgccctgctctgcctgccctggcttcaagaggctggtgccgtccaaaccgttccgttatccaggctttttgaccacgctatgctccaagcccatcgcgcgcaccagctggccattgacacctaccaggagtttgaagaaacctatatcccaaaggaccagaagtattcattcctgcatgactcccagacctccttctgcttctcagactctattccgacaccctccaacatggaggaaacgcaacagaaatccaatctagagctgctccgcatctccctgctgctcatcgagtcgtggctggagcccgtgcggttcctcaggagtatgttcgccaacaacctggtgtatgacacctcggacagcgatgactatcacctcctaaaggacctagaggaaggcatccaaacgctgatggggaggctggaagacggcagccgccggactgggcagatcctcaagcagacctacagcaagtttgacacaaactcgcacaaccatgacgcactgctcaagaactacgggctgctctactgcttcaggaaggacatggacaaggtcgagacattcctgcgcatggtgcagtgccgctctgtggagggaactgtggtttactgccggnggatcctggacctccagtgcttctgcctgagtgcntcaggccacactgctattagtgt

SEQ ID NO: 733959 - DNA, 753 bp, Homo sapiens
  misc_feature (607)..(607): n is a, c, g, or t
  misc_feature (609)..(609): n is a, c, g, or t
  misc_feature (648)..(648): n is a, c, g, or t
  misc_feature (651)..(651): n is a, c, g, or t
  misc_feature (655)..(655): n is a, c, g, or t
  misc_feature (657)..(660): n is a, c, g, or t
  misc_feature (683)..(687): n is a, c, g, or t
  misc_feature (718)..(718): n is a, c, g, or t
gatgtagtcaggacgatgacgtgtggacagatgtactggtcagggaccgcactcggagtcctgctcctggcttttgccctgctctgcctgccctggcttcaagaggctggtgccgtccaaaccgttccgttatccaggctttttgaccacgctatgctccaagcccatcgcgcgcaccagctggccattgacacctaccaggagtttgaagaaacctatatcccaaaggaccagaagtattcattcctgcatgactcccagacctccttctgcttctcagactctattccgacaccctccaacatggaggaaacgcaacagaaatccaatctagagctgctccgcatctccctgctgctcatcgagtcgtggctggagcccgtgcggttcctcaggagtatgttcgccaacaacctggtgtatgacacctcggacagcgatgactatcacctcctaaaggacctagaggaaggcatccaaacgctgatggggaggctggaagacggcagccgccggactgggcagatcctcaagcagacctacagcaagttacacaaactacagaaacaaccaataaacgcacagctacaagaacaacgagacatgntnaaacagctatacgaggaaagaaacaatagaaacaaaggncanaaanannnnagacagacaatagagaagaaagnnnnnctctgtggaagaagacaagaatgtggcttcnaggtagacaccaaagataagacaaaacaaaaaccc

SEQ ID NO: 733960 - DNA, 1026 bp, Homo sapiens
gatgtagtcaggacgatgacgtgtggacagatgtactggtcagggaccgcactcggagtcctgctcctggcttttgccctgctctgcctgccctggcttcaagaggctggtgccgtccaaaccgttccgttatccaggctttttgaccacgctatgctccaagcccatcgcgcgcaccagctggccattgacacctaccaggagtttgaagaaacctatatcccaaaggaccagaagtattcattcctgcatgactcccagacctccttctgcttctcagactctattccgacaccctccaacatggaggaaacgcaacagaaatccaatctagagctgctccgcatctccctgctgctcatcgagtcgtggctggagcccgtgcggttcctcaggagtatgttcgccaacaacctggtgtatgacacctcggacagcgatgactatcacctcctaaaggacctagaggaaggcatccaaacgctgatggggaggctggaagacggcagccgccggactgggcagatcctcaagcagacctacagcaagtttgacacaatagcttcgccgacaagcacttgacgtcactgctcaaagaagcttgacggggcttgctcatacatgactttcacggcaaatggtactatggcacaaagggtcgaggaacaattctctgggcggcattgtgctgccaggtggtcccgtcttcttgtgagatggtggcagccctggttgggtctttctgaagagtgccccagagtaggcatacctgtggactcccttcctctcaggtgccctctcgctgggggcccatggaaaagggtggggcactatcccaggtgtggccccgaacccgaagtccattggtttccctaaattaacatcactttaaaggttgggttattcttattcgcaaataataacccatgtaattaatggaatcaattaccagaatataagaacaatatttcgcgaggcctctcaattgtgggccgtatgaaaaagaatgttatgtaataaccgcag

SEQ ID NO: 733961 - DNA, 667 bp, Homo sapiens
  misc_feature (584)..(584): n is a, c, g, or t
  misc_feature (588)..(588): n is a, c, g, or t
  misc_feature (636)..(636): n is a, c, g, or t
  misc_feature (638)..(638): n is a, c, g, or t
  misc_feature (651)..(651): n is a, c, g, or t
  misc_feature (655)..(657): n is a, c, g, or t
  misc_feature (659)..(659): n is a, c, g, or t
gatgtagtcaggacgatgacgtgtggacagatgtactggtcagggaccgcactcggagtcctgctcctggcttttgccctgctctgcctgccctggcttcaagaggctggtgccgtccaaaccgttccgttatccaggctttttgaccacgctatgctccaagcccatcgcgcgcaccagctggccattgacacctaccaggagtttgaagaaacctatatcccaaaggaccagaagtattcattcctgcatgactcccagacctccttctgcttctcagactctattccgacaccctccaacatggaggaaacgcaacagaaatccaatctagagctgctccgcatctccctgctgctcatcgagtcgtggctggagcccgtgcggttcctcaggagtatgttcgccaacaacctggtgtatgacacctcggacagctcacctagtggcaatggctccaggctcccggacgtccctgctcctggcttttgccctgctctgcctgccctggcttcaagaggctggtgccgtccaaaccgttccgttatccaggctttttgaccacgctatgctccaagcccatngcgngcaccagctggccattgacacctaccaggagtttgaagaaacctatancncaaaggaccaggnactnnngnccagcgta

SEQ ID NO: 733962 - DNA, 1048 bp, Homo sapiens
  misc_feature (504)..(504): n is a, c, g, or t
  misc_feature (511)..(511): n is a, c, g, or t
  misc_feature (519)..(519): n is a, c, g, or t
  misc_feature (524)..(526): n is a, c, g, or t
  misc_feature (537)..(538): n is a, c, g, or t
  misc_feature (540)..(540): n is a, c, g, or t
  misc_feature (543)..(543): n is a, c, g, or t
  misc_feature (552)..(552): n is a, c, g, or t
  misc_feature (554)..(554): n is a, c, g, or t
  misc_feature (561)..(561): n is a, c, g, or t
  misc_feature (565)..(565): n is a, c, g, or t
  misc_feature (569)..(569): n is a, c, g, or t
  misc_feature (571)..(573): n is a, c, g, or t
  misc_feature (577)..(577): n is a, c, g, or t
  misc_feature (580)..(580): n is a, c, g, or t
  misc_feature (582)..(582): n is a, c, g, or t
  misc_feature (597)..(597): n is a, c, g, or t
  misc_feature (608)..(608): n is a, c, g, or t
  misc_feature (611)..(611): n is a, c, g, or t
  misc_feature (626)..(626): n is a, c, g, or t
  misc_feature (644)..(644): n is a, c, g, or t
  misc_feature (653)..(653): n is a, c, g, or t
  misc_feature (658)..(658): n is a, c, g, or t
  misc_feature (680)..(680): n is a, c, g, or t
  misc_feature (701)..(701): n is a, c, g, or t
  misc_feature (703)..(703): n is a, c, g, or t
  misc_feature (708)..(708): n is a, c, g, or t
  misc_feature (710)..(710): n is a, c, g, or t
  misc_feature (712)..(712): n is a, c, g, or t
  misc_feature (714)..(716): n is a, c, g, or t
  misc_feature (718)..(718): n is a, c, g, or t
  misc_feature (720)..(720): n is a, c, g, or t
  misc_feature (724)..(724): n is a, c, g, or t
  misc_feature (726)..(726): n is a, c, g, or t
  misc_feature (728)..(728): n is a, c, g, or t
  misc_feature (1042)..(1043): n is a, c, g, or t
gatgtagtcaggacgatgacgtgtggacagatgtactggtcagggaccgcactcggagtcctgctcctggcttttgccctgctctgcctgccctggcttcaagaggctggtgccgtccaaaccgttccgttatccaggctttttgaccacgctatgctccaagcccatcgcgcgcaccagctggccattgacacctaccaggagtttgaagaaacctatatcccaaaggaccagaagtattcattcctgcatgactcccagacctccttctgcttctcagactctattccgacaccctccaacatggaggaaacgcaacagaaatccaatctagagctgctccgcatctccctgctgctcatcgagtcgtggctggagcccgtgcggttcctcaggagtatgttcgccaacaacctggtgtatgacacctcggacagcgatgactatcacctcctaaaggacctagaggaaggcatccaaacgctgatgggggtgagggtggcnccagggntccccaancctgnnnccccactggcnncnagngctggggananaaacacngctncccncnnnttancantnaggcgctgacccaanagaactcaccntantcttcatttcccctngtgaatcctccaggcctntctctacancctgnaggggagggaggaaaatggatnaatgagagagggagggaacantnccaancncntnnncncncccncncntccttcactttgcagaggctggaagacggcagccgccggactgggcagatcctcaagcagacctacagcaagtttgacacaaactcgcacaaccatgacgcactgctcaagaactacgggctgctctactgcttcaggaaggacatggacaaggtcgagacattcctgcgcatggtgcagtgccgctctgtggacgggcagcgtgtgtgcttctagtgtgcccgagtagcatcctgtgacccctccccagtgcctctcctggccctgaaggtgccactccatgtgcccaccatgcccggtgtaccggagctcgnnaattc

SEQ ID NO: 733963 - DNA, 1086 bp, Homo sapiens
  misc_feature (504)..(504): n is a, c, g, or t
  misc_feature (511)..(511): n is a, c, g, or t
  misc_feature (519)..(519): n is a, c, g, or t
  misc_feature (524)..(526): n is a, c, g, or t
  misc_feature (537)..(538): n is a, c, g, or t
  misc_feature (540)..(540): n is a, c, g, or t
  misc_feature (543)..(543): n is a, c, g, or t
  misc_feature (552)..(552): n is a, c, g, or t
  misc_feature (554)..(554): n is a, c, g, or t
  misc_feature (561)..(561): n is a, c, g, or t
  misc_feature (565)..(565): n is a, c, g, or t
  misc_feature (569)..(569): n is a, c, g, or t
  misc_feature (571)..(573): n is a, c, g, or t
  misc_feature (577)..(577): n is a, c, g, or t
  misc_feature (580)..(580): n is a, c, g, or t
  misc_feature (582)..(582): n is a, c, g, or t
  misc_feature (597)..(597): n is a, c, g, or t
  misc_feature (608)..(608): n is a, c, g, or t
  misc_feature (611)..(611): n is a, c, g, or t
  misc_feature (626)..(626): n is a, c, g, or t
  misc_feature (644)..(644): n is a, c, g, or t
  misc_feature (653)..(653): n is a, c, g, or t
  misc_feature (658)..(658): n is a, c, g, or t
  misc_feature (680)..(680): n is a, c, g, or t
  misc_feature (701)..(701): n is a, c, g, or t
  misc_feature (703)..(703): n is a, c, g, or t
  misc_feature (708)..(708): n is a, c, g, or t
  misc_feature (710)..(710): n is a, c, g, or t
  misc_feature (712)..(712): n is a, c, g, or t
  misc_feature (714)..(716): n is a, c, g, or t
  misc_feature (718)..(718): n is a, c, g, or t
  misc_feature (720)..(720): n is a, c, g, or t
  misc_feature (724)..(724): n is a, c, g, or t
  misc_feature (726)..(726): n is a, c, g, or t
  misc_feature (728)..(728): n is a, c, g, or t
  misc_feature (1056)..(1056): n is a, c, g, or t
  misc_feature (1058)..(1058): n is a, c, g, or t
  misc_feature (1060)..(1060): n is a, c, g, or t
gatgtagtcaggacgatgacgtgtggacagatgtactggtcagggaccgcactcggagtcctgctcctggcttttgccctgctctgcctgccctggcttcaagaggctggtgccgtccaaaccgttccgttatccaggctttttgaccacgctatgctccaagcccatcgcgcgcaccagctggccattgacacctaccaggagtttgaagaaacctatatcccaaaggaccagaagtattcattcctgcatgactcccagacctccttctgcttctcagactctattccgacaccctccaacatggaggaaacgcaacagaaatccaatctagagctgctccgcatctccctgctgctcatcgagtcgtggctggagcccgtgcggttcctcaggagtatgttcgccaacaacctggtgtatgacacctcggacagcgatgactatcacctcctaaaggacctagaggaaggcatccaaacgctgatgggggtgagggtggcnccagggntccccaancctgnnnccccactggcnncnagngctggggananaaacacngctncccncnnnttancantnaggcgctgacccaanagaactcaccntantcttcatttcccctngtgaatcctccaggcctntctctacancctgnaggggagggaggaaaatggatnaatgagagagggagggaacantnccaancncntnnncncncccncncntccttcactttgcagaggctggaagacggcagccgccggactgggcagatcctcaagcagacctacagcaagtttgacacaaactcgcacaaccatgacgcactgctcaagaactacgggctgctctactgcttcaggaaggacatggacaaggtcgagacattcctgcgcatggtgcagtgccgctctgtggagggcagctgtggcttctaggtgcccgagtagcatcctgtgacccctccccagtgcctctcctggccctgaaggtgccactccagtgcccaccagccttgtcctaataaaattaagttgtatcatttcaaaaaanancncaaaacaacacaaaacacaaacatcc

SEQ ID NO: 733964 - DNA, 670 bp, Homo sapiens
  misc_feature (216)..(216): n is a, c, g, or t
  misc_feature (587)..(587): n is a, c, g, or t
  misc_feature (591)..(591): n is a, c, g, or t
  misc_feature (639)..(639): n is a, c, g, or t
  misc_feature (641)..(641): n is a, c, g, or t
  misc_feature (654)..(654): n is a, c, g, or t
  misc_feature (658)..(660): n is a, c, g, or t
  misc_feature (662)..(662): n is a, c, g, or t
gatgtagtcaggacgatgacgtgtggacagatgtactggtcagggaccgcactcggagtcctgctcctggcttttgccctgctctgcctgccctggcttcaagaggctggtgccgtccaaaccgttccgttatccaggctttttgaccacgctatgctccaagcccatcgcgcgcaccagctggccattgacacctaccagtgagttttgaagaanacctatatcccaaaggaccagaagtattcattcctgcatgactcccagacctccttctgcttctcagactctattccgacaccctccaacatggaggaaacgcaacagaaatccaatctagagctgctccgcatctccctgctgctcatcgagtcgtggctggagcccgtgcggttcctcaggagtatgttcgccaacaacctggtgtatgacacctcggacagctcacctagtggcaatggctccaggctcccggacgtccctgctcctggcttttgccctgctctgcctgccctggcttcaagaggctggtgccgtccaaaccgttccgttatccaggctttttgaccacgctatgctccaagcccatngcgngcaccagctggccattgacacctaccaggagtttgaagaaacctatancncaaaggaccaggnactnnngnccagcgta

SEQ ID NO: 733965 - DNA, 838 bp, Homo sapiens
  misc_feature (216)..(216): n is a, c, g, or t
  misc_feature (808)..(808): n is a, c, g, or t
  misc_feature (810)..(810): n is a, c, g, or t
  misc_feature (812)..(812): n is a, c, g, or t
gatgtagtcaggacgatgacgtgtggacagatgtactggtcagggaccgcactcggagtcctgctcctggcttttgccctgctctgcctgccctggcttcaagaggctggtgccgtccaaaccgttccgttatccaggctttttgaccacgctatgctccaagcccatcgcgcgcaccagctggccattgacacctaccagtgagttttgaagaanacctatatcccaaaggaccagaagtattcattcctgcatgactcccagacctccttctgcttctcagactctattccgacaccctccaacatggaggaaacgcaacagaaatccaatctagagctgctccgcatctccctgctgctcatcgagtcgtggctggagcccgtgcggttcctcaggagtatgttcgccaacaacctggtgtatgacacctcggacagcgatgactatcacctcctaaaggacctagaggaaggcatccaaacgctgatggggaggctggaagacggcagccgccggactgggcagatcctcaagcagacctacagcaagtttgacacaaactcgcacaaccatgacgcactgctcaagaactacgggctgctctactgcttcaggaaggacatggacaaggtcgagacattcctgcgcatggtgcagtgccgctctgtggagggcagctgtggcttctaggtgcccgagtagcatcctgtgacccctccccagtgcctctcctggccctgaaggtgccactccagtgcccaccagccttgtcctaataaaattaagttgtatcatttcaaaaaanancncaaaacaacacaaaacacaaacatcc

SEQ ID NO: 733966 - DNA, 800 bp, Homo sapiens
  misc_feature (216)..(216): n is a, c, g, or t
  misc_feature (794)..(795): n is a, c, g, or t
gatgtagtcaggacgatgacgtgtggacagatgtactggtcagggaccgcactcggagtcctgctcctggcttttgccctgctctgcctgccctggcttcaagaggctggtgccgtccaaaccgttccgttatccaggctttttgaccacgctatgctccaagcccatcgcgcgcaccagctggccattgacacctaccagtgagttttgaagaanacctatatcccaaaggaccagaagtattcattcctgcatgactcccagacctccttctgcttctcagactctattccgacaccctccaacatggaggaaacgcaacagaaatccaatctagagctgctccgcatctccctgctgctcatcgagtcgtggctggagcccgtgcggttcctcaggagtatgttcgccaacaacctggtgtatgacacctcggacagcgatgactatcacctcctaaaggacctagaggaaggcatccaaacgctgatggggaggctggaagacggcagccgccggactgggcagatcctcaagcagacctacagcaagtttgacacaaactcgcacaaccatgacgcactgctcaagaactacgggctgctctactgcttcaggaaggacatggacaaggtcgagacattcctgcgcatggtgcagtgccgctctgtggacgggcagcgtgtgtgcttctagtgtgcccgagtagcatcctgtgacccctccccagtgcctctcctggccctgaaggtgccactccatgtgcccaccatgcccggtgtaccggagctcgnnaattc

SEQ ID NO: 733967 - DNA, 755 bp, Homo sapiens
  misc_feature (216)..(216): n is a, c, g, or t
  misc_feature (697)..(697): n is a, c, g, or t
  misc_feature (732)..(732): n is a, c, g, or t
gatgtagtcaggacgatgacgtgtggacagatgtactggtcagggaccgcactcggagtcctgctcctggcttttgccctgctctgcctgccctggcttcaagaggctggtgccgtccaaaccgttccgttatccaggctttttgaccacgctatgctccaagcccatcgcgcgcaccagctggccattgacacctaccagtgagttttgaagaanacctatatcccaaaggaccagaagtattcattcctgcatgactcccagacctccttctgcttctcagactctattccgacaccctccaacatggaggaaacgcaacagaaatccaatctagagctgctccgcatctccctgctgctcatcgagtcgtggctggagcccgtgcggttcctcaggagtatgttcgccaacaacctggtgtatgacacctcggacagcgatgactatcacctcctaaaggacctagaggaaggcatccaaacgctgatggggaggctggaagacggcagccgccggactgggcagatcctcaagcagacctacagcaagtttgacacaaactcgcacaaccatgacgcactgctcaagaactacgggctgctctactgcttcaggaaggacatggacaaggtcgagacattcctgcgcatggtgcagtgccgctctgtggagggaactgtggtttactgccggnggatcctggacctccagtgcttctgcctgagtgcntcaggccacactgctattagtgt

SEQ ID NO: 733968 - DNA, 756 bp, Homo sapiens
  misc_feature (216)..(216): n is a, c, g, or t
  misc_feature (610)..(610): n is a, c, g, or t
  misc_feature (612)..(612): n is a, c, g, or t
  misc_feature (651)..(651): n is a, c, g, or t
  misc_feature (654)..(654): n is a, c, g, or t
  misc_feature (658)..(658): n is a, c, g, or t
  misc_feature (660)..(663): n is a, c, g, or t
  misc_feature (686)..(690): n is a, c, g, or t
  misc_feature (721)..(721): n is a, c, g, or t
gatgtagtcaggacgatgacgtgtggacagatgtactggtcagggaccgcactcggagtcctgctcctggcttttgccctgctctgcctgccctggcttcaagaggctggtgccgtccaaaccgttccgttatccaggctttttgaccacgctatgctccaagcccatcgcgcgcaccagctggccattgacacctaccagtgagttttgaagaanacctatatcccaaaggaccagaagtattcattcctgcatgactcccagacctccttctgcttctcagactctattccgacaccctccaacatggaggaaacgcaacagaaatccaatctagagctgctccgcatctccctgctgctcatcgagtcgtggctggagcccgtgcggttcctcaggagtatgttcgccaacaacctggtgtatgacacctcggacagcgatgactatcacctcctaaaggacctagaggaaggcatccaaacgctgatggggaggctggaagacggcagccgccggactgggcagatcctcaagcagacctacagcaagttacacaaactacagaaacaaccaataaacgcacagctacaagaacaacgagacatgntnaaacagctatacgaggaaagaaacaatagaaacaaaggncanaaanannnnagacagacaatagagaagaaagnnnnnctctgtggaagaagacaagaatgtggcttcnaggtagacaccaaagataagacaaaacaaaaaccc

SEQ ID NO: 733969 - DNA, 825 bp, Homo sapiens
  misc_feature (10)..(10): n is a, c, g, or t
  misc_feature (819)..(820): n is a, c, g, or t
ccggaggcgnttgaatggccccctcgaaccactcagggtcctgtggacagctcacctagtggcaatggctccaggctcccggacgtccctgctcctggcttttgccctgctctgcctgccctggcttcaagaggctggtgccgtccaaaccgttccgttatccaggctttttgaccacgctatgctccaagcccatcgcgcgcaccagctggccattgacacctaccaggagtttgaagaaacctatatcccaaaggaccagaagtattcattcctgcatgactcccagacctccttctgcttctcagactctattccgacaccctccaacatggaggaaacgcaacagaaatccaatctagagctgctccgcatctccctgctgctcatcgagtcgtggctggagcccgtgcggttcctcaggagtatgttcgccaacaacctggtgtatgacacctcggacagcgatgactatcacctcctaaaggacctagaggaaggcatccaaacgctgatggggaggctggaagacggcagccgccggactgggcagatcctcaagcagacctacagcaagtttgacacaaactcgcacaaccatgacgcactgctcaagaactacgggctgctctactgcttcaggaaggacatggacaaggtcgagacattcctgcgcatggtgcagtgccgctctgtggacgggcagcgtgtgtgcttctagtgtgcccgagtagcatcctgtgacccctccccagtgcctctcctggccctgaaggtgccactccatgtgcccaccatgcccggtgtaccggagctcgnnaattc

SEQ ID NO: 733970 - DNA, 780 bp, Homo sapiens
  misc_feature (10)..(10): n is a, c, g, or t
  misc_feature (722)..(722): n is a, c, g, or t
  misc_feature (757)..(757): n is a, c, g, or t
ccggaggcgnttgaatggccccctcgaaccactcagggtcctgtggacagctcacctagtggcaatggctccaggctcccggacgtccctgctcctggcttttgccctgctctgcctgccctggcttcaagaggctggtgccgtccaaaccgttccgttatccaggctttttgaccacgctatgctccaagcccatcgcgcgcaccagctggccattgacacctaccaggagtttgaagaaacctatatcccaaaggaccagaagtattcattcctgcatgactcccagacctccttctgcttctcagactctattccgacaccctccaacatggaggaaacgcaacagaaatccaatctagagctgctccgcatctccctgctgctcatcgagtcgtggctggagcccgtgcggttcctcaggagtatgttcgccaacaacctggtgtatgacacctcggacagcgatgactatcacctcctaaaggacctagaggaaggcatccaaacgctgatggggaggctggaagacggcagccgccggactgggcagatcctcaagcagacctacagcaagtttgacacaaactcgcacaaccatgacgcactgctcaagaactacgggctgctctactgcttcaggaaggacatggacaaggtcgagacattcctgcgcatggtgcagtgccgctctgtggagggaactgtggtttactgccggnggatcctggacctccagtgcttctgcctgagtgcntcaggccacactgctattagtgt

SEQ ID NO: 733971 - DNA, 695 bp, Homo sapiens
  misc_feature (10)..(10): n is a, c, g, or t
  misc_feature (612)..(612): n is a, c, g, or t
  misc_feature (616)..(616): n is a, c, g, or t
  misc_feature (664)..(664): n is a, c, g, or t
  misc_feature (666)..(666): n is a, c, g, or t
  misc_feature (679)..(679): n is a, c, g, or t
  misc_feature (683)..(685): n is a, c, g, or t
  misc_feature (687)..(687): n is a, c, g, or t
ccggaggcgnttgaatggccccctcgaaccactcagggtcctgtggacagctcacctagtggcaatggctccaggctcccggacgtccctgctcctggcttttgccctgctctgcctgccctggcttcaagaggctggtgccgtccaaaccgttccgttatccaggctttttgaccacgctatgctccaagcccatcgcgcgcaccagctggccattgacacctaccaggagtttgaagaaacctatatcccaaaggaccagaagtattcattcctgcatgactcccagacctccttctgcttctcagactctattccgacaccctccaacatggaggaaacgcaacagaaatccaatctagagctgctccgcatctccctgctgctcatcgagtcgtggctggagcccgtgcggttcctcaggagtatgttcgccaacaacctggtgtatgacacctcggacagctcacctagtggcaatggctccaggctcccggacgtccctgctcctggcttttgccctgctctgcctgccctggcttcaagaggctggtgccgtccaaaccgttccgttatccaggctttttgaccacgctatgctccaagcccatngcgngcaccagctggccattgacacctaccaggagtttgaagaaacctatancncaaaggaccaggnactnnngnccagcgta

SEQ ID NO: 733972 - DNA, 1054 bp, Homo sapiens
  misc_feature (10)..(10): n is a, c, g, or t
ccggaggcgnttgaatggccccctcgaaccactcagggtcctgtggacagctcacctagtggcaatggctccaggctcccggacgtccctgctcctggcttttgccctgctctgcctgccctggcttcaagaggctggtgccgtccaaaccgttccgttatccaggctttttgaccacgctatgctccaagcccatcgcgcgcaccagctggccattgacacctaccaggagtttgaagaaacctatatcccaaaggaccagaagtattcattcctgcatgactcccagacctccttctgcttctcagactctattccgacaccctccaacatggaggaaacgcaacagaaatccaatctagagctgctccgcatctccctgctgctcatcgagtcgtggctggagcccgtgcggttcctcaggagtatgttcgccaacaacctggtgtatgacacctcggacagcgatgactatcacctcctaaaggacctagaggaaggcatccaaacgctgatggggaggctggaagacggcagccgccggactgggcagatcctcaagcagacctacagcaagtttgacacaatagcttcgccgacaagcacttgacgtcactgctcaaagaagcttgacggggcttgctcatacatgactttcacggcaaatggtactatggcacaaagggtcgaggaacaattctctgggcggcattgtgctgccaggtggtcccgtcttcttgtgagatggtggcagccctggttgggtctttctgaagagtgccccagagtaggcatacctgtggactcccttcctctcaggtgccctctcgctgggggcccatggaaaagggtggggcactatcccaggtgtggccccgaacccgaagtccattggtttccctaaattaacatcactttaaaggttgggttattcttattcgcaaataataacccatgtaattaatggaatcaattaccagaatataagaacaatatttcgcgaggcctctcaattgtgggccgtatgaaaaagaatgttatgtaataaccgcag

SEQ ID NO: 733973 - DNA, 1076 bp, Homo sapiens
  misc_feature (10)..(10): n is a, c, g, or t
  misc_feature (532)..(532): n is a, c, g, or t
  misc_feature (539)..(539): n is a, c, g, or t
  misc_feature (547)..(547): n is a, c, g, or t
  misc_feature (552)..(554): n is a, c, g, or t
  misc_feature (565)..(566): n is a, c, g, or t
  misc_feature (568)..(568): n is a, c, g, or t
  misc_feature (571)..(571): n is a, c, g, or t
  misc_feature (580)..(580): n is a, c, g, or t
  misc_feature (582)..(582): n is a, c, g, or t
  misc_feature (589)..(589): n is a, c, g, or t
  misc_feature (593)..(593): n is a, c, g, or t
  misc_feature (597)..(597): n is a, c, g, or t
  misc_feature (599)..(601): n is a, c, g, or t
  misc_feature (605)..(605): n is a, c, g, or t
  misc_feature (608)..(608): n is a, c, g, or t
  misc_feature (610)..(610): n is a, c, g, or t
  misc_feature (625)..(625): n is a, c, g, or t
  misc_feature (636)..(636): n is a, c, g, or t
  misc_feature (639)..(639): n is a, c, g, or t
  misc_feature (654)..(654): n is a, c, g, or t
  misc_feature (672)..(672): n is a, c, g, or t
  misc_feature (681)..(681): n is a, c, g, or t
  misc_feature (686)..(686): n is a, c, g, or t
  misc_feature (708)..(708): n is a, c, g, or t
  misc_feature (729)..(729): n is a, c, g, or t
  misc_feature (731)..(731): n is a, c, g, or t
  misc_feature (736)..(736): n is a, c, g, or t
  misc_feature (738)..(738): n is a, c, g, or t
  misc_feature (740)..(740): n is a, c, g, or t
  misc_feature (742)..(744): n is a, c, g, or t
  misc_feature (746)..(746): n is a, c, g, or t
  misc_feature (748)..(748): n is a, c, g, or t
  misc_feature (752)..(752): n is a, c, g, or t
  misc_feature (754)..(754): n is a, c, g, or t
  misc_feature (756)..(756): n is a, c, g, or t
  misc_feature (1070)..(1071): n is a, c, g, or t
ccggaggcgnttgaatggccccctcgaaccactcagggtcctgtggacagctcacctagtggcaatggctccaggctcccggacgtccctgctcctggcttttgccctgctctgcctgccctggcttcaagaggctggtgccgtccaaaccgttccgttatccaggctttttgaccacgctatgctccaagcccatcgcgcgcaccagctggccattgacacctaccaggagtttgaagaaacctatatcccaaaggaccagaagtattcattcctgcatgactcccagacctccttctgcttctcagactctattccgacaccctccaacatggaggaaacgcaacagaaatccaatctagagctgctccgcatctccctgctgctcatcgagtcgtggctggagcccgtgcggttcctcaggagtatgttcgccaacaacctggtgtatgacacctcggacagcgatgactatcacctcctaaaggacctagaggaaggcatccaaacgctgatgggggtgagggtggcnccagggntccccaancctgnnnccccactggcnncnagngctggggananaaacacngctncccncnnnttancantnaggcgctgacccaanagaactcaccntantcttcatttcccctngtgaatcctccaggcctntctctacancctgnaggggagggaggaaaatggatnaatgagagagggagggaacantnccaancncntnnncncncccncncntccttcactttgcagaggctggaagacggcagccgccggactgggcagatcctcaagcagacctacagcaagtttgacacaaactcgcacaaccatgacgcactgctcaagaactacgggctgctctactgcttcaggaaggacatggacaaggtcgagacattcctgcgcatggtgcagtgccgctctgtggacgggcagcgtgtgtgcttctagtgtgcccgagtagcatcctgtgacccctccccagtgcctctcctggccctgaaggtgccactccatgtgcccaccatgcccggtgtaccggagctcgnnaattc

SEQ ID NO: 733974 - DNA, 1114 bp, Homo sapiens
  misc_feature (10)..(10): n is a, c, g, or t
  misc_feature (532)..(532): n is a, c, g, or t
  misc_feature (539)..(539): n is a, c, g, or t
  misc_feature (547)..(547): n is a, c, g, or t
  misc_feature (552)..(554): n is a, c, g, or t
  misc_feature (565)..(566): n is a, c, g, or t
  misc_feature (568)..(568): n is a, c, g, or t
  misc_feature (571)..(571): n is a, c, g, or t
  misc_feature (580)..(580): n is a, c, g, or t
  misc_feature (582)..(582): n is a, c, g, or t
  misc_feature (589)..(589): n is a, c, g, or t
  misc_feature (593)..(593): n is a, c, g, or t
  misc_feature (597)..(597): n is a, c, g, or t
  misc_feature (599)..(601): n is a, c, g, or t
  misc_feature (605)..(605): n is a, c, g, or t
  misc_feature (608)..(608): n is a, c, g, or t
  misc_feature (610)..(610): n is a, c, g, or t
  misc_feature (625)..(625): n is a, c, g, or t
  misc_feature (636)..(636): n is a, c, g, or t
  misc_feature (639)..(639): n is a, c, g, or t
  misc_feature (654)..(654): n is a, c, g, or t
  misc_feature (672)..(672): n is a, c, g, or t
  misc_feature (681)..(681): n is a, c, g, or t
  misc_feature (686)..(686): n is a, c, g, or t
  misc_feature (708)..(708): n is a, c, g, or t
  misc_feature (729)..(729): n is a, c, g, or t
  misc_feature (731)..(731): n is a, c, g, or t
  misc_feature (736)..(736): n is a, c, g, or t
  misc_feature (738)..(738): n is a, c, g, or t
  misc_feature (740)..(740): n is a, c, g, or t
  misc_feature (742)..(744): n is a, c, g, or t
  misc_feature (746)..(746): n is a, c, g, or t
  misc_feature (748)..(748): n is a, c, g, or t
  misc_feature (752)..(752): n is a, c, g, or t
  misc_feature (754)..(754): n is a, c, g, or t
  misc_feature (756)..(756): n is a, c, g, or t
  misc_feature (1084)..(1084): n is a, c, g, or t
  misc_feature (1086)..(1086): n is a, c, g, or t
  misc_feature (1088)..(1088): n is a, c, g, or t
ccggaggcgnttgaatggccccctcgaaccactcagggtcctgtggacagctcacctagtggcaatggctccaggctcccggacgtccctgctcctggcttttgccctgctctgcctgccctggcttcaagaggctggtgccgtccaaaccgttccgttatccaggctttttgaccacgctatgctccaagcccatcgcgcgcaccagctggccattgacacctaccaggagtttgaagaaacctatatcccaaaggaccagaagtattcattcctgcatgactcccagacctccttctgcttctcagactctattccgacaccctccaacatggaggaaacgcaacagaaatccaatctagagctgctccgcatctccctgctgctcatcgagtcgtggctggagcccgtgcggttcctcaggagtatgttcgccaacaacctggtgtatgacacctcggacagcgatgactatcacctcctaaaggacctagaggaaggcatccaaacgctgatgggggtgagggtggcnccagggntccccaancctgnnnccccactggcnncnagngctggggananaaacacngctncccncnnnttancantnaggcgctgacccaanagaactcaccntantcttcatttcccctngtgaatcctccaggcctntctctacancctgnaggggagggaggaaaatggatnaatgagagagggagggaacantnccaancncntnnncncncccncncntccttcactttgcagaggctggaagacggcagccgccggactgggcagatcctcaagcagacctacagcaagtttgacacaaactcgcacaaccatgacgcactgctcaagaactacgggctgctctactgcttcaggaaggacatggacaaggtcgagacattcctgcgcatggtgcagtgccgctctgtggagggcagctgtggcttctaggtgcccgagtagcatcctgtgacccctccccagtgcctctcctggccctgaaggtgccactccagtgcccaccagccttgtcctaataaaattaagttgtatcatttcaaaaaanancncaaaacaacacaaaacacaaacatcc

SEQ ID NO: 733975 - DNA, 698 bp, Homo sapiens
  misc_feature (10)..(10): n is a, c, g, or t
  misc_feature (244)..(244): n is a, c, g, or t
  misc_feature (615)..(615): n is a, c, g, or t
  misc_feature (619)..(619): n is a, c, g, or t
  misc_feature (667)..(667): n is a, c, g, or t
  misc_feature (669)..(669): n is a, c, g, or t
  misc_feature (682)..(682): n is a, c, g, or t
  misc_feature (686)..(688): n is a, c, g, or t
  misc_feature (690)..(690): n is a, c, g, or t
ccggaggcgnttgaatggccccctcgaaccactcagggtcctgtggacagctcacctagtggcaatggctccaggctcccggacgtccctgctcctggcttttgccctgctctgcctgccctggcttcaagaggctggtgccgtccaaaccgttccgttatccaggctttttgaccacgctatgctccaagcccatcgcgcgcaccagctggccattgacacctaccagtgagttttgaagaanacctatatcccaaaggaccagaagtattcattcctgcatgactcccagacctccttctgcttctcagactctattccgacaccctccaacatggaggaaacgcaacagaaatccaatctagagctgctccgcatctccctgctgctcatcgagtcgtggctggagcccgtgcggttcctcaggagtatgttcgccaacaacctggtgtatgacacctcggacagctcacctagtggcaatggctccaggctcccggacgtccctgctcctggcttttgccctgctctgcctgccctggcttcaagaggctggtgccgtccaaaccgttccgttatccaggctttttgaccacgctatgctccaagcccatngcgngcaccagctggccattgacacctaccaggagtttgaagaaacctatancncaaaggaccaggnactnnngnccagcgta

SEQ ID NO: 733976 - DNA, 828 bp, Homo sapiens
  misc_feature (10)..(10): n is a, c, g, or t
  misc_feature (244)..(244): n is a, c, g, or t
  misc_feature (822)..(823): n is a, c, g, or t
ccggaggcgnttgaatggccccctcgaaccactcagggtcctgtggacagctcacctagtggcaatggctccaggctcccggacgtccctgctcctggcttttgccctgctctgcctgccctggcttcaagaggctggtgccgtccaaaccgttccgttatccaggctttttgaccacgctatgctccaagcccatcgcgcgcaccagctggccattgacacctaccagtgagttttgaagaanacctatatcccaaaggaccagaagtattcattcctgcatgactcccagacctccttctgcttctcagactctattccgacaccctccaacatggaggaaacgcaacagaaatccaatctagagctgctccgcatctccctgctgctcatcgagtcgtggctggagcccgtgcggttcctcaggagtatgttcgccaacaacctggtgtatgacacctcggacagcgatgactatcacctcctaaaggacctagaggaaggcatccaaacgctgatggggaggctggaagacggcagccgccggactgggcagatcctcaagcagacctacagcaagtttgacacaaactcgcacaaccatgacgcactgctcaagaactacgggctgctctactgcttcaggaaggacatggacaaggtcgagacattcctgcgcatggtgcagtgccgctctgtggacgggcagcgtgtgtgcttctagtgtgcccgagtagcatcctgtgacccctccccagtgcctctcctggccctgaaggtgccactccatgtgcccaccatgcccggtgtaccggagctcgnnaattc

SEQ ID NO: 733977 - DNA, 783 bp, Homo sapiens
  misc_feature (10)..(10): n is a, c, g, or t
  misc_feature (244)..(244): n is a, c, g, or t
  misc_feature (725)..(725): n is a, c, g, or t
  misc_feature (760)..(760): n is a, c, g, or t
ccggaggcgnttgaatggccccctcgaaccactcagggtcctgtggacagctcacctagtggcaatggctccaggctcccggacgtccctgctcctggcttttgccctgctctgcctgccctggcttcaagaggctggtgccgtccaaaccgttccgttatccaggctttttgaccacgctatgctccaagcccatcgcgcgcaccagctggccattgacacctaccagtgagttttgaagaanacctatatcccaaaggaccagaagtattcattcctgcatgactcccagacctccttctgcttctcagactctattccgacaccctccaacatggaggaaacgcaacagaaatccaatctagagctgctccgcatctccctgctgctcatcgagtcgtggctggagcccgtgcggttcctcaggagtatgttcgccaacaacctggtgtatgacacctcggacagcgatgactatcacctcctaaaggacctagaggaaggcatccaaacgctgatggggaggctggaagacggcagccgccggactgggcagatcctcaagcagacctacagcaagtttgacacaaactcgcacaaccatgacgcactgctcaagaactacgggctgctctactgcttcaggaaggacatggacaaggtcgagacattcctgcgcatggtgcagtgccgctctgtggagggaactgtggtttactgccggnggatcctggacctccagtgcttctgcctgagtgcntcaggccacactgctattagtgt

SEQ ID NO: 733978 - DNA, 695 bp, Homo sapiens
  misc_feature (10)..(10): n is a, c, g, or t
  misc_feature (214)..(214): n is a, c, g, or t
  misc_feature (612)..(612): n is a, c, g, or t
  misc_feature (616)..(616): n is a, c, g, or t
  misc_feature (664)..(664): n is a, c, g, or t
  misc_feature (666)..(666): n is a, c, g, or t
  misc_feature (679)..(679): n is a, c, g, or t
  misc_feature (683)..(685): n is a, c, g, or t
  misc_feature (687)..(687): n is a, c, g, or t
ccggaggcgnttgaatggccccctcgaaccactcagggtcctgtggacagctcacctagtggcaatggctccaggctcccggacgtccctgctcctggcttttgccctgctctgcctgccctggcttcaagagggcagtgccttcccaaccattcccttatccaggctttttgacaacgctatgctccgcgcccatcgtctgcaccagctggcntttgacacctaccaggagtttgaagaaacctatatcccaaaggaccagaagtattcattcctgcatgactcccagacctccttctgcttctcagactctattccgacaccctccaacatggaggaaacgcaacagaaatccaatctagagctgctccgcatctccctgctgctcatcgagtcgtggctggagcccgtgcggttcctcaggagtatgttcgccaacaacctggtgtatgacacctcggacagctcacctagtggcaatggctccaggctcccggacgtccctgctcctggcttttgccctgctctgcctgccctggcttcaagaggctggtgccgtccaaaccgttccgttatccaggctttttgaccacgctatgctccaagcccatngcgngcaccagctggccattgacacctaccaggagtttgaagaaacctatancncaaaggaccaggnactnnngnccagcgta

SEQ ID NO: 733979 - DNA, 825 bp, Homo sapiens
  misc_feature (10)..(10): n is a, c, g, or t
  misc_feature (214)..(214): n is a, c, g, or t
  misc_feature (819)..(820): n is a, c, g, or t
ccggaggcgnttgaatggccccctcgaaccactcagggtcctgtggacagctcacctagtggcaatggctccaggctcccggacgtccctgctcctggcttttgccctgctctgcctgccctggcttcaagagggcagtgccttcccaaccattcccttatccaggctttttgacaacgctatgctccgcgcccatcgtctgcaccagctggcntttgacacctaccaggagtttgaagaaacctatatcccaaaggaccagaagtattcattcctgcatgactcccagacctccttctgcttctcagactctattccgacaccctccaacatggaggaaacgcaacagaaatccaatctagagctgctccgcatctccctgctgctcatcgagtcgtggctggagcccgtgcggttcctcaggagtatgttcgccaacaacctggtgtatgacacctcggacagcgatgactatcacctcctaaaggacctagaggaaggcatccaaacgctgatggggaggctggaagacggcagccgccggactgggcagatcctcaagcagacctacagcaagtttgacacaaactcgcacaaccatgacgcactgctcaagaactacgggctgctctactgcttcaggaaggacatggacaaggtcgagacattcctgcgcatggtgcagtgccgctctgtggacgggcagcgtgtgtgcttctagtgtgcccgagtagcatcctgtgacccctccccagtgcctctcctggccctgaaggtgccactccatgtgcccaccatgcccggtgtaccggagctcgnnaattc

SEQ ID NO: 733980 - DNA, 780 bp, Homo sapiens
  misc_feature (10)..(10): n is a, c, g, or t
  misc_feature (214)..(214): n is a, c, g, or t
  misc_feature (722)..(722): n is a, c, g, or t
  misc_feature (757)..(757): n is a, c, g, or t
ccggaggcgnttgaatggccccctcgaaccactcagggtcctgtggacagctcacctagtggcaatggctccaggctcccggacgtccctgctcctggcttttgccctgctctgcctgccctggcttcaagagggcagtgccttcccaaccattcccttatccaggctttttgacaacgctatgctccgcgcccatcgtctgcaccagctggcntttgacacctaccaggagtttgaagaaacctatatcccaaaggaccagaagtattcattcctgcatgactcccagacctccttctgcttctcagactctattccgacaccctccaacatggaggaaacgcaacagaaatccaatctagagctgctccgcatctccctgctgctcatcgagtcgtggctggagcccgtgcggttcctcaggagtatgttcgccaacaacctggtgtatgacacctcggacagcgatgactatcacctcctaaaggacctagaggaaggcatccaaacgctgatggggaggctggaagacggcagccgccggactgggcagatcctcaagcagacctacagcaagtttgacacaaactcgcacaaccatgacgcactgctcaagaactacgggctgctctactgcttcaggaaggacatggacaaggtcgagacattcctgcgcatggtgcagtgccgctctgtggagggaactgtggtttactgccggnggatcctggacctccagtgcttctgcctgagtgcntcaggccacactgctattagtgt

SEQ ID NO: 733981 - DNA, 1054 bp, Homo sapiens
  misc_feature (10)..(10): n is a, c, g, or t
  misc_feature (214)..(214): n is a, c, g, or t
ccggaggcgnttgaatggccccctcgaaccactcagggtcctgtggacagctcacctagtggcaatggctccaggctcccggacgtccctgctcctggcttttgccctgctctgcctgccctggcttcaagagggcagtgccttcccaaccattcccttatccaggctttttgacaacgctatgctccgcgcccatcgtctgcaccagctggcntttgacacctaccaggagtttgaagaaacctatatcccaaaggaccagaagtattcattcctgcatgactcccagacctccttctgcttctcagactctattccgacaccctccaacatggaggaaacgcaacagaaatccaatctagagctgctccgcatctccctgctgctcatcgagtcgtggctggagcccgtgcggttcctcaggagtatgttcgccaacaacctggtgtatgacacctcggacagcgatgactatcacctcctaaaggacctagaggaaggcatccaaacgctgatggggaggctggaagacggcagccgccggactgggcagatcctcaagcagacctacagcaagtttgacacaatagcttcgccgacaagcacttgacgtcactgctcaaagaagcttgacggggcttgctcatacatgactttcacggcaaatggtactatggcacaaagggtcgaggaacaattctctgggcggcattgtgctgccaggtggtcccgtcttcttgtgagatggtggcagccctggttgggtctttctgaagagtgccccagagtaggcatacctgtggactcccttcctctcaggtgccctctcgctgggggcccatggaaaagggtggggcactatcccaggtgtggccccgaacccgaagtccattggtttccctaaattaacatcactttaaaggttgggttattcttattcgcaaataataacccatgtaattaatggaatcaattaccagaatataagaacaatatttcgcgaggcctctcaattgtgggccgtatgaaaaagaatgttatgtaataaccgcag

SEQ ID NO: 733982 - DNA, 727 bp, Homo sapiens
  misc_feature (10)..(10): n is a, c, g, or t
  misc_feature (644)..(644): n is a, c, g, or t
  misc_feature (648)..(648): n is a, c, g, or t
  misc_feature (696)..(696): n is a, c, g, or t
  misc_feature (698)..(698): n is a, c, g, or t
  misc_feature (711)..(711): n is a, c, g, or t
  misc_feature (715)..(717): n is a, c, g, or t
  misc_feature (719)..(719): n is a, c, g, or t
ccggaggcgnttgaatggccccctcgaaccactcagggtcctgtggacagctcacctagtggcaatggctccaggctcccggacgtccctgctcctggcttttgccctgctctgcctgccctggcttcaagaggcttggtcgcccgtcacaaaccgtgtcgcgtatatcacaggcttttttagacacagcggatattgctctcagagccccacttcggcggcgcaccagcttgggacactcagacaccctacccagggatgttgtgggatgacacctatatcccaaaggaccagaagtattcattcctgcatgactcccagacctccttctgcttctcagactctattccgacaccctccaacatggaggaaacgcaacagaaatccaatctagagctgctccgcatctccctgctgctcatcgagtcgtggctggagcccgtgcggttcctcaggagtatgttcgccaacaacctggtgtatgacacctcggacagctcacctagtggcaatggctccaggctcccggacgtccctgctcctggcttttgccctgctctgcctgccctggcttcaagaggctggtgccgtccaaaccgttccgttatccaggctttttgaccacgctatgctccaagcccatngcgngcaccagctggccattgacacctaccaggagtttgaagaaacctatancncaaaggaccaggnactnnngnccagcgta

SEQ ID NO: 733983 - DNA, 895 bp, Homo sapiens
  misc_feature (10)..(10): n is a, c, g, or t
  misc_feature (865)..(865): n is a, c, g, or t
  misc_feature (867)..(867): n is a, c, g, or t
  misc_feature (869)..(869): n is a, c, g, or t
ccggaggcgnttgaatggccccctcgaaccactcagggtcctgtggacagctcacctagtggcaatggctccaggctcccggacgtccctgctcctggcttttgccctgctctgcctgccctggcttcaagaggcttggtcgcccgtcacaaaccgtgtcgcgtatatcacaggcttttttagacacagcggatattgctctcagagccccacttcggcggcgcaccagcttgggacactcagacaccctacccagggatgttgtgggatgacacctatatcccaaaggaccagaagtattcattcctgcatgactcccagacctccttctgcttctcagactctattccgacaccctccaacatggaggaaacgcaacagaaatccaatctagagctgctccgcatctccctgctgctcatcgagtcgtggctggagcccgtgcggttcctcaggagtatgttcgccaacaacctggtgtatgacacctcggacagcgatgactatcacctcctaaaggacctagaggaaggcatccaaacgctgatggggaggctggaagacggcagccgccggactgggcagatcctcaagcagacctacagcaagtttgacacaaactcgcacaaccatgacgcactgctcaagaactacgggctgctctactgcttcaggaaggacatggacaaggtcgagacattcctgcgcatggtgcagtgccgctctgtggagggcagctgtggcttctaggtgcccgagtagcatcctgtgacccctccccagtgcctctcctggccctgaaggtgccactccagtgcccaccagccttgtcctaataaaattaagttgtatcatttcaaaaaanancncaaaacaacacaaaacacaaacatcc

SEQ ID NO: 733984 - DNA, 857 bp, Homo sapiens
  misc_feature (10)..(10): n is a, c, g, or t
  misc_feature (851)..(852): n is a, c, g, or t
ccggaggcgnttgaatggccccctcgaaccactcagggtcctgtggacagctcacctagtggcaatggctccaggctcccggacgtccctgctcctggcttttgccctgctctgcctgccctggcttcaagaggcttggtcgcccgtcacaaaccgtgtcgcgtatatcacaggcttttttagacacagcggatattgctctcagagccccacttcggcggcgcaccagcttgggacactcagacaccctacccagggatgttgtgggatgacacctatatcccaaaggaccagaagtattcattcctgcatgactcccagacctccttctgcttctcagactctattccgacaccctccaacatggaggaaacgcaacagaaatccaatctagagctgctccgcatctccctgctgctcatcgagtcgtggctggagcccgtgcggttcctcaggagtatgttcgccaacaacctggtgtatgacacctcggacagcgatgactatcacctcctaaaggacctagaggaaggcatccaaacgctgatggggaggctggaagacggcagccgccggactgggcagatcctcaagcagacctacagcaagtttgacacaaactcgcacaaccatgacgcactgctcaagaactacgggctgctctactgcttcaggaaggacatggacaaggtcgagacattcctgcgcatggtgcagtgccgctctgtggacgggcagcgtgtgtgcttctagtgtgcccgagtagcatcctgtgacccctccccagtgcctctcctggccctgaaggtgccactccatgtgcccaccatgcccggtgtaccggagctcgnnaattc

SEQ ID NO: 733985 - DNA, 812 bp, Homo sapiens
  misc_feature (10)..(10): n is a, c, g, or t
  misc_feature (754)..(754): n is a, c, g, or t
  misc_feature (789)..(789): n is a, c, g, or t
ccggaggcgnttgaatggccccctcgaaccactcagggtcctgtggacagctcacctagtggcaatggctccaggctcccggacgtccctgctcctggcttttgccctgctctgcctgccctggcttcaagaggcttggtcgcccgtcacaaaccgtgtcgcgtatatcacaggcttttttagacacagcggatattgctctcagagccccacttcggcggcgcaccagcttgggacactcagacaccctacccagggatgttgtgggatgacacctatatcccaaaggaccagaagtattcattcctgcatgactcccagacctccttctgcttctcagactctattccgacaccctccaacatggaggaaacgcaacagaaatccaatctagagctgctccgcatctccctgctgctcatcgagtcgtggctggagcccgtgcggttcctcaggagtatgttcgccaacaacctggtgtatgacacctcggacagcgatgactatcacctcctaaaggacctagaggaaggcatccaaacgctgatggggaggctggaagacggcagccgccggactgggcagatcctcaagcagacctacagcaagtttgacacaaactcgcacaaccatgacgcactgctcaagaactacgggctgctctactgcttcaggaaggacatggacaaggtcgagacattcctgcgcatggtgcagtgccgctctgtggagggaactgtggtttactgccggnggatcctggacctccagtgcttctgcctgagtgcntcaggccacactgctattagtgt

SEQ ID NO: 733986 - DNA, 813 bp, Homo sapiens
  misc_feature (10)..(10): n is a, c, g, or t
  misc_feature (667)..(667): n is a, c, g, or t
  misc_feature (669)..(669): n is a, c, g, or t
  misc_feature (708)..(708): n is a, c, g, or t
  misc_feature (711)..(711): n is a, c, g, or t
  misc_feature (715)..(715): n is a, c, g, or t
  misc_feature (717)..(720): n is a, c, g, or t
  misc_feature (743)..(747): n is a, c, g, or t
  misc_feature (778)..(778): n is a, c, g, or t
ccggaggcgnttgaatggccccctcgaaccactcagggtcctgtggacagctcacctagtggcaatggctccaggctcccggacgtccctgctcctggcttttgccctgctctgcctgccctggcttcaagaggcttggtcgcccgtcacaaaccgtgtcgcgtatatcacaggcttttttagacacagcggatattgctctcagagccccacttcggcggcgcaccagcttgggacactcagacaccctacccagggatgttgtgggatgacacctatatcccaaaggaccagaagtattcattcctgcatgactcccagacctccttctgcttctcagactctattccgacaccctccaacatggaggaaacgcaacagaaatccaatctagagctgctccgcatctccctgctgctcatcgagtcgtggctggagcccgtgcggttcctcaggagtatgttcgccaacaacctggtgtatgacacctcggacagcgatgactatcacctcctaaaggacctagaggaaggcatccaaacgctgatggggaggctggaagacggcagccgccggactgggcagatcctcaagcagacctacagcaagttacacaaactacagaaacaaccaataaacgcacagctacaagaacaacgagacatgntnaaacagctatacgaggaaagaaacaatagaaacaaaggncanaaanannnnagacagacaatagagaagaaagnnnnnctctgtggaagaagacaagaatgtggcttcnaggtagacaccaaagataagacaaaacaaaaaccc

SEQ ID NO: 733987 - DNA, 858 bp, Homo sapiens
  misc_feature (10)..(10): n is a, c, g, or t
  misc_feature (214)..(214): n is a, c, g, or t
  misc_feature (360)..(360): n is a, c, g, or t
  misc_feature (364)..(364): n is a, c, g, or t
  misc_feature (366)..(366): n is a, c, g, or t
  misc_feature (370)..(370): n is a, c, g, or t
ccggaggcgnttgaatggccccctcgaaccactcagggtcctgtggacagctcacctagtggcaatggctccaggctcccggacgtccctgctcctggcttttgccctgctctgcctgccctggcttcaagagggcagtgccttcccaaccattcccttatccaggctttttgacaacgctatgctccgcgcccatcgtctgcaccagctggcntttgacacctaccaggagtttgaagaaacctatatcccaaaggaccagaagtattcattcctggagaaaccccagaactccctctggtttctcagagtctattccgacaacctccaacaggggaggaaacacaacagaaatccaanctananctgntccgcatctccctgtgtggtcatccaatcgtgggtggagcccgtggcagttcctcaggagtgtcttcggcaacaggctggtggtacgggggctctgacaggaacgtctatgaactcctaaaggaactagaggaaggcatccaaacgctgatggggaggctggaagacggcagccgccggactgggcagatcctcaagcagacctacagcaagtttgacacaaactcgcacaaccatgacgcactgctcaagaactacgggctgctctactgcttcaggaaggacatggacaaggtcgagacattcctgcgcatggtgcagtgccgctctgtgagggcagtggggttctactgccggtggatccgggaacctccaggccctggccggaatgctcatgcccactggcaaaaaaatgtcaacaaaacaaaagacagcccacaacaccaggggcaccatgatggggcacgggaggaatatcccggaccccgg

SEQ ID NO: 733988 - DNA, 457 bp, Homo sapiens
  misc_feature (451)..(452): n is a, c, g, or t
tcgagcggccgcccgggcaggtcgagtcgtggctggagcccgtgcggttcctcaggagtatgttcgccaacaacctggtgtatgacacctcggacagcgatgactatcacctcctaaaggacctagaggaaggcatccaaacgctgatggggaggctggaagacggcagccgccggactgggcagatcctcaagcagacctacagcaagtttgacacaaactcgcacaaccatgacgcactgctcaagaactacgggctgctctactgcttcaggaaggacatggacaaggtcgagacattcctgcgcatggtgcagtgccgctctgtggacgggcagcgtgtgtgcttctagtgtgcccgagtagcatcctgtgacccctccccagtgcctctcctggccctgaaggtgccactccatgtgcccaccatgcccggtgtaccggagctcgnnaattc

SEQ ID NO: 733989 - DNA, 1161 bp, Homo sapiens
cactcctgagagcagagctggccgcagccatgaccccgcagcttctcctggcccttgtcctctgggccagctgcccgccctgcagtggaaggaaagggcccccagcagctctgacactgccccgggtgcaatgccgagcctctcggtacccgatcgccgtggattgctcctggaccctgccgcctgctccaaactccaccagccccgtgtccttcattgccacgtacaggctcggcatggctgcccggggccacagctggccctgcctgcagcagacgccaacgtccaccagctgcaccatcacggatgtccagctgttctccatggctccctacgtgctcaatgtcaccgccgtccacccctggggctccagcagcagcttcgtgcctttcataacagagcacatcatcaagcccgaccctccagaaggcgtgcgcctaagccccctcgctgagcgccagctacaggtgcagtgggagcctcccgggtcctggcccttcccagagatcttctcactgaagtactggatccgttacaagcgtcagggagctgcgcgcttccaccgggtggggcccattgaagccacgtccttcatcctcagggctgtgcggccccgagccaggtactacgtccaagtggcggctcaggacctcacagactacggggaactgagtgactggagtctccccgccactgccacaatgagcctgggcaagtagcaagggcttcccgctgcctccagacagcacctgggtcctcgccaccctaagccccgggacacctgttggagggcggatggggatctgcctagcctgggctggagtccttgctttgctgctgctgagctgccgggcaacctcagatgaccgacttttcccctttgagcctcagtttctctagctgagaaatggagatgtactactctctcctttacctttacctttaccacagtgcagggctgactgaactgtcactgtgagatattttttattgtttaattagaaaagaattgttgttgggctgggcgcagtggatcgcacctgtaatcccagtcactgggaagccgacgtgggagggtagcttgaggccaggagctcgaaaccagtccgggccacacagcaagaccccatctctaaaaaattaatataaatataaaataaa

SEQ ID NO: 733990 - DNA, 380 bp, Homo sapiens
ggtgtgatgttgcgcgcccacagtcccaactacttgggaggctgaggtgggaggatcacttgagtccaggaggttaaggctgcagtgagctgtcgtcacaccactgccttcatgcctgggcaacagagcaagaccctggtttttttgtttgtttgtttgtttgttttaatcatagttgaggccgggtgcggtggctcgcgcctgtaatcccgacgccgaggcgggcagatcacgaggtcaggagttcgagaccagcctgaccaacatggtgaaacccggtctctactaaaaatacagaaattagctgggcatggtggcctgagcccgtaaccccagctactcaggaggctaaggcaggagaatcgcttgaacctgggagg

SEQ ID NO: 733991 - DNA, 772 bp, Homo sapiens; identical to SEQ ID NO: 299745

SEQ ID NO: 733992 - DNA, 870 bp, Homo sapiens; identical to SEQ ID NO: 299746

SEQ ID NO: 733993 - DNA, 625 bp, Homo sapiens
aactcttgagaccgggagcccagctgcccaccctctggacattcacccagccaggtggtctcgtcacctcagaggctccgccagactcctgcccaggccaggactgaggcaagcctcaaggcacttctaggacctgcctcttctcaccaagatgaactcactggtttcttggcagctactgcttttcctctgtgccacccactttggggagccattagaaaaggtggcctctgtggggaattctagacccacaggtatgtatcctctggggaaaggagtgggagggagcaagtgggttgttgcaaaatgagctttcccgtattttccatctagtcgactggtgtgagtttaacattgcatttggtggaaatctaagactggcacacatgcaactcattgagggggtcctgttaaccctgcaagtgatggatgccttgcctctgtgatggcctcagtccgcccacctaggttccagggcttattaacccttgagctctttcatggtttcctcacactgtgttctctgctctacgtcagcaacctctctgtgccgatgttgagaagaaacttcatatgcaaccttgctttatcggtgacctcagattctttgtggagaatttggaaa

SEQ ID NO: 733994 - DNA, 424 bp, Homo sapiens
aactcttgagaccgggagcccagctgcccaccctctggacattcacccagccaggtggtctcgtcacctcagaggctccgccagactcctgcccaggccaggactgaggcaagcctcaaggcacttctaggacctgcctcttctcaccaagatgaactcactggtttcttggcagctactgcttttcctctgtgccacccactttggggagccattagaaaaggtggcctctgtggggaattctagacccacaggccagcagctagaatccctgggcctcctggcccccggggagcagagcctgccgtgcaccgagaggaagccagctgctactgccaggctgagccgtcgggggacgtagggctaagggagggggcgctggagcttccaacccgaggcaataaaagaaatgttgcgtaactca

SEQ ID NO: 733995 - DNA, 731 bp, Homo sapiens
atgctctctctggtggggagaactcttgagaccgggagcccagctgcccaccctctggacattcacccagccaggtggtctcgtcacctcagaggctccgccagactcctgcccaggccaggactgaggcaagcctcaaggcacttctaggacctgcctcttctcaccaagatgaactcactggtttcttggcagctactgcttttcctctgtgccacccactttggggagccattagaaaaggtggcctctgtggggaattctagacccacaggccagcagctagaatccctgggcctcctggcccccggggagcagagcctgccgtgcaccgagaggaagccagctgctactgccaggctgagccgtcgggggacctcgctgtccccgccccccgagagctccgggagcccccagcagccgggcctgtccgccccccacagccgccagatccccgcaccccagggcgcggtgctggtgcagcgggagaaggacctgccgaactacaactggaactccttcggcctgcgcttcggcaagcgggaggcggcaccagggaaccacggcagaagcgctgggcggggctgagggcgcaggtgcggggcagtgaacttcagaccccaaaggagtcagagcatgtggggcgggggcgggggggggcaacgtagggctaagggagggggcgctggagcttccaacccgaggcaataaaagaaatgttgcgtaactca

SEQ ID NO: 733996 - DNA, 736 bp, Homo sapiens
  misc_feature (16)..(16): n is a, c, g, or t
cctgtcagtcgcttcntggcctgtcaactcttgagaccgggagcccagctgcccaccctctggacattcacccagccaggtggtctcgtcacctcagaggctccgccagactcctgcccaggccaggactgaggcaagcctcaaggcacttctaggacctgcctcttctcaccaagatgaactcactggtttcttggcagctactgcttttcctctgtgccacccactttggggagccattagaaaaggtggcctctgtggggaattctagacccacaggccagcagctagaatccctgggcctcctggcccccggggagcagagcctgccgtgcaccgagaggaagccagctgctactgccaggctgagccgtcgggggacctcgctgtccccgccccccgagagctccgggagcccccagcagccgggcctgtccgccccccacagccgccagatccccgcaccccagggcgcggtgctggtgcagcgggagaaggacctgccgaactacaactggaactccttcggcctgcgcttcggcaagcgggaggcggcaccagggaaccacggcagaagcgctgggcggggctgagggcgcaggtgcggggcagtgaacttcagaccccaaaggagtcagagcatgtggggcgggggcgggggggggcaacgtagggctaagggagggggcgctggagcttccaacccgaggcaataaaagaaatgttgcgtaactca

SEQ ID NO: 733997 - DNA, 646 bp, Homo sapiens
  misc_feature (16)..(16): n is a, c, g, or t
cctgtcagtcgcttcntggcctgtcaactcttgagaccgggagcccagctgcccaccctctggacattcacccagccaggtggtctcgtcacctcagaggctccgccagactcctgcccaggccaggactgaggcaagcctcaaggcacttctaggacctgcctcttctcaccaagatgaactcactggtttcttggcagctactgcttttcctctgtgccacccactttggggagccattagaaaaggtggcctctgtggggaattctagacccacaggccagcagctagaatccctgggcctcctggcccccggggagcagagcctgccgtgcaccgagaggaagccagctgctactgccaggctgagccgtcgggggacctcgctgtccccgccccccgagagctccgggagcccccagcagccgggcctgtccgccccccacagccgccagatccccgcaccccagggcgcggtgctggtgcacgctgggcggggctgagggcgcaggtgcggggcagtgaacttcagaccccaaaggagtcagagcatgtggggcgggggcgggggggggcaacgtagggctaagggagggggcgctggagcttccaacccgaggcaataaaagaaatgttgcgtaactca

SEQ ID NO: 733998 - DNA, 599 bp, Homo sapiens; identical to SEQ ID NO: 299754
  misc_feature (16)..(16): n is a, c, g, or t

SEQ ID NO: 733999 - DNA, 641 bp, Homo sapiens
atgctctctctggtggggagaactcttgagaccgggagcccagctgcccaccctctggacattcacccagccaggtggtctcgtcacctcagaggctccgccagactcctgcccaggccaggactgaggcaagcctcaaggcacttctaggacctgcctcttctcaccaagatgaactcactggtttcttggcagctactgcttttcctctgtgccacccactttggggagccattagaaaaggtggcctctgtggggaattctagacccacaggccagcagctagaatccctgggcctcctggcccccggggagcagagcctgccgtgcaccgagaggaagccagctgctactgccaggctgagccgtcgggggacctcgctgtccccgccccccgagagctccgggagcccccagcagccgggcctgtccgccccccacagccgccagatccccgcaccccagggcgcggtgctggtgcacgctgggcggggctgagggcgcaggtgcggggcagtgaacttcagaccccaaaggagtcagagcatgtggggcgggggcgggggggggcaacgtagggctaagggagggggcgctggagcttccaacccgaggcaataaaagaaatgttgcgtaactca

SEQ ID NO: 734000 - DNA, 594 bp, Homo sapiens
atgctctctctggtggggagaactcttgagaccgggagcccagctgcccaccctctggacattcacccagccaggtggtctcgtcacctcagaggctccgccagactcctgcccaggccaggactgaggcaagcctcaaggcacttctaggacctgcctcttctcaccaagatgaactcactggtttcttggcagctactgcttttcctctgtgccacccactttggggagccattagaaaaggtggcctctgtggggaattctagacccacaggccagcagctagaatccctgggcctcctggcccccggggagcagagcctgccgtgcaccgagaggaagccagctgctactgccaggctgagccgtcgggggacctcgctgtccccgccccccgagagctccgggagcccccacagggaaccacggcagaagcgctgggcggggctgagggcgcaggtgcggggcagtgaacttcagaccccaaaggagtcagagcatgtggggcgggggcgggggggggcaacgtagggctaagggagggggcgctggagcttccaacccgaggcaataaaagaaatgttgcgtaactca

SEQ ID NO: 734001 - DNA, 896 bp, Homo sapiens
ggtcagccagtcctgagcacctaaccatgttgggcatcactgtcctcgctgcgctcttggcctgtgcctccagctgtggggtgcccagcttcccgcccaacctatccgcccgagtggtgggaggagaggatgcccggccccacagctggccctggcagatctccctccagtacctcaagaacgacacgtggaggcatacgtgtggcgggactttgattgctagcaacttcgtcctcactgccgcccactgcatcagcaacacccggacctaccgtgtggccgtgggaaagaacaacctggaggtggaagacgaagaaggatccctgtttgtgggtgtggacaccatccacgtccacaagagatggaatgccctcctgttgcgcaatgatattgccctcatcaagcttgcagagcatgtggagctgagtgacaccatccaggtggcctgcctgccagagaaggactccctgctccccaaggactacccctgctatgtcaccggctggggccgcctctggaccaacggccccattgctgataagctgcagcagggcctgcagcccgtggtggatcacgccacgtgctccaggattgactggtggggcttcagggtgaagaaaaccatggtgtgcgctgggggcgatggcgtcatctcagcctgcaatggggactccggtggcccactgaactgccagttggagaacggttcctgggaggtgtttggcatcgtcagctttggctcccggcggggctgcaacacccgcaagaagccggtagtctacacccgggtgtccgcctacatcgactggatcaacgagaaaatgcagctgtgatttgttgctgggagcggcggcagcgagtccctgcaacagcaataaacttccttctcctcgggc

SEQ ID NO: 734002 - DNA, 750 bp, Homo sapiens
ggtcagccagtcctgagcacctaaccatgttgggcatcactgtcctcgctgcgctcttggcctgtgcctccagctgtggggtgcccagcttcccgcccaacctatccgcccgagtggtgggaggagaggatgcccggccccacagctggccctggcagatctccctccagtacctcaagaacgacacgtggaggcatacgtgtggcgggactttgattgctagcaacttcgtcctcactgccgcccactgcatcagcaacacccggacctaccgtgtggccgtgggaaagaacaacctggaggtggaagacgaagaaggatccctgtttgtgggtgtggacaccatccacgtccacaagagatggaatgccctcctgttgcgcaatgatattgccctcatcaagcttgcagagcatgtggagctgagtgacaccatccaggtggcctgcctgccagagaaggactccctgctccccaaggactacccctgctatgtcaccggctggggccgcctctggaggggactccggtggcccactgaactgccagttggagaacggttcctgggaggtgtttggcatcgtcagctttggctcccggcggggctgcaacacccgcaagaagccggtagtctacacccgggtgtccgcctacatcgactggatcaacgagaaaatgcagctgtgatttgttgctgggagcggcggcagcgagtccctgcaacagcaataaacttccttctcctcgggc

SEQ ID NO: 734003 - DNA, 434 bp, Homo sapiens
tgggagcctggctgggtctttctcagcagaagttgtttccaggtgtgctcaggtgccttcctctagcagagcacagaaagctagaataccccccagggagacagggatgccaagagtagaccagagctgggacccacagacagaacctccacctgcctgctgcccactgagctgggacctggtcaccttggattttagccggcctctttctggctataacaggcagagtcggagctgcctcccaccccagtcagaagcctggcaccccctctgcttcggccagatgtgctggctgactccgacttccgaccagcactcagctggcctctggggattctagctccacaaccaggccgtgaggctggagaaactggcagttattgctgtcaaaagcctgttctctcaactgctgtcaataaaattaaagatacaga

SEQ ID NO: 734004 - DNA, 3345 bp, Homo sapiens
actgctggccgtggatccatttcacaggcctgccttctctcactaacgctcttcctagtccccgggccaactcggacagtttgctcatttattgcaacggtcaaggctggcttgtgccagaacggcgcgcgcgcgcgcacgcacgcacacacacggggggaaacttttttaaaaatgaaaggctagaagagctcagcggcggcgcgggcgctgcgcgagggctccggagctgactcgccgaggcaggaaatccctccggtcgcgacgcccggccccggctcggcgcccgcgtgggatggtgcagcgctcgccgccgggcccgagagctgctgcactgaaggccggcgacgatggcagcgcgcccgctgcccgtgtcccccgcccgcgccctcctgctcgccctggccggtgctctgctcgcgccctgcgaggcccgaggggtgagcttatggaaccaaggaagagctgatgaagttgtcagtgcctctgttcggagtggggacctctggatcccagtgaagagcttcgactccaagaatcatccagaagtgctgaatattcgactacaacgggaaagcaaagaactgatcataaatctggaaagaaatgaaggtctcattgccagcagtttcacggaaacccactatctgcaagacggtactgatgtctccctcgctcgaaattacacgggtcactgttactaccatggacatgtacggggatattctgattcagcagtcagtctcagcacgtgttctggtctcaggggacttattgtgtttgaaaatgaaagctatgtcttagaaccaatgaaaagtgcaaccaacagatacaaactcttcccagcgaagaagctgaaaagcgtccggggatcatgtggatcacatcacaacacaccaaacctcgctgcaaagaatgtgtttccaccaccctctcagacatgggcaagaaggcataaaagagagaccctcaaggcaactaagtatgtggagctggtgatcgtggcagacaaccgagagtttcagaggcaaggaaaagatctggaaaaagttaagcagcgattaatagagattgctaatcacgttgacaagttttacagaccactgaacattcggatcgtgttggtaggcgtggaagtgtggaatgacatggacaaatgctctgtaagtcaggacccattcaccagcctccatgaatttctggactggaggaagatgaagcttctacctcgcaaatcccatgacaatgcgcagcttgtcagtggggtttatttccaagggaccaccatcggcatggccccaatcatgagcatgtgcacggcagaccagtctgggggaattgtcatggaccattcagacaatccccttggtgcagccgtgaccctggcacatgagctgggccacaatttcgggatgaatcatgacacactggacaggggctgtagctgtcaaatggcggttgagaaaggaggctgcatcatgaacgcttccaccgggtacccatttcccatggtgttcagcagttgcagcaggaaggacttggagaccagcctggagaaaggaatgggggtgtgcctgtttaacctgccggaagtcagggagtctttcgggggccagaagtgtgggaacagatttgtggaagaaggagaggagtgtgactgtggggagccagaggaatgtatgaatcgctgctgcaatgccaccacctgtaccctgaagccggacgctgtgtgcgcacatgggctgtgctgtgaagactgccagctgaagcctgcaggaacagcgtgcagggactccagcaactcctgtgacctcccagagttctgcacaggggccagccctcactgcccagccaacgtgtacctgcacgatgggcactcatgtcaggatgtggacggctactgctacaatggcatctgccagactcacgagcagcagtgtgtcacgctctggggaccaggtgctaaacctgcccctgggatctgctttgagagagtcaattctgcaggtgatccttatggcaactgtggcaaagtctcgaagagttcctttgccaaatgcgagatgagagatgctaaatgtggaaaaatccagtgtcaaggaggtgccagccggccagtcattggtaccaatgccgtttccatagaaacaaacatccccctgcagcaaggaggccggattctgtgccgggggacccacgtgtacttgggcgatgacatgccggacccagggcttgtgcttgcaggcacaaagtgtgcagatggaaaaatctgcctgaatcgtcaatgtcaaaatattagtgtctttggggttcacgagtgtgcaatgcagtgccacggcagaggggtgtgcaacaacaggaagaactgccactgcgaggcccactgggcacctcccttctgtgacaagtttggctttggaggaagcacagacagcggccccatccggcaagcagaagcaaggcaggaagctgcagagtccaacagggagcgcggccagggccaggagcccgtgggatcgcaggagcatgcgtctactgcctcactgacactcatctgagccctcccatgacatggagaccgtgaccagtgctgctgcagaggaggtcacgcgtccccaaggcctcctgtgactggcagcattgactctgtggctttgccatcgtttccatgacaacagacacaacacagttctcggggctcaggaggggaagtccagcctaccaggcacgtctgcagaaacagtgcaaggaagggcagcgacttcctggttgagcttctgctaaaacatggacatgcttcagtgctgctcctgagagagtagcaggttaccactctggcaggccccagccctgcagcaaggaggaagaggactcaaaagtctggcctttcactgagcccccacagcagtgggggagaagcaagggttgggcccagtgtcccctttcccccagtgacacctcagccttggcagccctgatgactggtctctggctgcaacttaatgctctgatatggcttttagcatttattatatgaaaatagcagggttttagtttttaatttatcagagaccctgccacccattccatctccatccaagcaaactgaatggcattgaaacaaactggagaagaaggtaggagaaagggcggtgaactctggctctttgctgtggacatgcgtgaccagcagtactcaggtttgagggtttgcagaaagccagggaacccacagagtcaccaacccttcatttaacaagtaagaatgttaaaaagtgaaaacaatgtaagagcctaactccatcccccgtggccattactgcataaaatagagtgcatttgaaa

SEQ ID NO: 734005 - DNA, 6043 bp, Homo sapiens; identical to SEQ ID NO: 318524

SEQ ID NO: 734006 - DNA, 563 bp, Homo sapiens; identical to SEQ ID NO: 318546

SEQ ID NO: 734007 - DNA, 521 bp, Homo sapiens
cctcttggtctttcttgctttttgcagccatttaaggtgtgatgtttgcattcagtgagtgcatactccataagaccctgtcaaacaaatgccattcccctttccaggaatgtatgaatcgctgctgcaatgccaccacctgtaccctgaagccggacgctgtgtgcgcacatgggctgtgctgtgaagactgccagctgaagcctgcaggaacagcgtgcagggactccagcaactcctgtgacctcccagagttctgcacaggggccagccctcactgcccagccaacgtgtacctgcacgatgggcactcatgtcaggatgtggacggctactgctacaatggcatctgccagactcacgagcagcagtgtgtcacgctctggggaccaggtacgtggccgccacaagctcggcatcaggagaggcactggcagacctgggctgtgggactgggggcatgtgctctgttttggttagcccccactcctggcgggcgctgtccacacagcatccggtgt

SEQ ID NO: 734008 - DNA, 769 bp, Homo sapiens; identical to SEQ ID NO: 318522

SEQ ID NO: 734009 - DNA, 1132 bp, Homo sapiens; identical to SEQ ID NO: 318521

SEQ ID NO: 734010 - DNA, 3684 bp, Homo sapiens
  misc_feature (3347)..(3347): n is a, c, g, or t
actgctggccgtggatccatttcacaggcctgccttctctcactaacgctcttcctagtccccgggccaactcggacagtttgctcatttattgcaacggtcaaggctggcttgtgccagaacggcgcgcgcgcgcgcacgcacgcacacacacggggggaaacttttttaaaaatgaaaggctagaagagctcagcggcggcgcgggcgctgcgcgagggctccggagctgactcgccgaggcaggaaatccctccggtcgcgacgcccggccccggctcggcgcccgcgtgggatggtgcagcgctcgccgccgggcccgagagctgctgcactgaaggccggcgacgatggcagcgcgcccgctgcccgtgtcccccgcccgcgccctcctgctcgccctggccggtgctctgctcgcgccctgcgaggcccgaggggtgagcttatggaaccaaggaagagctgatgaagttgtcagtgcctctgttcggagtggggacctctggatcccagtgaagagcttcgactccaagaatcatccagaagtgctgaatattcgactacaacgggaaagcaaagaactgatcataaatctggaaagaaatgaaggtctcattgccagcagtttcacggaaacccactatctgcaagacggtactgatgtctccctcgctcgaaattacacgggtcactgttactaccatggacatgtacggggatattctgattcagcagtcagtctcagcacgtgttctggtctcaggggacttattgtgtttgaaaatgaaagctatgtcttagaaccaatgaaaagtgcaaccaacagatacaaactcttcccagcgaagaagctgaaaagcgtccggggatcatgtggatcacatcacaacacaccaaacctcgctgcaaagaatgtgtttccaccaccctctcagacatgggcaagaaggcataaaagagagaccctcaaggcaactaagtatgtggagctggtgatcgtggcagacaaccgagagtttcagaggcaaggaaaagatctggaaaaagttaagcagcgattaatagagattgctaatcacgttgacaagttttacagaccactgaacattcggatcgtgttggtaggcgtggaagtgtggaatgacatggacaaatgctctgtaagtcaggacccattcaccagcctccatgaatttctggactggaggaagatgaagcttctacctcgcaaatcccatgacaatgcgcagcttgtcagtggggtttatttccaagggaccaccatcggcatggccccaatcatgagcatgtgcacggcagaccagtctgggggaattgtcatggaccattcagacaatccccttggtgcagccgtgaccctggcacatgagctgggccacaatttcgggatgaatcatgacacactggacaggggctgtagctgtcaaatggcggttgagaaaggaggctgcatcatgaacgcttccaccgggtacccatttcccatggtgttcagcagttgcagcaggaaggacttggagaccagcctggagaaaggaatgggggtgtgcctgtttaacctgccggaagtcagggagtctttcgggggccagaagtgtgggaacagatttgtggaagaaggagaggagtgtgactgtggggagccagaggaatgtatgaatcgctgctgcaatgccaccacctgtaccctgaagccggacgctgtgtgcgcacatgggctgtgctgtgaagactgccagctgaagcctgcaggaacagcgtgcagggactccagcaactcctgtgacctcccagagttctgcacaggggccagccctcactgcccagccaacgtgtacctgcacgatgggcactcatgtcaggatgtggacggctactgctacaatggcatctgccagactcacgagcagcagtgtgtcacgctctggggaccaggtgctaaacctgcccctgggatctgctttgagagagtcaattctgcaggtgatccttatggcaactgtggcaaagtctcgaagagttcctttgccaaatgcgagatgagagatgctaaatgtggaaaaatccagtgtcaaggaggtgccagccggccagtcattggtaccaatgccgtttccatagaaacaaacatccccctgcagcaaggaggccggattctgtgccgggggacccacgtgtacttgggcgatgacatgccggacccagggcttgtgcttgcaggcacaaagtgtgcagatggaaaaatctgcctgaatcgtcaatgtcaaaatattagtgtctttggggttcacgagtgtgcaatgcagtgccacggcagaggggtgtgcaacaacaggaagaactgccactgcgaggcccactgggcacctcccttctgtgacaagtttggctttggaggaagcacagacagcggccccatccggcaagcagaagcaaggcaggaagctgcagagtccaacagggagcgcggccagggccaggagcccgtgggatcgcaggagcatgcgtctactgcctcactgacactcatctgagccctcccatgacatggagaccgtgaccagtgctgctgcagaggaggtcacgcgtccccaaggcctcctgtgactggcagcattgactctgtggctttgccatcgtttccatgacaacagacacaacacagttctcggggctcaggaggggaagtccagcctaccaggcacgtctgcagaaacagtgcaaggaagggcagcgacttcctggttgagcttctgctaaaacatggacatgcttcagtgctgctcctgagagagtagcaggttaccactctggcaggccccagccctgcagcaaggaggaagaggactcaaaagtctggcctttcactgagcccccacagcagtgggggagaagcaagggttgggcccagtgtcccctttcccccagtgacacctcagccttggcagccctgatgactggtctctggctgcaacttaatgctctgatatggcttttagcatttattatatgaaaatagcagggttttagtttttaatttatcagagaccctgccacccattccatctccatccaagcaaactgaatggcattgaaacaaactggagaagaaggtaggagaaagggcggtgaactctggctctttgctgtggacatgcgtgaccagcagtactcaggtttgagggtttgcagaaagccagggaacccacagagtcaccaacccttcatttaacaagtaagaatgttaaaaagtgaaaacaatgtaagagcctaactccatcccccgtggccattactgcataaaatagagtgcatttgaaaanaaaaaaaaaaaaaaaaaaaaaaaaatttgtgggggggctgcgggccctgagaaaaagtttttaaaaccttcggtgggggggcggggcgcccagtagtgtacttgtcagaccttggcgccataggctggtttccagaggaagatccgggcgcccatgagactcatgggtgcttggtgttccttcctccccagttaaataaaaagccgccgcgggggggaacccggagctgtttctggaaccaattcccagaagtagggaggttccgaggggcgccctcacgggaggcgtttatccaccaggggagttccagggagagtcccgattttaaaattagtcg

SEQ ID NO: 734011 - DNA, 1866 bp, Homo sapiens
  misc_feature (1529)..(1529): n is a, c, g, or t
atccctgcccgatcttctctgaggctccttgctctctgctttgactgagtggctgagtttgccagttccttagcctgcgacacttttcttaactaaggtcatttctatagtgaactgctgaatgggtatgaatgtcatcactgtatcaaagtactttgtaaaggccgacatctgtgtggtagggtgacaaggtgtgaagtttaatgccttttaaaaatcttactggaaagacacccacctcttagtaaaggtgacagtcacggcagcagtgggagtcattgcaacagcttttgcatatggaatgatgtgtgcaggtgctgtgtggtgcattttatgcccatgatgtcatcccctccttatacaactctgaagaaggtggtatgattcttttctcacatacctaggacctgaggctcagggaagttaagtaatttgcctaatgtgatctcgctaagatttacacacacacaggtctgcctgtcccccaagaagctcttagtagcagctgtgcttgaactcgtggccatttctcctcggatgacctttagaaatggtttactggtgcggtgctgttttctctgagttcttattgggcaattcaggggcaagtctaaatgatgcctcttttcgagggaaaagcaaggcaggaagctgcagagtccaacagggagcgcggccagggccaggagcccgtgggatcgcaggagcatgcgtctactgcctcactgacactcatctgagccctcccatgacatggagaccgtgaccagtgctgctgcagaggaggtcacgcgtccccaaggcctcctgtgactggcagcattgactctgtggctttgccatcgtttccatgacaacagacacaacacagttctcggggctcaggaggggaagtccagcctaccaggcacgtctgcagaaacagtgcaaggaagggcagcgacttcctggttgagcttctgctaaaacatggacatgcttcagtgctgctcctgagagagtagcaggttaccactctggcaggccccagccctgcagcaaggaggaagaggactcaaaagtctggcctttcactgagcccccacagcagtgggggagaagcaagggttgggcccagtgtcccctttcccccagtgacacctcagccttggcagccctgatgactggtctctggctgcaacttaatgctctgatatggcttttagcatttattatatgaaaatagcagggttttagtttttaatttatcagagaccctgccacccattccatctccatccaagcaaactgaatggcattgaaacaaactggagaagaaggtaggagaaagggcggtgaactctggctctttgctgtggacatgcgtgaccagcagtactcaggtttgagggtttgcagaaagccagggaacccacagagtcaccaacccttcatttaacaagtaagaatgttaaaaagtgaaaacaatgtaagagcctaactccatcccccgtggccattactgcataaaatagagtgcatttgaaaanaaaaaaaaaaaaaaaaaaaaaaaaatttgtgggggggctgcgggccctgagaaaaagtttttaaaaccttcggtgggggggcggggcgcccagtagtgtacttgtcagaccttggcgccataggctggtttccagaggaagatccgggcgcccatgagactcatgggtgcttggtgttccttcctccccagttaaataaaaagccgccgcgggggggaacccggagctgtttctggaaccaattcccagaagtagggaggttccgaggggcgccctcacgggaggcgtttatccaccaggggagttccagggagagtcccgattttaaaattagtcg

SEQ ID NO: 734012 - DNA, 1527 bp, Homo sapiens
atccctgcccgatcttctctgaggctccttgctctctgctttgactgagtggctgagtttgccagttccttagcctgcgacacttttcttaactaaggtcatttctatagtgaactgctgaatgggtatgaatgtcatcactgtatcaaagtactttgtaaaggccgacatctgtgtggtagggtgacaaggtgtgaagtttaatgccttttaaaaatcttactggaaagacacccacctcttagtaaaggtgacagtcacggcagcagtgggagtcattgcaacagcttttgcatatggaatgatgtgtgcaggtgctgtgtggtgcattttatgcccatgatgtcatcccctccttatacaactctgaagaaggtggtatgattcttttctcacatacctaggacctgaggctcagggaagttaagtaatttgcctaatgtgatctcgctaagatttacacacacacaggtctgcctgtcccccaagaagctcttagtagcagctgtgcttgaactcgtggccatttctcctcggatgacctttagaaatggtttactggtgcggtgctgttttctctgagttcttattgggcaattcaggggcaagtctaaatgatgcctcttttcgagggaaaagcaaggcaggaagctgcagagtccaacagggagcgcggccagggccaggagcccgtgggatcgcaggagcatgcgtctactgcctcactgacactcatctgagccctcccatgacatggagaccgtgaccagtgctgctgcagaggaggtcacgcgtccccaaggcctcctgtgactggcagcattgactctgtggctttgccatcgtttccatgacaacagacacaacacagttctcggggctcaggaggggaagtccagcctaccaggcacgtctgcagaaacagtgcaaggaagggcagcgacttcctggttgagcttctgctaaaacatggacatgcttcagtgctgctcctgagagagtagcaggttaccactctggcaggccccagccctgcagcaaggaggaagaggactcaaaagtctggcctttcactgagcccccacagcagtgggggagaagcaagggttgggcccagtgtcccctttcccccagtgacacctcagccttggcagccctgatgactggtctctggctgcaacttaatgctctgatatggcttttagcatttattatatgaaaatagcagggttttagtttttaatttatcagagaccctgccacccattccatctccatccaagcaaactgaatggcattgaaacaaactggagaagaaggtaggagaaagggcggtgaactctggctctttgctgtggacatgcgtgaccagcagtactcaggtttgagggtttgcagaaagccagggaacccacagagtcaccaacccttcatttaacaagtaagaatgttaaaaagtgaaaacaatgtaagagcctaactccatcccccgtggccattactgcataaaatagagtgcatttgaaa

SEQ ID NO: 734013 - DNA, 1845 bp, Homo sapiens; identical to SEQ ID NO: 318537

SEQ ID NO: 734014 - DNA, 1102 bp, Homo sapiens
  misc_feature (765)..(765): n is a, c, g, or t
tagaggatccccggtgtttatcgatgccacagatcaaggcctcctgtgactggcagcattgactctgtggctttgccatcgtttccatgacaacagacacaacacagttctcggggctcaggaggggaagtccagcctaccaggcacgtctgcagaaacagtgcaaggaagggcagcgacttcctggttgagcttctgctaaaacatggacatgcttcagtgctgctcctgagagagtagcaggttaccactctggcaggccccagccctgcagcaaggaggaagaggactcaaaagtctggcctttcactgagcccccacagcagtgggggagaagcaagggttgggcccagtgtcccctttcccccagtgacacctcagccttggcagccctgatgactggtctctggctgcaacttaatgctctgatatggcttttagcatttattatatgaaaatagcagggttttagtttttaatttatcagagaccctgccacccattccatctccatccaagcaaactgaatggcattgaaacaaactggagaagaaggtaggagaaagggcggtgaactctggctctttgctgtggacatgcgtgaccagcagtactcaggtttgagggtttgcagaaagccagggaacccacagagtcaccaacccttcatttaacaagtaagaatgttaaaaagtgaaaacaatgtaagagcctaactccatcccccgtggccattactgcataaaatagagtgcatttgaaaanaaaaaaaaaaaaaaaaaaaaaaaaatttgtgggggggctgcgggccctgagaaaaagtttttaaaaccttcggtgggggggcggggcgcccagtagtgtacttgtcagaccttggcgccataggctggtttccagaggaagatccgggcgcccatgagactcatgggtgcttggtgttccttcctccccagttaaataaaaagccgccgcgggggggaacccggagctgtttctggaaccaattcccagaagtagggaggttccgaggggcgccctcacgggaggcgtttatccaccaggggagttccagggagagtcccgattttaaaattagtcg

SEQ ID NO: 734015 - DNA, 763 bp, Homo sapiens
tagaggatccccggtgtttatcgatgccacagatcaaggcctcctgtgactggcagcattgactctgtggctttgccatcgtttccatgacaacagacacaacacagttctcggggctcaggaggggaagtccagcctaccaggcacgtctgcagaaacagtgcaaggaagggcagcgacttcctggttgagcttctgctaaaacatggacatgcttcagtgctgctcctgagagagtagcaggttaccactctggcaggccccagccctgcagcaaggaggaagaggactcaaaagtctggcctttcactgagcccccacagcagtgggggagaagcaagggttgggcccagtgtcccctttcccccagtgacacctcagccttggcagccctgatgactggtctctggctgcaacttaatgctctgatatggcttttagcatttattatatgaaaatagcagggttttagtttttaatttatcagagaccctgccacccattccatctccatccaagcaaactgaatggcattgaaacaaactggagaagaaggtaggagaaagggcggtgaactctggctctttgctgtggacatgcgtgaccagcagtactcaggtttgagggtttgcagaaagccagggaacccacagagtcaccaacccttcatttaacaagtaagaatgttaaaaagtgaaaacaatgtaagagcctaactccatcccccgtggccattactgcataaaatagagtgcatttgaaa

SEQ ID NO: 734016 - DNA, 4570 bp, Homo sapiens; identical to SEQ ID NO: 318554

SEQ ID NO: 734017 - DNA, 2211 bp, Homo sapiens
  misc_feature (1874)..(1874): n is a, c, g, or t
cagggactcgtagacccagttggatcataaaaagcagaagctttgctttcctaacagacggaaacaggcaggtgtgcagttcaggagctgggccctcttggtctttcttgctttttgcagccatttaaggtgtgatgtttgcattcagtgagtgcatactccataagaccctgtcaaacaaatgccattcccctttccaggaatgtatgaatcgctgctgcaatgccaccacctgtaccctgaagccggacgctgtgtgcgcacatgggctgtgctgtgaagactgccagctgaagcctgcaggaacagcgtgcagggactccagcaactcctgtgacctcccagagttctgcacaggggccagccctcactgcccagccaacgtgtacctgcacgatgggcactcatgtcaggatgtggacggctactgctacaatggcatctgccagactcacgagcagcagtgtgtcacgctctggggaccaggtgctaaacctgcccctgggatctgctttgagagagtcaattctgcaggtgatccttatggcaactgtggcaaagtctcgaagagttcctttgccaaatgcgagatgagagatgctaaatgtggaaaaatccagtgtcaaggaggtgccagccggccagtcattggtaccaatgccgtttccatagaaacaaacatccccctgcagcaaggaggccggattctgtgccgggggacccacgtgtacttgggcgatgacatgccggacccagggcttgtgcttgcaggcacaaagtgtgcagatggaaaaatctgcctgaatcgtcaatgtcaaaatattagtgtctttggggttcacgagtgtgcaatgcagtgccacggcagaggggtgtgcaacaacaggaagaactgccactgcgaggcccactgggcacctcccttctgtgacaagtttggctttggaggaagcacagacagcggccccatccggcaagcagaagcaaggcaggaagctgcagagtccaacagggagcgcggccagggccaggagcccgtgggatcgcaggagcatgcgtctactgcctcactgacactcatctgagccctcccatgacatggagaccgtgaccagtgctgctgcagaggaggtcacgcgtccccaaggcctcctgtgactggcagcattgactctgtggctttgccatcgtttccatgacaacagacacaacacagttctcggggctcaggaggggaagtccagcctaccaggcacgtctgcagaaacagtgcaaggaagggcagcgacttcctggttgagcttctgctaaaacatggacatgcttcagtgctgctcctgagagagtagcaggttaccactctggcaggccccagccctgcagcaaggaggaagaggactcaaaagtctggcctttcactgagcccccacagcagtgggggagaagcaagggttgggcccagtgtcccctttcccccagtgacacctcagccttggcagccctgatgactggtctctggctgcaacttaatgctctgatatggcttttagcatttattatatgaaaatagcagggttttagtttttaatttatcagagaccctgccacccattccatctccatccaagcaaactgaatggcattgaaacaaactggagaagaaggtaggagaaagggcggtgaactctggctctttgctgtggacatgcgtgaccagcagtactcaggtttgagggtttgcagaaagccagggaacccacagagtcaccaacccttcatttaacaagtaagaatgttaaaaagtgaaaacaatgtaagagcctaactccatcccccgtggccattactgcataaaatagagtgcatttgaaaanaaaaaaaaaaaaaaaaaaaaaaaaatttgtgggggggctgcgggccctgagaaaaagtttttaaaaccttcggtgggggggcggggcgcccagtagtgtacttgtcagaccttggcgccataggctggtttccagaggaagatccgggcgcccatgagactcatgggtgcttggtgttccttcctccccagttaaataaaaagccgccgcgggggggaacccggagctgtttctggaaccaattcccagaagtagggaggttccgaggggcgccctcacgggaggcgtttatccaccaggggagttccagggagagtcccgattttaaaattagtcg

SEQ ID NO: 734018 - DNA, 1872 bp, Homo sapiens
cagggactcgtagacccagttggatcataaaaagcagaagctttgctttcctaacagacggaaacaggcaggtgtgcagttcaggagctgggccctcttggtctttcttgctttttgcagccatttaaggtgtgatgtttgcattcagtgagtgcatactccataagaccctgtcaaacaaatgccattcccctttccaggaatgtatgaatcgctgctgcaatgccaccacctgtaccctgaagccggacgctgtgtgcgcacatgggctgtgctgtgaagactgccagctgaagcctgcaggaacagcgtgcagggactccagcaactcctgtgacctcccagagttctgcacaggggccagccctcactgcccagccaacgtgtacctgcacgatgggcactcatgtcaggatgtggacggctactgctacaatggcatctgccagactcacgagcagcagtgtgtcacgctctggggaccaggtgctaaacctgcccctgggatctgctttgagagagtcaattctgcaggtgatccttatggcaactgtggcaaagtctcgaagagttcctttgccaaatgcgagatgagagatgctaaatgtggaaaaatccagtgtcaaggaggtgccagccggccagtcattggtaccaatgccgtttccatagaaacaaacatccccctgcagcaaggaggccggattctgtgccgggggacccacgtgtacttgggcgatgacatgccggacccagggcttgtgcttgcaggcacaaagtgtgcagatggaaaaatctgcctgaatcgtcaatgtcaaaatattagtgtctttggggttcacgagtgtgcaatgcagtgccacggcagaggggtgtgcaacaacaggaagaactgccactgcgaggcccactgggcacctcccttctgtgacaagtttggctttggaggaagcacagacagcggccccatccggcaagcagaagcaaggcaggaagctgcagagtccaacagggagcgcggccagggccaggagcccgtgggatcgcaggagcatgcgtctactgcctcactgacactcatctgagccctcccatgacatggagaccgtgaccagtgctgctgcagaggaggtcacgcgtccccaaggcctcctgtgactggcagcattgactctgtggctttgccatcgtttccatgacaacagacacaacacagttctcggggctcaggaggggaagtccagcctaccaggcacgtctgcagaaacagtgcaaggaagggcagcgacttcctggttgagcttctgctaaaacatggacatgcttcagtgctgctcctgagagagtagcaggttaccactctggcaggccccagccctgcagcaaggaggaagaggactcaaaagtctggcctttcactgagcccccacagcagtgggggagaagcaagggttgggcccagtgtcccctttcccccagtgacacctcagccttggcagccctgatgactggtctctggctgcaacttaatgctctgatatggcttttagcatttattatatgaaaatagcagggttttagtttttaatttatcagagaccctgccacccattccatctccatccaagcaaactgaatggcattgaaacaaactggagaagaaggtaggagaaagggcggtgaactctggctctttgctgtggacatgcgtgaccagcagtactcaggtttgagggtttgcagaaagccagggaacccacagagtcaccaacccttcatttaacaagtaagaatgttaaaaagtgaaaacaatgtaagagcctaactccatcccccgtggccattactgcataaaatagagtgcatttgaaa

SEQ ID NO: 734019 - DNA, 2571 bp, Homo sapiens
gactatatattcctgtttagcaagttctagagttgtcagaaatgaatgatggtaacatagattgaacctcaaacatggcatctgaagtaagacagtttattagtacatcactcacgggtgtactctcttcatttctgttgcttcagagttcactttgccataaacgtcacaacttgatacctcccatatttcattgtaactgcctccttctgtgagccccatgtgttttgtttcagataaccaaggtttaaccataggaattctggtgaccatcctgtgtcttcttgctgccggatttgtggtttatctcaaaaggaagaccttgatacgactgctgtttacaaataagaagaccaccattgaaaaactaaggtaccctgggtttagcttgtcatctgttctagaaatggtggctcagaggctgggtgcggtggctcaagcctgtaatcccagcactttgggaggctgaggcgggcggatcacgaggtcaggagatcgagaccacggtgaaaccccgtctctactaaaaatacaaaatatcagccgggcgcggtggtgggtgcctgtagtcccatctactcgggaggctgaggcatgagaatggcgtgaacccgggaggcggagcttgcagtgagttgcgatcactccactgcactccagcctgggcgagagagcaagactccatctcaaaaaaaaaaaaaaaaaaaaaaaaaagaaatggtgtctcagaaaatgtacagcaaactgcttctcacttcatttttttagcaaaggtcagattttctggatcataaacctgggacttggttcttttttggggggtttcttgttttaaatttctgccagatcagctgcctcctttacttcccttcaaacaacaatgtgctgcttattacataagctagcagggtgtcaggaaattccactgatgtgttttctcccacccttatattagtaatttttatacaacatggagacattgaaatattttcatcagatggggtagcttttgatccaaatatattcaaagacattatcgctgaaatgccagcttcatacaaatcatcttccaggtgtcactacactgcatttctatggagcgtgagaactaatttgacaaaatagaggttttgagggaaaaaccagtatttattttttaatctcctaagagtgttattaggtaatttttcctttgcatgtttagcacactgagttaagtaaactgtcttttgagtgccactatgagcaaagtgtaaaaagtcaagtcagtgagaaggggaaacacgcttggtcagcaggtatgggattctgttgcaggtgtgtgcgcccttcccggccaccccgtggcttccaaccctgtcaggctcacctcggccaccttggaaaaggcctgatgaggaagccgccagattcctacccaccgaaggtgagtcttgagtagatgtgagtgctcagggcacacatgcagacatgaggttttcaatacgagactgaataagaatgggatcctagaggcgctgcctgtgaaatgctgagtcagcctcactaggtcagcaggctctgagggagggtctctgtgatctggggccagagggaggccccacggtgcccccatggaagcccacctagatcctgttggcgcactcagtgccccctgcatgatatggtgcagcatagtgtgagctgtgatcccttcagtcacccagaccagccacatttctggggccccactgggtctgcagcccgagctggctcctgacaccagcccccaatgccagccccaccatggtttccaaatgccaccacctggctttaggtgagctgctttagcccactgttactcttaaaatatttttcaaaagttacatggagctctcagaattgaccattttgctccagccctgagctgaggaagccctgtccaccctgtggtttcagagaactggatccttaacccagagtacctcacggctccctgctgtctcttaaccctcttgctaccctggtgaattacagctagagttcattctaatagttcttccccaccgagtttttctgatgtacccacaagaattcttgaatattgaacttagtcaacaagagtccaaattataacagtgaacaagattggtgtcaaaaaaaataagtgattgaaaaatcattgctgcatatgcagtaggcaataaactgttttaactcccttgatccaaaaaacgcaaagggtggggctccaaggaggaggctgccattcccaataagctttacccctgctcgtccccaaaggtggaaccataagcgagaacggctttgtgtggtagccaaaagcacatcttcattttcgtaaaaaagaaaaatgcagctctattaaaaaaaaaaaaaaagcacagccttatttttgagagccccaaactagaaacaatccaaatatccatcaaccagtaaaaggataaacaatggtatatttgcacaatggaatgaaccattgatgtatacaacattgaggatgaatctctagataattattctgagtaaaagaagaaaagccagagtatatactctgtgatcccactt

SEQ ID NO: 734020 - DNA, 2788 bp, Homo sapiens
  misc_feature (41)..(42): n is a, c, g, or t
  misc_feature (49)..(51): n is a, c, g, or t
  misc_feature (53)..(53): n is a, c, g, or t
  misc_feature (55)..(55): n is a, c, g, or t
  misc_feature (2451)..(2451): n is a, c, g, or t
tggcgcctttactaagtacaccgctcttctcttacttgtgnngaacgcnnnananatcataaaagagagaccctcaaggcaactaagtatgtggagctggtgatcgtggcagacaaccgagagtttcagaggcaaggaaaagatctggaaaaagttaagcagcgattaatagagattgctaatcacgttgacaagttttacagaccactgaacattcggatcgtgttggtaggcgtggaagtgtggaatgacatggacaaatgctctgtaagtcaggacccattcaccagcctccatgaatttctggactggaggaagatgaagcttctacctcgcaaatcccatgacaatgcgcagcttgtcagtggggtttatttccaagggaccaccatcggcatggccccaatcatgagcatgtgcacggcagaccagtctgggggaattgtcatggaccattcagacaatccccttggtgcagccgtgaccctggcacatgagctgggccacaatttcgggatgaatcatgacacactggacaggggctgtagctgtcaaatggcggttgagaaaggaggctgcatcatgaacgcttccaccgggtacccatttcccatggtgttcagcagttgcagcaggaaggacttggagaccagcctggagaaaggaatgggggtgtgcctgtttaacctgccggaagtcagggagtctttcgggggccagaagtgtgggaacagatttgtggaagaaggagaggagtgtgactgtggggagccagaggaatgtatgaatcgctgctgcaatgccaccacctgtaccctgaagccggacgctgtgtgcgcacatgggctgtgctgtgaagactgccagctgaagcctgcaggaacagcgtgcagggactccagcaactcctgtgacctcccagagttctgcacaggggccagccctcactgcccagccaacgtgtacctgcacgatgggcactcatgtcaggatgtggacggctactgctacaatggcatctgccagactcacgagcagcagtgtgtcacgctctggggaccaggtgctaaacctgcccctgggatctgctttgagagagtcaattctgcaggtgatccttatggcaactgtggcaaagtctcgaagagttcctttgccaaatgcgagatgagagatgctaaatgtggaaaaatccagtgtcaaggaggtgccagccggccagtcattggtaccaatgccgtttccatagaaacaaacatccccctgcagcaaggaggccggattctgtgccgggggacccacgtgtacttgggcgatgacatgccggacccagggcttgtgcttgcaggcacaaagtgtgcagatggaaaaatctgcctgaatcgtcaatgtcaaaatattagtgtctttggggttcacgagtgtgcaatgcagtgccacggcagaggggtgtgcaacaacaggaagaactgccactgcgaggcccactgggcacctcccttctgtgacaagtttggctttggaggaagcacagacagcggccccatccggcaagcagaagcaaggcaggaagctgcagagtccaacagggagcgcggccagggccaggagcccgtgggatcgcaggagcatgcgtctactgcctcactgacactcatctgagccctcccatgacatggagaccgtgaccagtgctgctgcagaggaggtcacgcgtccccaaggcctcctgtgactggcagcattgactctgtggctttgccatcgtttccatgacaacagacacaacacagttctcggggctcaggaggggaagtccagcctaccaggcacgtctgcagaaacagtgcaaggaagggcagcgacttcctggttgagcttctgctaaaacatggacatgcttcagtgctgctcctgagagagtagcaggttaccactctggcaggccccagccctgcagcaaggaggaagaggactcaaaagtctggcctttcactgagcccccacagcagtgggggagaagcaagggttgggcccagtgtcccctttcccccagtgacacctcagccttggcagccctgatgactggtctctggctgcaacttaatgctctgatatggcttttagcatttattatatgaaaatagcagggttttagtttttaatttatcagagaccctgccacccattccatctccatccaagcaaactgaatggcattgaaacaaactggagaagaaggtaggagaaagggcggtgaactctggctctttgctgtggacatgcgtgaccagcagtactcaggtttgagggtttgcagaaagccagggaacccacagagtcaccaacccttcatttaacaagtaagaatgttaaaaagtgaaaacaatgtaagagcctaactccatcccccgtggccattactgcataaaatagagtgcatttgaaaanaaaaaaaaaaaaaaaaaaaaaaaaatttgtgggggggctgcgggccctgagaaaaagtttttaaaaccttcggtgggggggcggggcgcccagtagtgtacttgtcagaccttggcgccataggctggtttccagaggaagatccgggcgcccatgagactcatgggtgcttggtgttccttcctccccagttaaataaaaagccgccgcgggggggaacccggagctgtttctggaaccaattcccagaagtagggaggttccgaggggcgccctcacgggaggcgtttatccaccaggggagttccagggagagtcccgattttaaaattagtcg

SEQ ID NO: 734021 - DNA, 2449 bp, Homo sapiens
  misc_feature (41)..(42): n is a, c, g, or t
  misc_feature (49)..(51): n is a, c, g, or t
  misc_feature (53)..(53): n is a, c, g, or t
  misc_feature (55)..(55): n is a, c, g, or t
tggcgcctttactaagtacaccgctcttctcttacttgtgnngaacgcnnnananatcataaaagagagaccctcaaggcaactaagtatgtggagctggtgatcgtggcagacaaccgagagtttcagaggcaaggaaaagatctggaaaaagttaagcagcgattaatagagattgctaatcacgttgacaagttttacagaccactgaacattcggatcgtgttggtaggcgtggaagtgtggaatgacatggacaaatgctctgtaagtcaggacccattcaccagcctccatgaatttctggactggaggaagatgaagcttctacctcgcaaatcccatgacaatgcgcagcttgtcagtggggtttatttccaagggaccaccatcggcatggccccaatcatgagcatgtgcacggcagaccagtctgggggaattgtcatggaccattcagacaatccccttggtgcagccgtgaccctggcacatgagctgggccacaatttcgggatgaatcatgacacactggacaggggctgtagctgtcaaatggcggttgagaaaggaggctgcatcatgaacgcttccaccgggtacccatttcccatggtgttcagcagttgcagcaggaaggacttggagaccagcctggagaaaggaatgggggtgtgcctgtttaacctgccggaagtcagggagtctttcgggggccagaagtgtgggaacagatttgtggaagaaggagaggagtgtgactgtggggagccagaggaatgtatgaatcgctgctgcaatgccaccacctgtaccctgaagccggacgctgtgtgcgcacatgggctgtgctgtgaagactgccagctgaagcctgcaggaacagcgtgcagggactccagcaactcctgtgacctcccagagttctgcacaggggccagccctcactgcccagccaacgtgtacctgcacgatgggcactcatgtcaggatgtggacggctactgctacaatggcatctgccagactcacgagcagcagtgtgtcacgctctggggaccaggtgctaaacctgcccctgggatctgctttgagagagtcaattctgcaggtgatccttatggcaactgtggcaaagtctcgaagagttcctttgccaaatgcgagatgagagatgctaaatgtggaaaaatccagtgtcaaggaggtgccagccggccagtcattggtaccaatgccgtttccatagaaacaaacatccccctgcagcaaggaggccggattctgtgccgggggacccacgtgtacttgggcgatgacatgccggacccagggcttgtgcttgcaggcacaaagtgtgcagatggaaaaatctgcctgaatcgtcaatgtcaaaatattagtgtctttggggttcacgagtgtgcaatgcagtgccacggcagaggggtgtgcaacaacaggaagaactgccactgcgaggcccactgggcacctcccttctgtgacaagtttggctttggaggaagcacagacagcggccccatccggcaagcagaagcaaggcaggaagctgcagagtccaacagggagcgcggccagggccaggagcccgtgggatcgcaggagcatgcgtctactgcctcactgacactcatctgagccctcccatgacatggagaccgtgaccagtgctgctgcagaggaggtcacgcgtccccaaggcctcctgtgactggcagcattgactctgtggctttgccatcgtttccatgacaacagacacaacacagttctcggggctcaggaggggaagtccagcctaccaggcacgtctgcagaaacagtgcaaggaagggcagcgacttcctggttgagcttctgctaaaacatggacatgcttcagtgctgctcctgagagagtagcaggttaccactctggcaggccccagccctgcagcaaggaggaagaggactcaaaagtctggcctttcactgagcccccacagcagtgggggagaagcaagggttgggcccagtgtcccctttcccccagtgacacctcagccttggcagccctgatgactggtctctggctgcaacttaatgctctgatatggcttttagcatttattatatgaaaatagcagggttttagtttttaatttatcagagaccctgccacccattccatctccatccaagcaaactgaatggcattgaaacaaactggagaagaaggtaggagaaagggcggtgaactctggctctttgctgtggacatgcgtgaccagcagtactcaggtttgagggtttgcagaaagccagggaacccacagagtcaccaacccttcatttaacaagtaagaatgttaaaaagtgaaaacaatgtaagagcctaactccatcccccgtggccattactgcataaaatagagtgcatttgaaa

SEQ ID NO: 734022 - DNA, 5147 bp, Homo sapiens; identical to SEQ ID NO: 318551
  misc_feature (41)..(42): n is a, c, g, or t
  misc_feature (49)..(51): n is a, c, g, or t
  misc_feature (53)..(53): n is a, c, g, or t
  misc_feature (55)..(55): n is a, c, g, or t

SEQ ID NO: 734023 - DNA, 949 bp, Homo sapiens
  misc_feature (41)..(42): n is a, c, g, or t
  misc_feature (49)..(51): n is a, c, g, or t
  misc_feature (53)..(53): n is a, c, g, or t
  misc_feature (55)..(55): n is a, c, g, or t
tggcgcctttactaagtacaccgctcttctcttacttgtgnngaacgcnnnananatcataaaagagagaccctcaaggcaactaagtatgtggagctggtgatcgtggcagacaaccgagagtttcagaggcaaggaaaagatctggaaaaagttaagcagcgattaatagagattgctaatcacgttgacaagttttacagaccactgaacattcggatcgtgttggtaggcgtggaagtgtggaatgacatggacaaatgctctgtaagtcaggacccattcaccagcctccatgaatttctggactggaggaagatgaagcttctacctcgcaaatcccatgacaatgcgcagcttgtcagtggggtttatttccaagggaccaccatcggcatggccccaatcatgagcatgtgcacggcagaccagtctgggggaattgtcatggaccattcagacaatccccttggtgcagccgtgaccctggcacatgagctgggccacaatttcgggatgaatcatgacacactggacaggggctgtagctgtcaaatggcggttgagaaaggaggctgcatcatgaacgcttccaccgggtacccatttcccatggtgttcagcagttgcagcaggaaggacttggagaccagcctggagaaaggaatgggggtgtgcctgtttaacctgccggaagtcagggagtctttcgggggccagaagtgtgggaacagatttgtggaagaaggagaggagtgtgactgtggggagccagaggtaagaaccattcccagaacaaggatacaagaagacttgtatcctcggctaggcaaagaagagagaacttggaggaactgtacagccagatgaaagtactagaactcaggaaggaagagtcctatctgcccatcctgaacaagccccgtgagctagggtggctttcttgaat

SEQ ID NO: 734024 - DNA, 3053 bp, Homo sapiens
  misc_feature (2716)..(2716): n is a, c, g, or t
gattcattttcagtaactaataagcagaacattttgctcaaaatgaacaagttattgtccttggcagaagtgtctgaaagatcctaattcacttattgtttcacttgcagtggatattaactggccatctttagctataatacacatctgtatgtacattttaaatcaccagtgagtcatttgaaatgtatgcttccatacaaatgcaagtagacagtaaaaaagctgataacttcagcatctaattggtcaatcttcgagaacctagttaacacatcactttgcattaggcactgcaaatatttcttaaattccaacaccacaggaaccaaagagcacagagatatttttctcacctgtgtcagtgaccctcaaataacgcaaatctgttctaattttcatttcgagtttttattaacgtgatcccaactccaatgccagttttgcctgttttgcccagttttacagaccactgaacattcggatcgtgttggtaggcgtggaagtgtggaatgacatggacaaatgctctgtaagtcaggacccattcaccagcctccatgaatttctggactggaggaagatgaagcttctacctcgcaaatcccatgacaatgcgcagcttgtcagtggggtttatttccaagggaccaccatcggcatggccccaatcatgagcatgtgcacggcagaccagtctgggggaattgtcatggaccattcagacaatccccttggtgcagccgtgaccctggcacatgagctgggccacaatttcgggatgaatcatgacacactggacaggggctgtagctgtcaaatggcggttgagaaaggaggctgcatcatgaacgcttccaccgggtacccatttcccatggtgttcagcagttgcagcaggaaggacttggagaccagcctggagaaaggaatgggggtgtgcctgtttaacctgccggaagtcagggagtctttcgggggccagaagtgtgggaacagatttgtggaagaaggagaggagtgtgactgtggggagccagaggaatgtatgaatcgctgctgcaatgccaccacctgtaccctgaagccggacgctgtgtgcgcacatgggctgtgctgtgaagactgccagctgaagcctgcaggaacagcgtgcagggactccagcaactcctgtgacctcccagagttctgcacaggggccagccctcactgcccagccaacgtgtacctgcacgatgggcactcatgtcaggatgtggacggctactgctacaatggcatctgccagactcacgagcagcagtgtgtcacgctctggggaccaggtgctaaacctgcccctgggatctgctttgagagagtcaattctgcaggtgatccttatggcaactgtggcaaagtctcgaagagttcctttgccaaatgcgagatgagagatgctaaatgtggaaaaatccagtgtcaaggaggtgccagccggccagtcattggtaccaatgccgtttccatagaaacaaacatccccctgcagcaaggaggccggattctgtgccgggggacccacgtgtacttgggcgatgacatgccggacccagggcttgtgcttgcaggcacaaagtgtgcagatggaaaaatctgcctgaatcgtcaatgtcaaaatattagtgtctttggggttcacgagtgtgcaatgcagtgccacggcagaggggtgtgcaacaacaggaagaactgccactgcgaggcccactgggcacctcccttctgtgacaagtttggctttggaggaagcacagacagcggccccatccggcaagcagaagcaaggcaggaagctgcagagtccaacagggagcgcggccagggccaggagcccgtgggatcgcaggagcatgcgtctactgcctcactgacactcatctgagccctcccatgacatggagaccgtgaccagtgctgctgcagaggaggtcacgcgtccccaaggcctcctgtgactggcagcattgactctgtggctttgccatcgtttccatgacaacagacacaacacagttctcggggctcaggaggggaagtccagcctaccaggcacgtctgcagaaacagtgcaaggaagggcagcgacttcctggttgagcttctgctaaaacatggacatgcttcagtgctgctcctgagagagtagcaggttaccactctggcaggccccagccctgcagcaaggaggaagaggactcaaaagtctggcctttcactgagcccccacagcagtgggggagaagcaagggttgggcccagtgtcccctttcccccagtgacacctcagccttggcagccctgatgactggtctctggctgcaacttaatgctctgatatggcttttagcatttattatatgaaaatagcagggttttagtttttaatttatcagagaccctgccacccattccatctccatccaagcaaactgaatggcattgaaacaaactggagaagaaggtaggagaaagggcggtgaactctggctctttgctgtggacatgcgtgaccagcagtactcaggtttgagggtttgcagaaagccagggaacccacagagtcaccaacccttcatttaacaagtaagaatgttaaaaagtgaaaacaatgtaagagcctaactccatcccccgtggccattactgcataaaatagagtgcatttgaaaanaaaaaaaaaaaaaaaaaaaaaaaaatttgtgggggggctgcgggccctgagaaaaagtttttaaaaccttcggtgggggggcggggcgcccagtagtgtacttgtcagaccttggcgccataggctggtttccagaggaagatccgggcgcccatgagactcatgggtgcttggtgttccttcctccccagttaaataaaaagccgccgcgggggggaacccggagctgtttctggaaccaattcccagaagtagggaggttccgaggggcgccctcacgggaggcgtttatccaccaggggagttccagggagagtcccgattttaaaattagtcg

SEQ ID NO: 734025 - DNA, 2714 bp, Homo sapiens
gattcattttcagtaactaataagcagaacattttgctcaaaatgaacaagttattgtccttggcagaagtgtctgaaagatcctaattcacttattgtttcacttgcagtggatattaactggccatctttagctataatacacatctgtatgtacattttaaatcaccagtgagtcatttgaaatgtatgcttccatacaaatgcaagtagacagtaaaaaagctgataacttcagcatctaattggtcaatcttcgagaacctagttaacacatcactttgcattaggcactgcaaatatttcttaaattccaacaccacaggaaccaaagagcacagagatatttttctcacctgtgtcagtgaccctcaaataacgcaaatctgttctaattttcatttcgagtttttattaacgtgatcccaactccaatgccagttttgcctgttttgcccagttttacagaccactgaacattcggatcgtgttggtaggcgtggaagtgtggaatgacatggacaaatgctctgtaagtcaggacccattcaccagcctccatgaatttctggactggaggaagatgaagcttctacctcgcaaatcccatgacaatgcgcagcttgtcagtggggtttatttccaagggaccaccatcggcatggccccaatcatgagcatgtgcacggcagaccagtctgggggaattgtcatggaccattcagacaatccccttggtgcagccgtgaccctggcacatgagctgggccacaatttcgggatgaatcatgacacactggacaggggctgtagctgtcaaatggcggttgagaaaggaggctgcatcatgaacgcttccaccgggtacccatttcccatggtgttcagcagttgcagcaggaaggacttggagaccagcctggagaaaggaatgggggtgtgcctgtttaacctgccggaagtcagggagtctttcgggggccagaagtgtgggaacagatttgtggaagaaggagaggagtgtgactgtggggagccagaggaatgtatgaatcgctgctgcaatgccaccacctgtaccctgaagccggacgctgtgtgcgcacatgggctgtgctgtgaagactgccagctgaagcctgcaggaacagcgtgcagggactccagcaactcctgtgacctcccagagttctgcacaggggccagccctcactgcccagccaacgtgtacctgcacgatgggcactcatgtcaggatgtggacggctactgctacaatggcatctgccagactcacgagcagcagtgtgtcacgctctggggaccaggtgctaaacctgcccctgggatctgctttgagagagtcaattctgcaggtgatccttatggcaactgtggcaaagtctcgaagagttcctttgccaaatgcgagatgagagatgctaaatgtggaaaaatccagtgtcaaggaggtgccagccggccagtcattggtaccaatgccgtttccatagaaacaaacatccccctgcagcaaggaggccggattctgtgccgggggacccacgtgtacttgggcgatgacatgccggacccagggcttgtgcttgcaggcacaaagtgtgcagatggaaaaatctgcctgaatcgtcaatgtcaaaatattagtgtctttggggttcacgagtgtgcaatgcagtgccacggcagaggggtgtgcaacaacaggaagaactgccactgcgaggcccactgggcacctcccttctgtgacaagtttggctttggaggaagcacagacagcggccccatccggcaagcagaagcaaggcaggaagctgcagagtccaacagggagcgcggccagggccaggagcccgtgggatcgcaggagcatgcgtctactgcctcactgacactcatctgagccctcccatgacatggagaccgtgaccagtgctgctgcagaggaggtcacgcgtccccaaggcctcctgtgactggcagcattgactctgtggctttgccatcgtttccatgacaacagacacaacacagttctcggggctcaggaggggaagtccagcctaccaggcacgtctgcagaaacagtgcaaggaagggcagcgacttcctggttgagcttctgctaaaacatggacatgcttcagtgctgctcctgagagagtagcaggttaccactctggcaggccccagccctgcagcaaggaggaagaggactcaaaagtctggcctttcactgagcccccacagcagtgggggagaagcaagggttgggcccagtgtcccctttcccccagtgacacctcagccttggcagccctgatgactggtctctggctgcaacttaatgctctgatatggcttttagcatttattatatgaaaatagcagggttttagtttttaatttatcagagaccctgccacccattccatctccatccaagcaaactgaatggcattgaaacaaactggagaagaaggtaggagaaagggcggtgaactctggctctttgctgtggacatgcgtgaccagcagtactcaggtttgagggtttgcagaaagccagggaacccacagagtcaccaacccttcatttaacaagtaagaatgttaaaaagtgaaaacaatgtaagagcctaactccatcccccgtggccattactgcataaaatagagtgcatttgaaa

SEQ ID NO: 734026 - DNA, 5412 bp, Homo sapiens; identical to SEQ ID NO: 318552

SEQ ID NO: 734027 - DNA, 1214 bp, Homo sapiens
gattcattttcagtaactaataagcagaacattttgctcaaaatgaacaagttattgtccttggcagaagtgtctgaaagatcctaattcacttattgtttcacttgcagtggatattaactggccatctttagctataatacacatctgtatgtacattttaaatcaccagtgagtcatttgaaatgtatgcttccatacaaatgcaagtagacagtaaaaaagctgataacttcagcatctaattggtcaatcttcgagaacctagttaacacatcactttgcattaggcactgcaaatatttcttaaattccaacaccacaggaaccaaagagcacagagatatttttctcacctgtgtcagtgaccctcaaataacgcaaatctgttctaattttcatttcgagtttttattaacgtgatcccaactccaatgccagttttgcctgttttgcccagttttacagaccactgaacattcggatcgtgttggtaggcgtggaagtgtggaatgacatggacaaatgctctgtaagtcaggacccattcaccagcctccatgaatttctggactggaggaagatgaagcttctacctcgcaaatcccatgacaatgcgcagcttgtcagtggggtttatttccaagggaccaccatcggcatggccccaatcatgagcatgtgcacggcagaccagtctgggggaattgtcatggaccattcagacaatccccttggtgcagccgtgaccctggcacatgagctgggccacaatttcgggatgaatcatgacacactggacaggggctgtagctgtcaaatggcggttgagaaaggaggctgcatcatgaacgcttccaccgggtacccatttcccatggtgttcagcagttgcagcaggaaggacttggagaccagcctggagaaaggaatgggggtgtgcctgtttaacctgccggaagtcagggagtctttcgggggccagaagtgtgggaacagatttgtggaagaaggagaggagtgtgactgtggggagccagaggtaagaaccattcccagaacaaggatacaagaagacttgtatcctcggctaggcaaagaagagagaacttggaggaactgtacagccagatgaaagtactagaactcaggaaggaagagtcctatctgcccatcctgaacaagccccgtgagctagggtggctttcttgaat

SEQ ID NO: 734028 - DNA, 1195 bp, Homo sapiens
atgacatggcataagtgaggggtacgactgcagggagagagggcatcatgggaggggagcaacccccacagagcggcagggggttgtcaggaaggctcctggggaccctgcatctgttgaggtctgaagggggcgagggaaacatgcattctgaagccgagatagctggctgtgcgaagatctagaggagtgtggactggcctgggctcagattctagagtgcggactgggccaacaggaggggacacaggacacggtgctcgtgctggtcctggggaagagggaaatggagtcagtcactgcccgggcctctggcttgagcaacctggggagttcagcaggttcagtgtgggggccctgtaaatgttcagtttcatagattgatgtattgaagatttatggattcactttatggaactagaaattatagttcaagatttttgctgttcactttttaaattaactttaattaactttgttatgagacaccagaactctagctagagccccctgtgatcactactaagggtctgaaaagagtgacattttgcccaggaaaccagaagcaatgcttttccagtaacaccaacaagtaagtcaagactgtcatctgttggctgtcttgcttaggctaagacacatccctgataggccttgttagtgggggatggggtccagaaaccaagaaggtgtgaaagacattctttccctggagtaggagctgctgctgcagtgatccacagccagctgagggtccaggtgggaggcagggccgaggagagcccaggtaactgcatcacggcgatcaccagcagccggaaaggactgttgcacacttacctgatgtgaagtacaccctgatccttgctgatgggaagacaaatgaatcaagatccctgtcctctaaaaattcactgtccagttgaaatcacaggtagacctcctctaagtctgagcatttagagtccttcccagacagccgctgaccatagctactgtaagaaaccaacctgatggtttgatttttttccttcctttccctacccttgaggaggctcttaactgtattaaacaaaatggcagcaggtcatagaaaagaagatgttttcatagagaaaatagcttcctcccaggaaaagggtttcccccacaaaggctgtgtttttaagtccccaacataacaaagcaaaaccca

SEQ ID NO: 734029 - DNA, 5958 bp, Homo sapiens; identical to SEQ ID NO: 318528

SEQ ID NO: 734030 - DNA, 3599 bp, Homo sapiens
  misc_feature (3262)..(3262): n is a, c, g, or t
actgctggccgtggatccatttcacaggcctgccttctctcactaacgctcttcctagtccccgggccaactcggacagtttgctcatttattgcaacggtcaaggctggcttgtgccagaacggcgcgcgcgcgcgcacgcacgcacacacacggggggaaacttttttaaaaatgaaaggctagaagagctcagcggcggcgcgggcgctgcgcgagggctccggagctgactcgccgaggcaggaaatccctccggtcgcgacgcccggccccggctcggcgcccgcgtgggatggtgcagcgctcgccgccgggcccgagagctgctgcactgaaggccggcgacgatggcagcgcgcccgctgcccgtgtcccccgcccgcgccctcctgctcgccctggccggtgctctgctcgcgccctgcgaggcccgaggggtgagcttatggaaccaaggaagagctgatgaagttgtcagtgcctctgttcggagtggggacctctggatcccagtgaagagcttcgactccaagaatcatccagaagtgctgaatattcgactacaacgggaaagcaaagaactgatcataaatctggaaagaaatgaaggtctcattgccagcagtttcacggaaacccactatctgcaagacggtactgatgtctccctcgctcgaaattacacgggtcactgttactaccatggacatgtacggggatattctgattcagcagtcagtctcagcacgtgttctggtctcaggggacttattgtgtttgaaaatgaaagctatgtcttagaaccaatgaaaagtgcaaccaacagatacaaactcttcccagcgaagaagctgaaaagcgtccggggatcatgtggatcacatcacaacacaccaaacctcgctgcaaagaatgtgtttccaccaccctctcagacatgggcaagaaggcataaaagagagaccctcaaggcaactaagtatgtggagctggtgatcgtggcagacaaccgagagtttcagaggcaaggaaaagatctggaaaaagttaagcagcgattaatagagattgctaatcacgttgacaagttttacagaccactgaacattcggatcgtgttggtaggcgtggaagtgtggaatgacatggacaaatgctctgtaagtcaggacccattcaccagcctccatgaatttctggactggaggaagatgaagcttctacctcgcaaatcccatgacaatgcgcagcttgtcaggaccattcagacaatccccttggtgcagccgtgaccctggcacatgagctgggccacaatttcgggatgaatcatgacacactggacaggggctgtagctgtcaaatggcggttgagaaaggaggctgcatcatgaacgcttccaccgggtacccatttcccatggtgttcagcagttgcagcaggaaggacttggagaccagcctggagaaaggaatgggggtgtgcctgtttaacctgccggaagtcagggagtctttcgggggccagaagtgtgggaacagatttgtggaagaaggagaggagtgtgactgtggggagccagaggaatgtatgaatcgctgctgcaatgccaccacctgtaccctgaagccggacgctgtgtgcgcacatgggctgtgctgtgaagactgccagctgaagcctgcaggaacagcgtgcagggactccagcaactcctgtgacctcccagagttctgcacaggggccagccctcactgcccagccaacgtgtacctgcacgatgggcactcatgtcaggatgtggacggctactgctacaatggcatctgccagactcacgagcagcagtgtgtcacgctctggggaccaggtgctaaacctgcccctgggatctgctttgagagagtcaattctgcaggtgatccttatggcaactgtggcaaagtctcgaagagttcctttgccaaatgcgagatgagagatgctaaatgtggaaaaatccagtgtcaaggaggtgccagccggccagtcattggtaccaatgccgtttccatagaaacaaacatccccctgcagcaaggaggccggattctgtgccgggggacccacgtgtacttgggcgatgacatgccggacccagggcttgtgcttgcaggcacaaagtgtgcagatggaaaaatctgcctgaatcgtcaatgtcaaaatattagtgtctttggggttcacgagtgtgcaatgcagtgccacggcagaggggtgtgcaacaacaggaagaactgccactgcgaggcccactgggcacctcccttctgtgacaagtttggctttggaggaagcacagacagcggccccatccggcaagcagaagcaaggcaggaagctgcagagtccaacagggagcgcggccagggccaggagcccgtgggatcgcaggagcatgcgtctactgcctcactgacactcatctgagccctcccatgacatggagaccgtgaccagtgctgctgcagaggaggtcacgcgtccccaaggcctcctgtgactggcagcattgactctgtggctttgccatcgtttccatgacaacagacacaacacagttctcggggctcaggaggggaagtccagcctaccaggcacgtctgcagaaacagtgcaaggaagggcagcgacttcctggttgagcttctgctaaaacatggacatgcttcagtgctgctcctgagagagtagcaggttaccactctggcaggccccagccctgcagcaaggaggaagaggactcaaaagtctggcctttcactgagcccccacagcagtgggggagaagcaagggttgggcccagtgtcccctttcccccagtgacacctcagccttggcagccctgatgactggtctctggctgcaacttaatgctctgatatggcttttagcatttattatatgaaaatagcagggttttagtttttaatttatcagagaccctgccacccattccatctccatccaagcaaactgaatggcattgaaacaaactggagaagaaggtaggagaaagggcggtgaactctggctctttgctgtggacatgcgtgaccagcagtactcaggtttgagggtttgcagaaagccagggaacccacagagtcaccaacccttcatttaacaagtaagaatgttaaaaagtgaaaacaatgtaagagcctaactccatcccccgtggccattactgcataaaatagagtgcatttgaaaanaaaaaaaaaaaaaaaaaaaaaaaaatttgtgggggggctgcgggccctgagaaaaagtttttaaaaccttcggtgggggggcggggcgcccagtagtgtacttgtcagaccttggcgccataggctggtttccagaggaagatccgggcgcccatgagactcatgggtgcttggtgttccttcctccccagttaaataaaaagccgccgcgggggggaacccggagctgtttctggaaccaattcccagaagtagggaggttccgaggggcgccctcacgggaggcgtttatccaccaggggagttccagggagagtcccgattttaaaattagtcg

SEQ ID NO: 734031 - DNA, 3260 bp, Homo sapiens
actgctggccgtggatccatttcacaggcctgccttctctcactaacgctcttcctagtccccgggccaactcggacagtttgctcatttattgcaacggtcaaggctggcttgtgccagaacggcgcgcgcgcgcgcacgcacgcacacacacggggggaaacttttttaaaaatgaaaggctagaagagctcagcggcggcgcgggcgctgcgcgagggctccggagctgactcgccgaggcaggaaatccctccggtcgcgacgcccggccccggctcggcgcccgcgtgggatggtgcagcgctcgccgccgggcccgagagctgctgcactgaaggccggcgacgatggcagcgcgcccgctgcccgtgtcccccgcccgcgccctcctgctcgccctggccggtgctctgctcgcgccctgcgaggcccgaggggtgagcttatggaaccaaggaagagctgatgaagttgtcagtgcctctgttcggagtggggacctctggatcccagtgaagagcttcgactccaagaatcatccagaagtgctgaatattcgactacaacgggaaagcaaagaactgatcataaatctggaaagaaatgaaggtctcattgccagcagtttcacggaaacccactatctgcaagacggtactgatgtctccctcgctcgaaattacacgggtcactgttactaccatggacatgtacggggatattctgattcagcagtcagtctcagcacgtgttctggtctcaggggacttattgtgtttgaaaatgaaagctatgtcttagaaccaatgaaaagtgcaaccaacagatacaaactcttcccagcgaagaagctgaaaagcgtccggggatcatgtggatcacatcacaacacaccaaacctcgctgcaaagaatgtgtttccaccaccctctcagacatgggcaagaaggcataaaagagagaccctcaaggcaactaagtatgtggagctggtgatcgtggcagacaaccgagagtttcagaggcaaggaaaagatctggaaaaagttaagcagcgattaatagagattgctaatcacgttgacaagttttacagaccactgaacattcggatcgtgttggtaggcgtggaagtgtggaatgacatggacaaatgctctgtaagtcaggacccattcaccagcctccatgaatttctggactggaggaagatgaagcttctacctcgcaaatcccatgacaatgcgcagcttgtcaggaccattcagacaatccccttggtgcagccgtgaccctggcacatgagctgggccacaatttcgggatgaatcatgacacactggacaggggctgtagctgtcaaatggcggttgagaaaggaggctgcatcatgaacgcttccaccgggtacccatttcccatggtgttcagcagttgcagcaggaaggacttggagaccagcctggagaaaggaatgggggtgtgcctgtttaacctgccggaagtcagggagtctttcgggggccagaagtgtgggaacagatttgtggaagaaggagaggagtgtgactgtggggagccagaggaatgtatgaatcgctgctgcaatgccaccacctgtaccctgaagccggacgctgtgtgcgcacatgggctgtgctgtgaagactgccagctgaagcctgcaggaacagcgtgcagggactccagcaactcctgtgacctcccagagttctgcacaggggccagccctcactgcccagccaacgtgtacctgcacgatgggcactcatgtcaggatgtggacggctactgctacaatggcatctgccagactcacgagcagcagtgtgtcacgctctggggaccaggtgctaaacctgcccctgggatctgctttgagagagtcaattctgcaggtgatccttatggcaactgtggcaaagtctcgaagagttcctttgccaaatgcgagatgagagatgctaaatgtggaaaaatccagtgtcaaggaggtgccagccggccagtcattggtaccaatgccgtttccatagaaacaaacatccccctgcagcaaggaggccggattctgtgccgggggacccacgtgtacttgggcgatgacatgccggacccagggcttgtgcttgcaggcacaaagtgtgcagatggaaaaatctgcctgaatcgtcaatgtcaaaatattagtgtctttggggttcacgagtgtgcaatgcagtgccacggcagaggggtgtgcaacaacaggaagaactgccactgcgaggcccactgggcacctcccttctgtgacaagtttggctttggaggaagcacagacagcggccccatccggcaagcagaagcaaggcaggaagctgcagagtccaacagggagcgcggccagggccaggagcccgtgggatcgcaggagcatgcgtctactgcctcactgacactcatctgagccctcccatgacatggagaccgtgaccagtgctgctgcagaggaggtcacgcgtccccaaggcctcctgtgactggcagcattgactctgtggctttgccatcgtttccatgacaacagacacaacacagttctcggggctcaggaggggaagtccagcctaccaggcacgtctgcagaaacagtgcaaggaagggcagcgacttcctggttgagcttctgctaaaacatggacatgcttcagtgctgctcctgagagagtagcaggttaccactctggcaggccccagccctgcagcaaggaggaagaggactcaaaagtctggcctttcactgagcccccacagcagtgggggagaagcaagggttgggcccagtgtcccctttcccccagtgacacctcagccttggcagccctgatgactggtctctggctgcaacttaatgctctgatatggcttttagcatttattatatgaaaatagcagggttttagtttttaatttatcagagaccctgccacccattccatctccatccaagcaaactgaatggcattgaaacaaactggagaagaaggtaggagaaagggcggtgaactctggctctttgctgtggacatgcgtgaccagcagtactcaggtttgagggtttgcagaaagccagggaacccacagagtcaccaacccttcatttaacaagtaagaatgttaaaaagtgaaaacaatgtaagagcctaactccatcccccgtggccattactgcataaaatagagtgcatttgaaa

SEQ ID NO: 734032 - DNA, 1760 bp, Homo sapiens
actgctggccgtggatccatttcacaggcctgccttctctcactaacgctcttcctagtccccgggccaactcggacagtttgctcatttattgcaacggtcaaggctggcttgtgccagaacggcgcgcgcgcgcgcacgcacgcacacacacggggggaaacttttttaaaaatgaaaggctagaagagctcagcggcggcgcgggcgctgcgcgagggctccggagctgactcgccgaggcaggaaatccctccggtcgcgacgcccggccccggctcggcgcccgcgtgggatggtgcagcgctcgccgccgggcccgagagctgctgcactgaaggccggcgacgatggcagcgcgcccgctgcccgtgtcccccgcccgcgccctcctgctcgccctggccggtgctctgctcgcgccctgcgaggcccgaggggtgagcttatggaaccaaggaagagctgatgaagttgtcagtgcctctgttcggagtggggacctctggatcccagtgaagagcttcgactccaagaatcatccagaagtgctgaatattcgactacaacgggaaagcaaagaactgatcataaatctggaaagaaatgaaggtctcattgccagcagtttcacggaaacccactatctgcaagacggtactgatgtctccctcgctcgaaattacacgggtcactgttactaccatggacatgtacggggatattctgattcagcagtcagtctcagcacgtgttctggtctcaggggacttattgtgtttgaaaatgaaagctatgtcttagaaccaatgaaaagtgcaaccaacagatacaaactcttcccagcgaagaagctgaaaagcgtccggggatcatgtggatcacatcacaacacaccaaacctcgctgcaaagaatgtgtttccaccaccctctcagacatgggcaagaaggcataaaagagagaccctcaaggcaactaagtatgtggagctggtgatcgtggcagacaaccgagagtttcagaggcaaggaaaagatctggaaaaagttaagcagcgattaatagagattgctaatcacgttgacaagttttacagaccactgaacattcggatcgtgttggtaggcgtggaagtgtggaatgacatggacaaatgctctgtaagtcaggacccattcaccagcctccatgaatttctggactggaggaagatgaagcttctacctcgcaaatcccatgacaatgcgcagcttgtcaggaccattcagacaatccccttggtgcagccgtgaccctggcacatgagctgggccacaatttcgggatgaatcatgacacactggacaggggctgtagctgtcaaatggcggttgagaaaggaggctgcatcatgaacgcttccaccgggtacccatttcccatggtgttcagcagttgcagcaggaaggacttggagaccagcctggagaaaggaatgggggtgtgcctgtttaacctgccggaagtcagggagtctttcgggggccagaagtgtgggaacagatttgtggaagaaggagaggagtgtgactgtggggagccagaggtaagaaccattcccagaacaaggatacaagaagacttgtatcctcggctaggcaaagaagagagaacttggaggaactgtacagccagatgaaagtactagaactcaggaaggaagagtcctatctgcccatcctgaacaagccccgtgagctagggtggctttcttgaat

SEQ ID NO: 734033 - DNA, 1077 bp, Homo sapiens; identical to SEQ ID NO: 318541

SEQ ID NO: 734034 - DNA, 1389 bp, Homo sapiens
actgctggccgtggatccatttcacaggcctgccttctctcactaacgctcttcctagtccccgggccaactcggacagtttgctcatttattgcaacggtcaaggctggcttgtgccagaacggcgcgcgcgcgcgcacgcacgcacacacacggggggaaacttttttaaaaatgaaaggctagaagagctcagcggcggcgcgggcgctgcgcgagggctccggagctgactcgccgaggcaggaaatccctccggtcgcgacgcccggccccggctcggcgcccgcgtgggatggtgcagcgctcgccgccgggcccgagagctgctgcactgaaggccggcgacgatggcagcgcgcccgctgcccgtgtcccccgcccgcgccctcctgctcgccctggccggtgctctgctcgcgccctgcgaggcccgaggggtgagcttatggaaccaaggaagagctgatgaagttgtcagtgcctctgttcggagtggggacctctggatcccagtgaagagcttcgactccaagaatcatccagaagtgctgaatattcgactacaacgggaaagcaaagaactgatcataaatctggaaagaaatgaaggtctcattgccagcagtttcacggaaacccactatctgcaagacggtactgatgtctccctcgctcgaaattacacgggtcactgttactaccatggacatgtacggggatattctgattcagcagtcagtctcagcacgtgttctggtctcaggggacttattgtgtttgaaaatgaaagctatgtcttagaaccaatgaaaagtgcaaccaacagatacaaactcttcccagcgaagaagctgaaaagcgtccggggatcatgtggatcacatcacaacacaccaaacctcgctgcaaagaatgtgtttccaccaccctctcagacatgggcaagaaggcataaaagagagaccctcaaggcaactaagtatgtggagctggtgatcgtggcagacaaccgagagtttcagaggcaaggaaaagatctggaaaaagttaagcagcgattaatagagattgctaatcacgttgacaagttttacagaccactgaacattcggatcgtgttggtaggcttggggatgtcagttaaattcagtctcagctccaaaggtgattcagagatgaatcagtaactgctttaatgatattaacatctcagaatcaaaaagaaccaagtattgtagatggcttaaaggagaaaagtatatcccttcatataccttgtttattctttatcaaaacattccagaatcctaactctgaaaacattaaccaattgctgtcactgacaaatgggacctgaggcctgtaaatacaaggatagagtcctat

SEQ ID NO: 734035 - DNA, 3316 bp, Homo sapiens
cagggactcgtagacccagttggatcataaaaagcagaagctttgctttcctaacagacggaaacaggcaggtgtgcagttcaggagctgggccctcttggtctttcttgctttttgcagccatttaaggtgtgatgtttgcattcagtgagtgcatactccataagaccctgtcaaacaaatgccattcccctttccaggaatgtatgaatcgctgctgcaatgccaccacctgtaccctgaagccggacgctgtgtgcgcacatgggctgtgctgtgaagactgccagctgaagcctgcaggaacagcgtgcagggactccagcaactcctgtgacctcccagagttctgcacaggggccagccctcactgcccagccaacgtgtacctgcacgatgggcactcatgtcaggatgtggacggctactgctacaatggcatctgccagactcacgagcagcagtgtgtcacgctctggggaccaggtgctaaacctgcccctgggatctgctttgagagagtcaattctgcaggtgatccttatggcaactgtggcaaagtctcgaagagttcctttgccaaatgcgagatgagagatgctaaatgtggaaaaatccagtgtcaaggaggtgccagccggccagtcattggtaccaatgccgtttccatagaaacaaacatccccctgcagcaaggaggccggattctgtgccgggggacccacgtgtacttgggcgatgacatgccggacccagggcttgtgcttgcaggcacaaagtgtgcagatggaaaaatctgcctgaatcgtcaatgtcaaaatattagtgtctttggggttcacgagtgtgcaatgcagtgccacggcagaggggtgtgcaacaacaggaagaactgccactgcgaggcccactgggcacctcccttctgtgacaagtttggctttggaggaagcacagacagcggccccatccggcaagcagataaccaaggtttaaccataggaattctggtgaccatcctgtgtcttcttgctgccggatttgtggtttatctcaaaaggaagaccttgatacgactgctgtttacaaataagaagaccaccattgaaaaactaaggtaccctgggtttagcttgtcatctgttctagaaatggtggctcagaggctgggtgcggtggctcaagcctgtaatcccagcactttgggaggctgaggcgggcggatcacgaggtcaggagatcgagaccacggtgaaaccccgtctctactaaaaatacaaaatatcagccgggcgcggtggtgggtgcctgtagtcccatctactcgggaggctgaggcatgagaatggcgtgaacccgggaggcggagcttgcagtgagttgcgatcactccactgcactccagcctgggcgagagagcaagactccatctcaaaaaaaaaaaaaaaaaaaaaaaaaagaaatggtgtctcagaaaatgtacagcaaactgcttctcacttcatttttttagcaaaggtcagattttctggatcataaacctgggacttggttcttttttggggggtttcttgttttaaatttctgccagatcagctgcctcctttacttcccttcaaacaacaatgtgctgcttattacataagctagcagggtgtcaggaaattccactgatgtgttttctcccacccttatattagtaatttttatacaacatggagacattgaaatattttcatcagatggggtagcttttgatccaaatatattcaaagacattatcgctgaaatgccagcttcatacaaatcatcttccaggtgtcactacactgcatttctatggagcgtgagaactaatttgacaaaatagaggttttgagggaaaaaccagtatttattttttaatctcctaagagtgttattaggtaatttttcctttgcatgtttagcacactgagttaagtaaactgtcttttgagtgccactatgagcaaagtgtaaaaagtcaagtcagtgagaaggggaaacacgcttggtcagcaggtatgggattctgttgcaggtgtgtgcgcccttcccggccaccccgtggcttccaaccctgtcaggctcacctcggccaccttggaaaaggcctgatgaggaagccgccagattcctacccaccgaaggtgagtcttgagtagatgtgagtgctcagggcacacatgcagacatgaggttttcaatacgagactgaataagaatgggatcctagaggcgctgcctgtgaaatgctgagtcagcctcactaggtcagcaggctctgagggagggtctctgtgatctggggccagagggaggccccacggtgcccccatggaagcccacctagatcctgttggcgcactcagtgccccctgcatgatatggtgcagcatagtgtgagctgtgatcccttcagtcacccagaccagccacatttctggggccccactgggtctgcagcccgagctggctcctgacaccagcccccaatgccagccccaccatggtttccaaatgccaccacctggctttaggtgagctgctttagcccactgttactcttaaaatatttttcaaaagttacatggagctctcagaattgaccattttgctccagccctgagctgaggaagccctgtccaccctgtggtttcagagaactggatccttaacccagagtacctcacggctccctgctgtctcttaaccctcttgctaccctggtgaattacagctagagttcattctaatagttcttccccaccgagtttttctgatgtacccacaagaattcttgaatattgaacttagtcaacaagagtccaaattataacagtgaacaagattggtgtcaaaaaaaataagtgattgaaaaatcattgctgcatatgcagtaggcaataaactgttttaactcccttgatccaaaaaacgcaaagggtggggctccaaggaggaggctgccattcccaataagctttacccctgctcgtccccaaaggtggaaccataagcgagaacggctttgtgtggtagccaaaagcacatcttcattttcgtaaaaaagaaaaatgcagctctattaaaaaaaaaaaaaaagcacagccttatttttgagagccccaaactagaaacaatccaaatatccatcaaccagtaaaaggataaacaatggtatatttgcacaatggaatgaaccattgatgtatacaacattgaggatgaatctctagataattattctgagtaaaagaagaaaagccagagtatatactctgtgatcccactt

SEQ ID NO: 734036 - DNA, 4789 bp, Homo sapiens; identical to SEQ ID NO: 318531

SEQ ID NO: 734037 - DNA, 1006 bp, Homo sapiens
tagaggatccccggtgtttatcgatgccacagatcaaggcctcctgtgactggcagcattgactctgtggctttgccatcgtttccatgacaacagacacaacacagttctcggggctcaggaggggaagtccagcctaccaggcacgtctgcagaaacagtgcaaggaagggcagcgacttcctggttgagcttctgctaaaacatggacatgcttcagtgctgctcctgagagagtagcaggttaccactctggcaggccccagccctgcagcaaggaggaagaggactcaaaagtctggcctttcactgagcccccacagcagtgggggagaagcaagggttgggcccagtgtcccctttcccccagtgacacctcagccttggcagccctgatgactggtctctggctgcaacttaatgctctgatatggcttttagcatttattatatgaaaatagcagggttttagtttttaatttatcagagaccctgccacccattccatctccatccaagcaaactgaatggcattgaaacaaactggagaagaaggtaggagaaagggcggtgaactctggctctttgctgtggacatgcgtgaccagcagtactcaggtttgagggtttgcagaaagccagggaacccacagagtcaccaacccttcatttaacaagtaagaatgttaaaaagtgaaaacaatgtaagagcctaactccatcccccgtggccattactgcataaaatagagtgcatttgaaataccgctgcctccaccctgttcatacatatataaaatcaaggcaggccatgagcaagcatggctcactgctccctggcctggccatggctcaggggctcattaaacaagtactcgtgtgtctgccacacaccagccactctcctgggtcctggagagacattaagcaagaatgacatggcataagtgaggggtacgactgcagggagagagggcatcatgggaggggagcaacccccacagag

SEQ ID NO: 734038 - DNA, 2115 bp, Homo sapiens
cagggactcgtagacccagttggatcataaaaagcagaagctttgctttcctaacagacggaaacaggcaggtgtgcagttcaggagctgggccctcttggtctttcttgctttttgcagccatttaaggtgtgatgtttgcattcagtgagtgcatactccataagaccctgtcaaacaaatgccattcccctttccaggaatgtatgaatcgctgctgcaatgccaccacctgtaccctgaagccggacgctgtgtgcgcacatgggctgtgctgtgaagactgccagctgaagcctgcaggaacagcgtgcagggactccagcaactcctgtgacctcccagagttctgcacaggggccagccctcactgcccagccaacgtgtacctgcacgatgggcactcatgtcaggatgtggacggctactgctacaatggcatctgccagactcacgagcagcagtgtgtcacgctctggggaccaggtgctaaacctgcccctgggatctgctttgagagagtcaattctgcaggtgatccttatggcaactgtggcaaagtctcgaagagttcctttgccaaatgcgagatgagagatgctaaatgtggaaaaatccagtgtcaaggaggtgccagccggccagtcattggtaccaatgccgtttccatagaaacaaacatccccctgcagcaaggaggccggattctgtgccgggggacccacgtgtacttgggcgatgacatgccggacccagggcttgtgcttgcaggcacaaagtgtgcagatggaaaaatctgcctgaatcgtcaatgtcaaaatattagtgtctttggggttcacgagtgtgcaatgcagtgccacggcagaggggtgtgcaacaacaggaagaactgccactgcgaggcccactgggcacctcccttctgtgacaagtttggctttggaggaagcacagacagcggccccatccggcaagcagaagcaaggcaggaagctgcagagtccaacagggagcgcggccagggccaggagcccgtgggatcgcaggagcatgcgtctactgcctcactgacactcatctgagccctcccatgacatggagaccgtgaccagtgctgctgcagaggaggtcacgcgtccccaaggcctcctgtgactggcagcattgactctgtggctttgccatcgtttccatgacaacagacacaacacagttctcggggctcaggaggggaagtccagcctaccaggcacgtctgcagaaacagtgcaaggaagggcagcgacttcctggttgagcttctgctaaaacatggacatgcttcagtgctgctcctgagagagtagcaggttaccactctggcaggccccagccctgcagcaaggaggaagaggactcaaaagtctggcctttcactgagcccccacagcagtgggggagaagcaagggttgggcccagtgtcccctttcccccagtgacacctcagccttggcagccctgatgactggtctctggctgcaacttaatgctctgatatggcttttagcatttattatatgaaaatagcagggttttagtttttaatttatcagagaccctgccacccattccatctccatccaagcaaactgaatggcattgaaacaaactggagaagaaggtaggagaaagggcggtgaactctggctctttgctgtggacatgcgtgaccagcagtactcaggtttgagggtttgcagaaagccagggaacccacagagtcaccaacccttcatttaacaagtaagaatgttaaaaagtgaaaacaatgtaagagcctaactccatcccccgtggccattactgcataaaatagagtgcatttgaaataccgctgcctccaccctgttcatacatatataaaatcaaggcaggccatgagcaagcatggctcactgctccctggcctggccatggctcaggggctcattaaacaagtactcgtgtgtctgccacacaccagccactctcctgggtcctggagagacattaagcaagaatgacatggcataagtgaggggtacgactgcagggagagagggcatcatgggaggggagcaacccccacagag

SEQ ID NO: 734039 - DNA, 2692 bp, Homo sapiens
  misc_feature (41)..(42): n is a, c, g, or t
  misc_feature (49)..(51): n is a, c, g, or t
  misc_feature (53)..(53): n is a, c, g, or t
  misc_feature (55)..(55): n is a, c, g, or t
tggcgcctttactaagtacaccgctcttctcttacttgtgnngaacgcnnnananatcataaaagagagaccctcaaggcaactaagtatgtggagctggtgatcgtggcagacaaccgagagtttcagaggcaaggaaaagatctggaaaaagttaagcagcgattaatagagattgctaatcacgttgacaagttttacagaccactgaacattcggatcgtgttggtaggcgtggaagtgtggaatgacatggacaaatgctctgtaagtcaggacccattcaccagcctccatgaatttctggactggaggaagatgaagcttctacctcgcaaatcccatgacaatgcgcagcttgtcagtggggtttatttccaagggaccaccatcggcatggccccaatcatgagcatgtgcacggcagaccagtctgggggaattgtcatggaccattcagacaatccccttggtgcagccgtgaccctggcacatgagctgggccacaatttcgggatgaatcatgacacactggacaggggctgtagctgtcaaatggcggttgagaaaggaggctgcatcatgaacgcttccaccgggtacccatttcccatggtgttcagcagttgcagcaggaaggacttggagaccagcctggagaaaggaatgggggtgtgcctgtttaacctgccggaagtcagggagtctttcgggggccagaagtgtgggaacagatttgtggaagaaggagaggagtgtgactgtggggagccagaggaatgtatgaatcgctgctgcaatgccaccacctgtaccctgaagccggacgctgtgtgcgcacatgggctgtgctgtgaagactgccagctgaagcctgcaggaacagcgtgcagggactccagcaactcctgtgacctcccagagttctgcacaggggccagccctcactgcccagccaacgtgtacctgcacgatgggcactcatgtcaggatgtggacggctactgctacaatggcatctgccagactcacgagcagcagtgtgtcacgctctggggaccaggtgctaaacctgcccctgggatctgctttgagagagtcaattctgcaggtgatccttatggcaactgtggcaaagtctcgaagagttcctttgccaaatgcgagatgagagatgctaaatgtggaaaaatccagtgtcaaggaggtgccagccggccagtcattggtaccaatgccgtttccatagaaacaaacatccccctgcagcaaggaggccggattctgtgccgggggacccacgtgtacttgggcgatgacatgccggacccagggcttgtgcttgcaggcacaaagtgtgcagatggaaaaatctgcctgaatcgtcaatgtcaaaatattagtgtctttggggttcacgagtgtgcaatgcagtgccacggcagaggggtgtgcaacaacaggaagaactgccactgcgaggcccactgggcacctcccttctgtgacaagtttggctttggaggaagcacagacagcggccccatccggcaagcagaagcaaggcaggaagctgcagagtccaacagggagcgcggccagggccaggagcccgtgggatcgcaggagcatgcgtctactgcctcactgacactcatctgagccctcccatgacatggagaccgtgaccagtgctgctgcagaggaggtcacgcgtccccaaggcctcctgtgactggcagcattgactctgtggctttgccatcgtttccatgacaacagacacaacacagttctcggggctcaggaggggaagtccagcctaccaggcacgtctgcagaaacagtgcaaggaagggcagcgacttcctggttgagcttctgctaaaacatggacatgcttcagtgctgctcctgagagagtagcaggttaccactctggcaggccccagccctgcagcaaggaggaagaggactcaaaagtctggcctttcactgagcccccacagcagtgggggagaagcaagggttgggcccagtgtcccctttcccccagtgacacctcagccttggcagccctgatgactggtctctggctgcaacttaatgctctgatatggcttttagcatttattatatgaaaatagcagggttttagtttttaatttatcagagaccctgccacccattccatctccatccaagcaaactgaatggcattgaaacaaactggagaagaaggtaggagaaagggcggtgaactctggctctttgctgtggacatgcgtgaccagcagtactcaggtttgagggtttgcagaaagccagggaacccacagagtcaccaacccttcatttaacaagtaagaatgttaaaaagtgaaaacaatgtaagagcctaactccatcccccgtggccattactgcataaaatagagtgcatttgaaataccgctgcctccaccctgttcatacatatataaaatcaaggcaggccatgagcaagcatggctcactgctccctggcctggccatggctcaggggctcattaaacaagtactcgtgtgtctgccacacaccagccactctcctgggtcctggagagacattaagcaagaatgacatggcataagtgaggggtacgactgcagggagagagggcatcatgggaggggagcaacccccacagag

SEQ ID NO: 734040 - DNA, 3893 bp, Homo sapiens
  misc_feature (41)..(42): n is a, c, g, or t
  misc_feature (49)..(51): n is a, c, g, or t
  misc_feature (53)..(53): n is a, c, g, or t
  misc_feature (55)..(55): n is a, c, g, or t
tggcgcctttactaagtacaccgctcttctcttacttgtgnngaacgcnnnananatcataaaagagagaccctcaaggcaactaagtatgtggagctggtgatcgtggcagacaaccgagagtttcagaggcaaggaaaagatctggaaaaagttaagcagcgattaatagagattgctaatcacgttgacaagttttacagaccactgaacattcggatcgtgttggtaggcgtggaagtgtggaatgacatggacaaatgctctgtaagtcaggacccattcaccagcctccatgaatttctggactggaggaagatgaagcttctacctcgcaaatcccatgacaatgcgcagcttgtcagtggggtttatttccaagggaccaccatcggcatggccccaatcatgagcatgtgcacggcagaccagtctgggggaattgtcatggaccattcagacaatccccttggtgcagccgtgaccctggcacatgagctgggccacaatttcgggatgaatcatgacacactggacaggggctgtagctgtcaaatggcggttgagaaaggaggctgcatcatgaacgcttccaccgggtacccatttcccatggtgttcagcagttgcagcaggaaggacttggagaccagcctggagaaaggaatgggggtgtgcctgtttaacctgccggaagtcagggagtctttcgggggccagaagtgtgggaacagatttgtggaagaaggagaggagtgtgactgtggggagccagaggaatgtatgaatcgctgctgcaatgccaccacctgtaccctgaagccggacgctgtgtgcgcacatgggctgtgctgtgaagactgccagctgaagcctgcaggaacagcgtgcagggactccagcaactcctgtgacctcccagagttctgcacaggggccagccctcactgcccagccaacgtgtacctgcacgatgggcactcatgtcaggatgtggacggctactgctacaatggcatctgccagactcacgagcagcagtgtgtcacgctctggggaccaggtgctaaacctgcccctgggatctgctttgagagagtcaattctgcaggtgatccttatggcaactgtggcaaagtctcgaagagttcctttgccaaatgcgagatgagagatgctaaatgtggaaaaatccagtgtcaaggaggtgccagccggccagtcattggtaccaatgccgtttccatagaaacaaacatccccctgcagcaaggaggccggattctgtgccgggggacccacgtgtacttgggcgatgacatgccggacccagggcttgtgcttgcaggcacaaagtgtgcagatggaaaaatctgcctgaatcgtcaatgtcaaaatattagtgtctttggggttcacgagtgtgcaatgcagtgccacggcagaggggtgtgcaacaacaggaagaactgccactgcgaggcccactgggcacctcccttctgtgacaagtttggctttggaggaagcacagacagcggccccatccggcaagcagataaccaaggtttaaccataggaattctggtgaccatcctgtgtcttcttgctgccggatttgtggtttatctcaaaaggaagaccttgatacgactgctgtttacaaataagaagaccaccattgaaaaactaaggtaccctgggtttagcttgtcatctgttctagaaatggtggctcagaggctgggtgcggtggctcaagcctgtaatcccagcactttgggaggctgaggcgggcggatcacgaggtcaggagatcgagaccacggtgaaaccccgtctctactaaaaatacaaaatatcagccgggcgcggtggtgggtgcctgtagtcccatctactcgggaggctgaggcatgagaatggcgtgaacccgggaggcggagcttgcagtgagttgcgatcactccactgcactccagcctgggcgagagagcaagactccatctcaaaaaaaaaaaaaaaaaaaaaaaaaagaaatggtgtctcagaaaatgtacagcaaactgcttctcacttcatttttttagcaaaggtcagattttctggatcataaacctgggacttggttcttttttggggggtttcttgttttaaatttctgccagatcagctgcctcctttacttcccttcaaacaacaatgtgctgcttattacataagctagcagggtgtcaggaaattccactgatgtgttttctcccacccttatattagtaatttttatacaacatggagacattgaaatattttcatcagatggggtagcttttgatccaaatatattcaaagacattatcgctgaaatgccagcttcatacaaatcatcttccaggtgtcactacactgcatttctatggagcgtgagaactaatttgacaaaatagaggttttgagggaaaaaccagtatttattttttaatctcctaagagtgttattaggtaatttttcctttgcatgtttagcacactgagttaagtaaactgtcttttgagtgccactatgagcaaagtgtaaaaagtcaagtcagtgagaaggggaaacacgcttggtcagcaggtatgggattctgttgcaggtgtgtgcgcccttcccggccaccccgtggcttccaaccctgtcaggctcacctcggccaccttggaaaaggcctgatgaggaagccgccagattcctacccaccgaaggtgagtcttgagtagatgtgagtgctcagggcacacatgcagacatgaggttttcaatacgagactgaataagaatgggatcctagaggcgctgcctgtgaaatgctgagtcagcctcactaggtcagcaggctctgagggagggtctctgtgatctggggccagagggaggccccacggtgcccccatggaagcccacctagatcctgttggcgcactcagtgccccctgcatgatatggtgcagcatagtgtgagctgtgatcccttcagtcacccagaccagccacatttctggggccccactgggtctgcagcccgagctggctcctgacaccagcccccaatgccagccccaccatggtttccaaatgccaccacctggctttaggtgagctgctttagcccactgttactcttaaaatatttttcaaaagttacatggagctctcagaattgaccattttgctccagccctgagctgaggaagccctgtccaccctgtggtttcagagaactggatccttaacccagagtacctcacggctccctgctgtctcttaaccctcttgctaccctggtgaattacagctagagttcattctaatagttcttccccaccgagtttttctgatgtacccacaagaattcttgaatattgaacttagtcaacaagagtccaaattataacagtgaacaagattggtgtcaaaaaaaataagtgattgaaaaatcattgctgcatatgcagtaggcaataaactgttttaactcccttgatccaaaaaacgcaaagggtggggctccaaggaggaggctgccattcccaataagctttacccctgctcgtccccaaaggtggaaccataagcgagaacggctttgtgtggtagccaaaagcacatcttcattttcgtaaaaaagaaaaatgcagctctattaaaaaaaaaaaaaaagcacagccttatttttgagagccccaaactagaaacaatccaaatatccatcaaccagtaaaaggataaacaatggtatatttgcacaatggaatgaaccattgatgtatacaacattgaggatgaatctctagataattattctgagtaaaagaagaaaagccagagtatatactctgtgatcccactt

SEQ ID NO: 734041 - DNA, 2957 bp, Homo sapiens
gattcattttcagtaactaataagcagaacattttgctcaaaatgaacaagttattgtccttggcagaagtgtctgaaagatcctaattcacttattgtttcacttgcagtggatattaactggccatctttagctataatacacatctgtatgtacattttaaatcaccagtgagtcatttgaaatgtatgcttccatacaaatgcaagtagacagtaaaaaagctgataacttcagcatctaattggtcaatcttcgagaacctagttaacacatcactttgcattaggcactgcaaatatttcttaaattccaacaccacaggaaccaaagagcacagagatatttttctcacctgtgtcagtgaccctcaaataacgcaaatctgttctaattttcatttcgagtttttattaacgtgatcccaactccaatgccagttttgcctgttttgcccagttttacagaccactgaacattcggatcgtgttggtaggcgtggaagtgtggaatgacatggacaaatgctctgtaagtcaggacccattcaccagcctccatgaatttctggactggaggaagatgaagcttctacctcgcaaatcccatgacaatgcgcagcttgtcagtggggtttatttccaagggaccaccatcggcatggccccaatcatgagcatgtgcacggcagaccagtctgggggaattgtcatggaccattcagacaatccccttggtgcagccgtgaccctggcacatgagctgggccacaatttcgggatgaatcatgacacactggacaggggctgtagctgtcaaatggcggttgagaaaggaggctgcatcatgaacgcttccaccgggtacccatttcccatggtgttcagcagttgcagcaggaaggacttggagaccagcctggagaaaggaatgggggtgtgcctgtttaacctgccggaagtcagggagtctttcgggggccagaagtgtgggaacagatttgtggaagaaggagaggagtgtgactgtggggagccagaggaatgtatgaatcgctgctgcaatgccaccacctgtaccctgaagccggacgctgtgtgcgcacatgggctgtgctgtgaagactgccagctgaagcctgcaggaacagcgtgcagggactccagcaactcctgtgacctcccagagttctgcacaggggccagccctcactgcccagccaacgtgtacctgcacgatgggcactcatgtcaggatgtggacggctactgctacaatggcatctgccagactcacgagcagcagtgtgtcacgctctggggaccaggtgctaaacctgcccctgggatctgctttgagagagtcaattctgcaggtgatccttatggcaactgtggcaaagtctcgaagagttcctttgccaaatgcgagatgagagatgctaaatgtggaaaaatccagtgtcaaggaggtgccagccggccagtcattggtaccaatgccgtttccatagaaacaaacatccccctgcagcaaggaggccggattctgtgccgggggacccacgtgtacttgggcgatgacatgccggacccagggcttgtgcttgcaggcacaaagtgtgcagatggaaaaatctgcctgaatcgtcaatgtcaaaatattagtgtctttggggttcacgagtgtgcaatgcagtgccacggcagaggggtgtgcaacaacaggaagaactgccactgcgaggcccactgggcacctcccttctgtgacaagtttggctttggaggaagcacagacagcggccccatccggcaagcagaagcaaggcaggaagctgcagagtccaacagggagcgcggccagggccaggagcccgtgggatcgcaggagcatgcgtctactgcctcactgacactcatctgagccctcccatgacatggagaccgtgaccagtgctgctgcagaggaggtcacgcgtccccaaggcctcctgtgactggcagcattgactctgtggctttgccatcgtttccatgacaacagacacaacacagttctcggggctcaggaggggaagtccagcctaccaggcacgtctgcagaaacagtgcaaggaagggcagcgacttcctggttgagcttctgctaaaacatggacatgcttcagtgctgctcctgagagagtagcaggttaccactctggcaggccccagccctgcagcaaggaggaagaggactcaaaagtctggcctttcactgagcccccacagcagtgggggagaagcaagggttgggcccagtgtcccctttcccccagtgacacctcagccttggcagccctgatgactggtctctggctgcaacttaatgctctgatatggcttttagcatttattatatgaaaatagcagggttttagtttttaatttatcagagaccctgccacccattccatctccatccaagcaaactgaatggcattgaaacaaactggagaagaaggtaggagaaagggcggtgaactctggctctttgctgtggacatgcgtgaccagcagtactcaggtttgagggtttgcagaaagccagggaacccacagagtcaccaacccttcatttaacaagtaagaatgttaaaaagtgaaaacaatgtaagagcctaactccatcccccgtggccattactgcataaaatagagtgcatttgaaataccgctgcctccaccctgttcatacatatataaaatcaaggcaggccatgagcaagcatggctcactgctccctggcctggccatggctcaggggctcattaaacaagtactcgtgtgtctgccacacaccagccactctcctgggtcctggagagacattaagcaagaatgacatggcataagtgaggggtacgactgcagggagagagggcatcatgggaggggagcaacccccacagag

SEQ ID NO: 734042 - DNA, 4158 bp, Homo sapiens
gattcattttcagtaactaataagcagaacattttgctcaaaatgaacaagttattgtccttggcagaagtgtctgaaagatcctaattcacttattgtttcacttgcagtggatattaactggccatctttagctataatacacatctgtatgtacattttaaatcaccagtgagtcatttgaaatgtatgcttccatacaaatgcaagtagacagtaaaaaagctgataacttcagcatctaattggtcaatcttcgagaacctagttaacacatcactttgcattaggcactgcaaatatttcttaaattccaacaccacaggaaccaaagagcacagagatatttttctcacctgtgtcagtgaccctcaaataacgcaaatctgttctaattttcatttcgagtttttattaacgtgatcccaactccaatgccagttttgcctgttttgcccagttttacagaccactgaacattcggatcgtgttggtaggcgtggaagtgtggaatgacatggacaaatgctctgtaagtcaggacccattcaccagcctccatgaatttctggactggaggaagatgaagcttctacctcgcaaatcccatgacaatgcgcagcttgtcagtggggtttatttccaagggaccaccatcggcatggccccaatcatgagcatgtgcacggcagaccagtctgggggaattgtcatggaccattcagacaatccccttggtgcagccgtgaccctggcacatgagctgggccacaatttcgggatgaatcatgacacactggacaggggctgtagctgtcaaatggcggttgagaaaggaggctgcatcatgaacgcttccaccgggtacccatttcccatggtgttcagcagttgcagcaggaaggacttggagaccagcctggagaaaggaatgggggtgtgcctgtttaacctgccggaagtcagggagtctttcgggggccagaagtgtgggaacagatttgtggaagaaggagaggagtgtgactgtggggagccagaggaatgtatgaatcgctgctgcaatgccaccacctgtaccctgaagccggacgctgtgtgcgcacatgggctgtgctgtgaagactgccagctgaagcctgcaggaacagcgtgcagggactccagcaactcctgtgacctcccagagttctgcacaggggccagccctcactgcccagccaacgtgtacctgcacgatgggcactcatgtcaggatgtggacggctactgctacaatggcatctgccagactcacgagcagcagtgtgtcacgctctggggaccaggtgctaaacctgcccctgggatctgctttgagagagtcaattctgcaggtgatccttatggcaactgtggcaaagtctcgaagagttcctttgccaaatgcgagatgagagatgctaaatgtggaaaaatccagtgtcaaggaggtgccagccggccagtcattggtaccaatgccgtttccatagaaacaaacatccccctgcagcaaggaggccggattctgtgccgggggacccacgtgtacttgggcgatgacatgccggacccagggcttgtgcttgcaggcacaaagtgtgcagatggaaaaatctgcctgaatcgtcaatgtcaaaatattagtgtctttggggttcacgagtgtgcaatgcagtgccacggcagaggggtgtgcaacaacaggaagaactgccactgcgaggcccactgggcacctcccttctgtgacaagtttggctttggaggaagcacagacagcggccccatccggcaagcagataaccaaggtttaaccataggaattctggtgaccatcctgtgtcttcttgctgccggatttgtggtttatctcaaaaggaagaccttgatacgactgctgtttacaaataagaagaccaccattgaaaaactaaggtaccctgggtttagcttgtcatctgttctagaaatggtggctcagaggctgggtgcggtggctcaagcctgtaatcccagcactttgggaggctgaggcgggcggatcacgaggtcaggagatcgagaccacggtgaaaccccgtctctactaaaaatacaaaatatcagccgggcgcggtggtgggtgcctgtagtcccatctactcgggaggctgaggcatgagaatggcgtgaacccgggaggcggagcttgcagtgagttgcgatcactccactgcactccagcctgggcgagagagcaagactccatctcaaaaaaaaaaaaaaaaaaaaaaaaaagaaatggtgtctcagaaaatgtacagcaaactgcttctcacttcatttttttagcaaaggtcagattttctggatcataaacctgggacttggttcttttttggggggtttcttgttttaaatttctgccagatcagctgcctcctttacttcccttcaaacaacaatgtgctgcttattacataagctagcagggtgtcaggaaattccactgatgtgttttctcccacccttatattagtaatttttatacaacatggagacattgaaatattttcatcagatggggtagcttttgatccaaatatattcaaagacattatcgctgaaatgccagcttcatacaaatcatcttccaggtgtcactacactgcatttctatggagcgtgagaactaatttgacaaaatagaggttttgagggaaaaaccagtatttattttttaatctcctaagagtgttattaggtaatttttcctttgcatgtttagcacactgagttaagtaaactgtcttttgagtgccactatgagcaaagtgtaaaaagtcaagtcagtgagaaggggaaacacgcttggtcagcaggtatgggattctgttgcaggtgtgtgcgcccttcccggccaccccgtggcttccaaccctgtcaggctcacctcggccaccttggaaaaggcctgatgaggaagccgccagattcctacccaccgaaggtgagtcttgagtagatgtgagtgctcagggcacacatgcagacatgaggttttcaatacgagactgaataagaatgggatcctagaggcgctgcctgtgaaatgctgagtcagcctcactaggtcagcaggctctgagggagggtctctgtgatctggggccagagggaggccccacggtgcccccatggaagcccacctagatcctgttggcgcactcagtgccccctgcatgatatggtgcagcatagtgtgagctgtgatcccttcagtcacccagaccagccacatttctggggccccactgggtctgcagcccgagctggctcctgacaccagcccccaatgccagccccaccatggtttccaaatgccaccacctggctttaggtgagctgctttagcccactgttactcttaaaatatttttcaaaagttacatggagctctcagaattgaccattttgctccagccctgagctgaggaagccctgtccaccctgtggtttcagagaactggatccttaacccagagtacctcacggctccctgctgtctcttaaccctcttgctaccctggtgaattacagctagagttcattctaatagttcttccccaccgagtttttctgatgtacccacaagaattcttgaatattgaacttagtcaacaagagtccaaattataacagtgaacaagattggtgtcaaaaaaaataagtgattgaaaaatcattgctgcatatgcagtaggcaataaactgttttaactcccttgatccaaaaaacgcaaagggtggggctccaaggaggaggctgccattcccaataagctttacccctgctcgtccccaaaggtggaaccataagcgagaacggctttgtgtggtagccaaaagcacatcttcattttcgtaaaaaagaaaaatgcagctctattaaaaaaaaaaaaaaagcacagccttatttttgagagccccaaactagaaacaatccaaatatccatcaaccagtaaaaggataaacaatggtatatttgcacaatggaatgaaccattgatgtatacaacattgaggatgaatctctagataattattctgagtaaaagaagaaaagccagagtatatactctgtgatcccactt

SEQ ID NO: 734043 - DNA, 1770 bp, Homo sapiens
atccctgcccgatcttctctgaggctccttgctctctgctttgactgagtggctgagtttgccagttccttagcctgcgacacttttcttaactaaggtcatttctatagtgaactgctgaatgggtatgaatgtcatcactgtatcaaagtactttgtaaaggccgacatctgtgtggtagggtgacaaggtgtgaagtttaatgccttttaaaaatcttactggaaagacacccacctcttagtaaaggtgacagtcacggcagcagtgggagtcattgcaacagcttttgcatatggaatgatgtgtgcaggtgctgtgtggtgcattttatgcccatgatgtcatcccctccttatacaactctgaagaaggtggtatgattcttttctcacatacctaggacctgaggctcagggaagttaagtaatttgcctaatgtgatctcgctaagatttacacacacacaggtctgcctgtcccccaagaagctcttagtagcagctgtgcttgaactcgtggccatttctcctcggatgacctttagaaatggtttactggtgcggtgctgttttctctgagttcttattgggcaattcaggggcaagtctaaatgatgcctcttttcgagggaaaagcaaggcaggaagctgcagagtccaacagggagcgcggccagggccaggagcccgtgggatcgcaggagcatgcgtctactgcctcactgacactcatctgagccctcccatgacatggagaccgtgaccagtgctgctgcagaggaggtcacgcgtccccaaggcctcctgtgactggcagcattgactctgtggctttgccatcgtttccatgacaacagacacaacacagttctcggggctcaggaggggaagtccagcctaccaggcacgtctgcagaaacagtgcaaggaagggcagcgacttcctggttgagcttctgctaaaacatggacatgcttcagtgctgctcctgagagagtagcaggttaccactctggcaggccccagccctgcagcaaggaggaagaggactcaaaagtctggcctttcactgagcccccacagcagtgggggagaagcaagggttgggcccagtgtcccctttcccccagtgacacctcagccttggcagccctgatgactggtctctggctgcaacttaatgctctgatatggcttttagcatttattatatgaaaatagcagggttttagtttttaatttatcagagaccctgccacccattccatctccatccaagcaaactgaatggcattgaaacaaactggagaagaaggtaggagaaagggcggtgaactctggctctttgctgtggacatgcgtgaccagcagtactcaggtttgagggtttgcagaaagccagggaacccacagagtcaccaacccttcatttaacaagtaagaatgttaaaaagtgaaaacaatgtaagagcctaactccatcccccgtggccattactgcataaaatagagtgcatttgaaataccgctgcctccaccctgttcatacatatataaaatcaaggcaggccatgagcaagcatggctcactgctccctggcctggccatggctcaggggctcattaaacaagtactcgtgtgtctgccacacaccagccactctcctgggtcctggagagacattaagcaagaatgacatggcataagtgaggggtacgactgcagggagagagggcatcatgggaggggagcaacccccacagag

SEQ ID NO: 734044 - DNA, 3588 bp, Homo sapiens
actgctggccgtggatccatttcacaggcctgccttctctcactaacgctcttcctagtccccgggccaactcggacagtttgctcatttattgcaacggtcaaggctggcttgtgccagaacggcgcgcgcgcgcgcacgcacgcacacacacggggggaaacttttttaaaaatgaaaggctagaagagctcagcggcggcgcgggcgctgcgcgagggctccggagctgactcgccgaggcaggaaatccctccggtcgcgacgcccggccccggctcggcgcccgcgtgggatggtgcagcgctcgccgccgggcccgagagctgctgcactgaaggccggcgacgatggcagcgcgcccgctgcccgtgtcccccgcccgcgccctcctgctcgccctggccggtgctctgctcgcgccctgcgaggcccgaggggtgagcttatggaaccaaggaagagctgatgaagttgtcagtgcctctgttcggagtggggacctctggatcccagtgaagagcttcgactccaagaatcatccagaagtgctgaatattcgactacaacgggaaagcaaagaactgatcataaatctggaaagaaatgaaggtctcattgccagcagtttcacggaaacccactatctgcaagacggtactgatgtctccctcgctcgaaattacacgggtcactgttactaccatggacatgtacggggatattctgattcagcagtcagtctcagcacgtgttctggtctcaggggacttattgtgtttgaaaatgaaagctatgtcttagaaccaatgaaaagtgcaaccaacagatacaaactcttcccagcgaagaagctgaaaagcgtccggggatcatgtggatcacatcacaacacaccaaacctcgctgcaaagaatgtgtttccaccaccctctcagacatgggcaagaaggcataaaagagagaccctcaaggcaactaagtatgtggagctggtgatcgtggcagacaaccgagagtttcagaggcaaggaaaagatctggaaaaagttaagcagcgattaatagagattgctaatcacgttgacaagttttacagaccactgaacattcggatcgtgttggtaggcgtggaagtgtggaatgacatggacaaatgctctgtaagtcaggacccattcaccagcctccatgaatttctggactggaggaagatgaagcttctacctcgcaaatcccatgacaatgcgcagcttgtcagtggggtttatttccaagggaccaccatcggcatggccccaatcatgagcatgtgcacggcagaccagtctgggggaattgtcatggaccattcagacaatccccttggtgcagccgtgaccctggcacatgagctgggccacaatttcgggatgaatcatgacacactggacaggggctgtagctgtcaaatggcggttgagaaaggaggctgcatcatgaacgcttccaccgggtacccatttcccatggtgttcagcagttgcagcaggaaggacttggagaccagcctggagaaaggaatgggggtgtgcctgtttaacctgccggaagtcagggagtctttcgggggccagaagtgtgggaacagatttgtggaagaaggagaggagtgtgactgtggggagccagaggaatgtatgaatcgctgctgcaatgccaccacctgtaccctgaagccggacgctgtgtgcgcacatgggctgtgctgtgaagactgccagctgaagcctgcaggaacagcgtgcagggactccagcaactcctgtgacctcccagagttctgcacaggggccagccctcactgcccagccaacgtgtacctgcacgatgggcactcatgtcaggatgtggacggctactgctacaatggcatctgccagactcacgagcagcagtgtgtcacgctctggggaccaggtgctaaacctgcccctgggatctgctttgagagagtcaattctgcaggtgatccttatggcaactgtggcaaagtctcgaagagttcctttgccaaatgcgagatgagagatgctaaatgtggaaaaatccagtgtcaaggaggtgccagccggccagtcattggtaccaatgccgtttccatagaaacaaacatccccctgcagcaaggaggccggattctgtgccgggggacccacgtgtacttgggcgatgacatgccggacccagggcttgtgcttgcaggcacaaagtgtgcagatggaaaaatctgcctgaatcgtcaatgtcaaaatattagtgtctttggggttcacgagtgtgcaatgcagtgccacggcagaggggtgtgcaacaacaggaagaactgccactgcgaggcccactgggcacctcccttctgtgacaagtttggctttggaggaagcacagacagcggccccatccggcaagcagaagcaaggcaggaagctgcagagtccaacagggagcgcggccagggccaggagcccgtgggatcgcaggagcatgcgtctactgcctcactgacactcatctgagccctcccatgacatggagaccgtgaccagtgctgctgcagaggaggtcacgcgtccccaaggcctcctgtgactggcagcattgactctgtggctttgccatcgtttccatgacaacagacacaacacagttctcggggctcaggaggggaagtccagcctaccaggcacgtctgcagaaacagtgcaaggaagggcagcgacttcctggttgagcttctgctaaaacatggacatgcttcagtgctgctcctgagagagtagcaggttaccactctggcaggccccagccctgcagcaaggaggaagaggactcaaaagtctggcctttcactgagcccccacagcagtgggggagaagcaagggttgggcccagtgtcccctttcccccagtgacacctcagccttggcagccctgatgactggtctctggctgcaacttaatgctctgatatggcttttagcatttattatatgaaaatagcagggttttagtttttaatttatcagagaccctgccacccattccatctccatccaagcaaactgaatggcattgaaacaaactggagaagaaggtaggagaaagggcggtgaactctggctctttgctgtggacatgcgtgaccagcagtactcaggtttgagggtttgcagaaagccagggaacccacagagtcaccaacccttcatttaacaagtaagaatgttaaaaagtgaaaacaatgtaagagcctaactccatcccccgtggccattactgcataaaatagagtgcatttgaaataccgctgcctccaccctgttcatacatatataaaatcaaggcaggccatgagcaagcatggctcactgctccctggcctggccatggctcaggggctcattaaacaagtactcgtgtgtctgccacacaccagccactctcctgggtcctggagagacattaagcaagaatgacatggcataagtgaggggtacgactgcagggagagagggcatcatgggaggggagcaacccccacagag

SEQ ID NO: 734045 - DNA, 3503 bp, Homo sapiens
actgctggccgtggatccatttcacaggcctgccttctctcactaacgctcttcctagtccccgggccaactcggacagtttgctcatttattgcaacggtcaaggctggcttgtgccagaacggcgcgcgcgcgcgcacgcacgcacacacacggggggaaacttttttaaaaatgaaaggctagaagagctcagcggcggcgcgggcgctgcgcgagggctccggagctgactcgccgaggcaggaaatccctccggtcgcgacgcccggccccggctcggcgcccgcgtgggatggtgcagcgctcgccgccgggcccgagagctgctgcactgaaggccggcgacgatggcagcgcgcccgctgcccgtgtcccccgcccgcgccctcctgctcgccctggccggtgctctgctcgcgccctgcgaggcccgaggggtgagcttatggaaccaaggaagagctgatgaagttgtcagtgcctctgttcggagtggggacctctggatcccagtgaagagcttcgactccaagaatcatccagaagtgctgaatattcgactacaacgggaaagcaaagaactgatcataaatctggaaagaaatgaaggtctcattgccagcagtttcacggaaacccactatctgcaagacggtactgatgtctccctcgctcgaaattacacgggtcactgttactaccatggacatgtacggggatattctgattcagcagtcagtctcagcacgtgttctggtctcaggggacttattgtgtttgaaaatgaaagctatgtcttagaaccaatgaaaagtgcaaccaacagatacaaactcttcccagcgaagaagctgaaaagcgtccggggatcatgtggatcacatcacaacacaccaaacctcgctgcaaagaatgtgtttccaccaccctctcagacatgggcaagaaggcataaaagagagaccctcaaggcaactaagtatgtggagctggtgatcgtggcagacaaccgagagtttcagaggcaaggaaaagatctggaaaaagttaagcagcgattaatagagattgctaatcacgttgacaagttttacagaccactgaacattcggatcgtgttggtaggcgtggaagtgtggaatgacatggacaaatgctctgtaagtcaggacccattcaccagcctccatgaatttctggactggaggaagatgaagcttctacctcgcaaatcccatgacaatgcgcagcttgtcaggaccattcagacaatccccttggtgcagccgtgaccctggcacatgagctgggccacaatttcgggatgaatcatgacacactggacaggggctgtagctgtcaaatggcggttgagaaaggaggctgcatcatgaacgcttccaccgggtacccatttcccatggtgttcagcagttgcagcaggaaggacttggagaccagcctggagaaaggaatgggggtgtgcctgtttaacctgccggaagtcagggagtctttcgggggccagaagtgtgggaacagatttgtggaagaaggagaggagtgtgactgtggggagccagaggaatgtatgaatcgctgctgcaatgccaccacctgtaccctgaagccggacgctgtgtgcgcacatgggctgtgctgtgaagactgccagctgaagcctgcaggaacagcgtgcagggactccagcaactcctgtgacctcccagagttctgcacaggggccagccctcactgcccagccaacgtgtacctgcacgatgggcactcatgtcaggatgtggacggctactgctacaatggcatctgccagactcacgagcagcagtgtgtcacgctctggggaccaggtgctaaacctgcccctgggatctgctttgagagagtcaattctgcaggtgatccttatggcaactgtggcaaagtctcgaagagttcctttgccaaatgcgagatgagagatgctaaatgtggaaaaatccagtgtcaaggaggtgccagccggccagtcattggtaccaatgccgtttccatagaaacaaacatccccctgcagcaaggaggccggattctgtgccgggggacccacgtgtacttgggcgatgacatgccggacccagggcttgtgcttgcaggcacaaagtgtgcagatggaaaaatctgcctgaatcgtcaatgtcaaaatattagtgtctttggggttcacgagtgtgcaatgcagtgccacggcagaggggtgtgcaacaacaggaagaactgccactgcgaggcccactgggcacctcccttctgtgacaagtttggctttggaggaagcacagacagcggccccatccggcaagcagaagcaaggcaggaagctgcagagtccaacagggagcgcggccagggccaggagcccgtgggatcgcaggagcatgcgtctactgcctcactgacactcatctgagccctcccatgacatggagaccgtgaccagtgctgctgcagaggaggtcacgcgtccccaaggcctcctgtgactggcagcattgactctgtggctttgccatcgtttccatgacaacagacacaacacagttctcggggctcaggaggggaagtccagcctaccaggcacgtctgcagaaacagtgcaaggaagggcagcgacttcctggttgagcttctgctaaaacatggacatgcttcagtgctgctcctgagagagtagcaggttaccactctggcaggccccagccctgcagcaaggaggaagaggactcaaaagtctggcctttcactgagcccccacagcagtgggggagaagcaagggttgggcccagtgtcccctttcccccagtgacacctcagccttggcagccctgatgactggtctctggctgcaacttaatgctctgatatggcttttagcatttattatatgaaaatagcagggttttagtttttaatttatcagagaccctgccacccattccatctccatccaagcaaactgaatggcattgaaacaaactggagaagaaggtaggagaaagggcggtgaactctggctctttgctgtggacatgcgtgaccagcagtactcaggtttgagggtttgcagaaagccagggaacccacagagtcaccaacccttcatttaacaagtaagaatgttaaaaagtgaaaacaatgtaagagcctaactccatcccccgtggccattactgcataaaatagagtgcatttgaaataccgctgcctccaccctgttcatacatatataaaatcaaggcaggccatgagcaagcatggctcactgctccctggcctggccatggctcaggggctcattaaacaagtactcgtgtgtctgccacacaccagccactctcctgggtcctggagagacattaagcaagaatgacatggcataagtgaggggtacgactgcagggagagagggcatcatgggaggggagcaacccccacagag

SEQ ID NO: 734046 - DNA, 4704 bp, Homo sapiens
actgctggccgtggatccatttcacaggcctgccttctctcactaacgctcttcctagtccccgggccaactcggacagtttgctcatttattgcaacggtcaaggctggcttgtgccagaacggcgcgcgcgcgcgcacgcacgcacacacacggggggaaacttttttaaaaatgaaaggctagaagagctcagcggcggcgcgggcgctgcgcgagggctccggagctgactcgccgaggcaggaaatccctccggtcgcgacgcccggccccggctcggcgcccgcgtgggatggtgcagcgctcgccgccgggcccgagagctgctgcactgaaggccggcgacgatggcagcgcgcccgctgcccgtgtcccccgcccgcgccctcctgctcgccctggccggtgctctgctcgcgccctgcgaggcccgaggggtgagcttatggaaccaaggaagagctgatgaagttgtcagtgcctctgttcggagtggggacctctggatcccagtgaagagcttcgactccaagaatcatccagaagtgctgaatattcgactacaacgggaaagcaaagaactgatcataaatctggaaagaaatgaaggtctcattgccagcagtttcacggaaacccactatctgcaagacggtactgatgtctccctcgctcgaaattacacgggtcactgttactaccatggacatgtacggggatattctgattcagcagtcagtctcagcacgtgttctggtctcaggggacttattgtgtttgaaaatgaaagctatgtcttagaaccaatgaaaagtgcaaccaacagatacaaactcttcccagcgaagaagctgaaaagcgtccggggatcatgtggatcacatcacaacacaccaaacctcgctgcaaagaatgtgtttccaccaccctctcagacatgggcaagaaggcataaaagagagaccctcaaggcaactaagtatgtggagctggtgatcgtggcagacaaccgagagtttcagaggcaaggaaaagatctggaaaaagttaagcagcgattaatagagattgctaatcacgttgacaagttttacagaccactgaacattcggatcgtgttggtaggcgtggaagtgtggaatgacatggacaaatgctctgtaagtcaggacccattcaccagcctccatgaatttctggactggaggaagatgaagcttctacctcgcaaatcccatgacaatgcgcagcttgtcaggaccattcagacaatccccttggtgcagccgtgaccctggcacatgagctgggccacaatttcgggatgaatcatgacacactggacaggggctgtagctgtcaaatggcggttgagaaaggaggctgcatcatgaacgcttccaccgggtacccatttcccatggtgttcagcagttgcagcaggaaggacttggagaccagcctggagaaaggaatgggggtgtgcctgtttaacctgccggaagtcagggagtctttcgggggccagaagtgtgggaacagatttgtggaagaaggagaggagtgtgactgtggggagccagaggaatgtatgaatcgctgctgcaatgccaccacctgtaccctgaagccggacgctgtgtgcgcacatgggctgtgctgtgaagactgccagctgaagcctgcaggaacagcgtgcagggactccagcaactcctgtgacctcccagagttctgcacaggggccagccctcactgcccagccaacgtgtacctgcacgatgggcactcatgtcaggatgtggacggctactgctacaatggcatctgccagactcacgagcagcagtgtgtcacgctctggggaccaggtgctaaacctgcccctgggatctgctttgagagagtcaattctgcaggtgatccttatggcaactgtggcaaagtctcgaagagttcctttgccaaatgcgagatgagagatgctaaatgtggaaaaatccagtgtcaaggaggtgccagccggccagtcattggtaccaatgccgtttccatagaaacaaacatccccctgcagcaaggaggccggattctgtgccgggggacccacgtgtacttgggcgatgacatgccggacccagggcttgtgcttgcaggcacaaagtgtgcagatggaaaaatctgcctgaatcgtcaatgtcaaaatattagtgtctttggggttcacgagtgtgcaatgcagtgccacggcagaggggtgtgcaacaacaggaagaactgccactgcgaggcccactgggcacctcccttctgtgacaagtttggctttggaggaagcacagacagcggccccatccggcaagcagataaccaaggtttaaccataggaattctggtgaccatcctgtgtcttcttgctgccggatttgtggtttatctcaaaaggaagaccttgatacgactgctgtttacaaataagaagaccaccattgaaaaactaaggtaccctgggtttagcttgtcatctgttctagaaatggtggctcagaggctgggtgcggtggctcaagcctgtaatcccagcactttgggaggctgaggcgggcggatcacgaggtcaggagatcgagaccacggtgaaaccccgtctctactaaaaatacaaaatatcagccgggcgcggtggtgggtgcctgtagtcccatctactcgggaggctgaggcatgagaatggcgtgaacccgggaggcggagcttgcagtgagttgcgatcactccactgcactccagcctgggcgagagagcaagactccatctcaaaaaaaaaaaaaaaaaaaaaaaaaagaaatggtgtctcagaaaatgtacagcaaactgcttctcacttcatttttttagcaaaggtcagattttctggatcataaacctgggacttggttcttttttggggggtttcttgttttaaatttctgccagatcagctgcctcctttacttcccttcaaacaacaatgtgctgcttattacataagctagcagggtgtcaggaaattccactgatgtgttttctcccacccttatattagtaatttttatacaacatggagacattgaaatattttcatcagatggggtagcttttgatccaaatatattcaaagacattatcgctgaaatgccagcttcatacaaatcatcttccaggtgtcactacactgcatttctatggagcgtgagaactaatttgacaaaatagaggttttgagggaaaaaccagtatttattttttaatctcctaagagtgttattaggtaatttttcctttgcatgtttagcacactgagttaagtaaactgtcttttgagtgccactatgagcaaagtgtaaaaagtcaagtcagtgagaaggggaaacacgcttggtcagcaggtatgggattctgttgcaggtgtgtgcgcccttcccggccaccccgtggcttccaaccctgtcaggctcacctcggccaccttggaaaaggcctgatgaggaagccgccagattcctacccaccgaaggtgagtcttgagtagatgtgagtgctcagggcacacatgcagacatgaggttttcaatacgagactgaataagaatgggatcctagaggcgctgcctgtgaaatgctgagtcagcctcactaggtcagcaggctctgagggagggtctctgtgatctggggccagagggaggccccacggtgcccccatggaagcccacctagatcctgttggcgcactcagtgccccctgcatgatatggtgcagcatagtgtgagctgtgatcccttcagtcacccagaccagccacatttctggggccccactgggtctgcagcccgagctggctcctgacaccagcccccaatgccagccccaccatggtttccaaatgccaccacctggctttaggtgagctgctttagcccactgttactcttaaaatatttttcaaaagttacatggagctctcagaattgaccattttgctccagccctgagctgaggaagccctgtccaccctgtggtttcagagaactggatccttaacccagagtacctcacggctccctgctgtctcttaaccctcttgctaccctggtgaattacagctagagttcattctaatagttcttccccaccgagtttttctgatgtacccacaagaattcttgaatattgaacttagtcaacaagagtccaaattataacagtgaacaagattggtgtcaaaaaaaataagtgattgaaaaatcattgctgcatatgcagtaggcaataaactgttttaactcccttgatccaaaaaacgcaaagggtggggctccaaggaggaggctgccattcccaataagctttacccctgctcgtccccaaaggtggaaccataagcgagaacggctttgtgtggtagccaaaagcacatcttcattttcgtaaaaaagaaaaatgcagctctattaaaaaaaaaaaaaaagcacagccttatttttgagagccccaaactagaaacaatccaaatatccatcaaccagtaaaaggataaacaatggtatatttgcacaatggaatgaaccattgatgtatacaacattgaggatgaatctctagataattattctgagtaaaagaagaaaagccagagtatatactctgtgatcccactt

SEQ ID NO: 734047 - DNA, 267 bp, Homo sapiens; identical to SEQ ID NO: 318544

SEQ ID NO: 734048 - DNA, 889 bp, Homo sapiens
ggcttcaatccagcactttgctcgggtcacggcctcctcctggctcccaggaccccaccataggcagaggcaggccttcctacaccctactccctgtgcctccaggctcgactagtccctagcactcgacgactgagtctctgagatcacttcaccgtggtctccgcctcacccttggcgctggaccagtgagaggagagggctggggcgctccgctgagccactcctgcgcccccctggccttgtctacctcttgccccccgaaggtttaggtgtcgagctcaccccagcatcctacaacctcctggtggccttgccgcccccacaaccccgaggtataaagccaggtacacgaggcaggggacgcaccaaggatggagatgttccaggggctgctgctgttgctgctgctgagcatgggcgggacatgggcatccaaggagccgcttcggccacggtgccgccccatcaatgccaccctggctgtggagaaggagggctgccccgtgtgcatcaccgtcaacaccaccatctgtgccggctactgccccaccatgacccgcgtgctgcagggggtcctgccggccctgcctcaggtggtgtgcaactaccgcgatgtgcgcttcgagtccatccggctccctggctgcccgcgcggcgtgaaccccgtggtctcctacgccgtggctctcagctgtcaatgtgcactctgccgccgcagcaccactgactgcgggggtcccaaggaccaccccttgacctgtgatgacccccgcttccaggactcctcttcctcaaaggcccctccccccagccttccaagtccatcccgactcccggggccctcggacaccccgatcctcccacaataaaggcttctcaatccgca

SEQ ID NO: 734049 - DNA, 538 bp, Homo sapiens; identical to SEQ ID NO: 440716

SEQ ID NO: 734050 - DNA, 951 bp, Homo sapiens
  misc_feature (844)..(844): n is a, c, g, or t
  misc_feature (852)..(852): n is a, c, g, or t
  misc_feature (856)..(856): n is a, c, g, or t
  misc_feature (863)..(863): n is a, c, g, or t
  misc_feature (866)..(866): n is a, c, g, or t
  misc_feature (872)..(872): n is a, c, g, or t
ggcttcaatccagcactttgctcgggtcacggcctcctcctggctcccaggaccccaccataggcagaggcaggccttcctacaccctactccctgtgcctccaggctcgactagtccctagcactcgacgactgagtctctgagatcacttcaccgtggtctccgcctcacccttggcgctggaccagtgagaggagagggctggggcgctccgctgagccactcctgcgcccccctggccttgtctacctcttgccccccgaaggtttaggtgtcgagctcaccccagcatcctacaacctcctggtggccttgccgcccccacaaccccgaggtataaagccaggtacacgaggcaggggacgcaccaaggatggagatgttccaggggctgctgctgttgctgctgctgagcatgggcgggacatgggcatccaaggagccgcttcggccacggtgccgccccatcaatgccaccctggctgtggagaaggagggctgccccgtgtgcatcaccgtcaacaccaccatctgtgccggctactgccccaccatgacccgcgtgctgcagggggtcctgccggccctgcctcaggtggtgtgcaactaccgcgatgtgcgcttcgagtccatccggctccctggctgcccgcgcggcgtgaaccccgtggtctcctacgccgtggctctcagctgtcaatgtgcactctgccgccgcagcaccactgactgcgggggtcccaaggaccaccccttgacctgtgatgacccccgcttccaggactcctcttcctcaaaggcccctccccccagccttccaagtccatcccgactcccgggctngaaccganctcnaataagnttncatcgnaaaaaaaaaaccgaggaataatcgtgcgacaaggaaaaaggaagggaataaatcacacaactttgaaagggaagcgacc

SEQ ID NO: 734051 - DNA, 491 bp, Homo sapiens
  misc_feature (408)..(409): n is a, c, g, or t
  misc_feature (429)..(429): n is a, c, g, or t
  misc_feature (470)..(470): n is a, c, g, or t
  misc_feature (482)..(482): n is a, c, g, or t
gggagaggagggggaggggaggggagaggaattgaggagcagaacagaataacacagaaagaaccaaccagagctggaccaaaaatcgaggccaggatgttgtagagtcttgggttcaaattctgcctcctcctgggaagtcccctgagcctgctacaaggtcttggcttgcaccctattgcctctggcagatcctccaaccagcaccaatgaagcacctaccccatgcagggtccttcagaaacaaagagtgagatagcttccagtctcaggtggggaatatttagacttgtgaacaggggcaaagaaggagaggatgttcctgttccttccccaccaccaagaccttatttcccgcatttcggacctgaggccacgggttttgcccagggtttaaggggccacggnnaaggaaggttggccgaacgnggtttgaacccaacgccttgggcccaacgttggggacgacntggccccaacgngttgttccg

SEQ ID NO: 734052 - DNA, 1759 bp, Homo sapiens
gggagaggagggggaggggaggggagaggaattgaggagcagaacagaataacacagaaagaaccaaccagagctggaccaaaaatcgaggccaggatgttgtagagtcttgggttcaaattctgcctcctcctgggaagtcccctgagcctgctacaaggtcttggcttgcaccctattgcctctggcagatcctccaaccagcaccaatgaagcacctaccccatgcagggtccttcagaaacaaagagtgagatagcttccagtctcaggtggggaatatttagacttgtgaacaggggcaaagaaggagagaaacaaccaggaagtaacctccaatttgcagatggggaaaattaagtttcatcaggaggaaatgactttgcctcaggcttctcttgggatcccagatttctagaggatggggggaatgtccctgctttgggcatgtttttaagagcactggaacagccagagctgctgcccacagtctgaagtcaggaggggaactccatgtcagataaaagctttggaatccagatggagtaaggtttcattttctctgcctgcatttggtttcctaacatcacaatgtgagccttggctagcagccagcttagctttggaaaagagtgaatgatggggaaaaaaaaaaaaaaagactgtgccaggaagggaggggaggagaggggctacactaggctggaggggatatgggcctggctttagaggattatgctaggaaaaggggtgccagaggttgaaagctgataggaacaagccctgtggatcaagaggcccatcagtgagcctgcagggtctatgaactccttacatgcaaaattacatgtgtctgtctgtgtaggtctctacagattggtggaagtgttcacagctttcatgagattattatttttttttttttaagaaaggcacactgccgcatgcaacacctcatttggatgtgtctggagtcttggaagtttgactaccctacattctcctacaaatggaccttgagagcttgtttggaggttctagcaggggagcgcactacttcgtatacccttgaccaaagaacagtcctcctctattggggaaggttgtcctcttctgaaactaccttttgcaaaaattatagcagtgagaaaattatgacagtgaaagaaatctgacctaattgactccatcttgcttctaacctcccagctgcccttgttcattcctgggcatagggagcactaactttgggaggatttagtttatagtttaactttgaaacaaagatgataacagcccctccctgagaccaacccactccttgcctggggaccagaaagcctttgtaaaactaacacattggccacaagattagaaatgacggctcaggagtcatgcagccaaaggcctcgagatcatgaacctccccaattgctcctgtagataatattattattgtaaaacctaacatgggtgtttgaggtatttttcagaccctgccttctgatggatcagctggcaccacccagaccagtaaactggctcatctggtcttctggcccccacccaggaaccaactcagtgcaagaggatagcttcaactccttatgatttcatccccgacccaaccaatcagcattcccgcttcccgagccccctgcccgccaaactacctttaaaaaaccctagcctccaaattttcagggaggctgatttgagtaataataaaacccctgtctcctgtttaaaaaactctact

SEQ ID NO: 734053 - DNA, 929 bp, Homo sapiens; identical to SEQ ID NO: 429072

SEQ ID NO: 734054 - DNA, 582 bp, Homo sapiens
tctcctcctctgtgcgacatcctcctcctccttctttgcctcaggcttctcttgggatcccagatttctagaggatggggggaatgtccctgctttgggcatgtttttaagagcactggaacagccagagctgctgcccacagtctgaagtcaggaggggaactccatgtcagataaaagctttggaatccagatggagtaaggtttcattttctctgcctgcatttggtttcctaacatcacaatgtgagccttggctagcagccagcttagctttggaaaagagtgaatgatggggaaaaaaaaaaaaaaagactgtgccaggaagggaggggaggagaggggctacactaggctggaggggatatgggcctggcttttgggggtttttcctacagggcctgggttggcccctttttgcctttggcggttcctccacccggccccattgaggcccttcccccttgcggggtccttcagaaacaaagagggagatggcttccggtctcagggggggattttttagccttgggaccgggggcaaggagggggggaaccacccgggaggtaccctccatttgg

SEQ ID NO: 734055 - DNA, 1412 bp, Homo sapiens
tctcctcctctgtgcgacatcctcctcctccttctttgcctcaggcttctcttgggatcccagatttctagaggatggggggaatgtccctgctttgggcatgtttttaagagcactggaacagccagagctgctgcccacagtctgaagtcaggaggggaactccatgtcagataaaagctttggaatccagatggagtaaggtttcattttctctgcctgcatttggtttcctaacatcacaatgtgagccttggctagcagccagcttagctttggaaaagagtgaatgatggggaaaaaaaaaaaaaaagactgtgccaggaagggaggggaggagaggggctacactaggctggaggggatatgggcctggctttagaggattatgctaggaaaaggggtgccagaggttgaaagctgataggaacaagccctgtggatcaagaggcccatcagtgagcctgcagggtctatgaactccttacatgcaaaattacatgtgtctgtctgtgtaggtctctacagattggtggaagtgttcacagctttcatgagattattatttttttttttttaagaaaggcacactgccgcatgcaacacctcatttggatgtgtctggagtcttggaagtttgactaccctacattctcctacaaatggaccttgagagcttgtttggaggttctagcaggggagcgcactacttcgtatacccttgaccaaagaacagtcctcctctattggggaaggttgtcctcttctgaaactaccttttgcaaaaattatagcagtgagaaaattatgacagtgaaagaaatctgacctaattgactccatcttgcttctaacctcccagctgcccttgttcattcctgggcatagggagcactaactttgggaggatttagtttatagtttaactttgaaacaaagatgataacagcccctccctgagaccaacccactccttgcctggggaccagaaagcctttgtaaaactaacacattggccacaagattagaaatgacggctcaggagtcatgcagccaaaggcctcgagatcatgaacctccccaattgctcctgtagataatattattattgtaaaacctaacatgggtgtttgaggtatttttcagaccctgccttctgatggatcagctggcaccacccagaccagtaaactggctcatctggtcttctggcccccacccaggaaccaactcagtgcaagaggatagcttcaactccttatgatttcatccccgacccaaccaatcagcattcccgcttcccgagccccctgcccgccaaactacctttaaaaaaccctagcctccaaattttcagggaggctgatttgagtaataataaaacccctgtctcctgtttaaaaaactctact

SEQ ID NO: 734056 - DNA, 513 bp, Homo sapiens; identical to SEQ ID NO: 429073

SEQ ID NO: 734057 - DNA, 908 bp, Homo sapiens
  misc_feature (888)..(888): n is a, c, g, or t
  misc_feature (892)..(892): n is a, c, g, or t
  misc_feature (897)..(897): n is a, c, g, or t
aatcagtcccattgcacgggaacacggggttttgaaacaaacagcagcctgtttttatttaaagtcgtgatcccttgcttatcgtagatttttttcataatttgattttggaaaatattgcacacaaatactactcgatccctgagtttgtgggcacttccttacattttgcacccatgaaaatgcctcctccgcctccaggtcaggctccctggaatggggtgtttagtgtcatttccagagacaagctggcagttggctcttgtgtcagagagaagcccacagtcacagtgacaccagcccgcactgtggaagggcttgctatgtgcagtgccctgagccaagtgttccacagacattatctcatttgaaccccatagcagccctggaaggaggcattgggtggggaaccaagttgtcctggggagtcagtgccaagatgtgagccccggacgcggcctcgtcactcacagccccgtgctcctcagctcccacccactgccgcttgacagtcgttttaatcactacctgggctgtggcgaacaatgccaggctctgatagatcctgctgtctcatttctcaacctagtttcccttaactaatatttcatggctatcgttaatgtgcgtttttcatcgagtaatttccacagcccgaacttgtaacacatcccaatgacaaacgtccccagttcggaagcccccgtcagtggcaatgtcacccttgctgctgcctcgacaccttccgacagcccattcagttttatgatcgccctgtcccagtgatcactactgaacctttaagaatccagatgcatttcaagtttaattgaataaaattctttgtataataaaaacccccttggccaaccccccaaaaaaagggcncccngcttntagaggagcga

SEQ ID NO: 734058 - DNA, 1439 bp, Homo sapiens; identical to SEQ ID NO: 17112

SEQ ID NO: 734059 - DNA, 1529 bp, Homo sapiens; identical to SEQ ID NO: 17114

SEQ ID NO: 734060 - DNA, 1942 bp, Homo sapiens; identical to SEQ ID NO: 17113

SEQ ID NO: 734061 - DNA, 1852 bp, Homo sapiens
gcagcccgaagcagccagaccagcccctgagcctcccgggtgctggcagctgtcatggggctaccctgggggcagcctcacctagggctgcagatgctcctcctggcgttgaactgtctccggcccagcctgagcctgggtgagtgggggtcctggatggacgcgtccagccagacccaaggggctgggggccctgctggagtgattggaccctgggcgcccgcccccctccgattgggagaggcagccccagggacccccacgcccgtctccgtggctcaccttttgtcccccgtggccacagagctggtgccctacacaccacagataacagcttgggacctggaagggaaggtcacagccaccaccttctccctggagcagccgcgctgtgtcttcgatgggcttgccagcgccagcgataccgtctggctcgtggtggccttcagcaatgcctccaggggcttccagaacccggagacactggctgacattccggcctccccacagctgctgaccgatggccactacatgacgctgcccctgtctccggaccagctgccctgtggcgaccccatggcgggcagcggaggcgcccccgtgctgcgggtgggccatgaccacggctgccaccagcagcccttctgcaacgcgcccctccctggccctggaccctatcgggaagacccccggatccatcgacacctggccagggcggcgaagtggcagcatgatcgtcattacctccatcctctcttctctggccggcctcctactcttggccttcttggcagcctctaccatgcgcttctccagcctgtggtggccggaggaggccccggagcagctgcggatcggctccttcatgggcaagcgctacatgacccaccacatcccacccagcgaggccgccacactgccggtgggctgcaagcctggcctggaccccctccccagcctcagcccctagcctggcctctttgcatggggctgggggagatggggcgccgggagtgagtgcatggtgctttgtcccagctcctgcacccacaggccccctcagggctccttgcctttcccccccaccagcacaccccgtaccctgcctggaatcccagcaccagcccccctgcctctcctctgcctttctggtttctctccctctccaagcatctgtaagttgcactcaggagggtttaggggagggccatgggcaggctggatacccagtccccacctccatccccacctctgtctcacctgacctcctgcgagggaggctggagactgtgtggacaggccgccctgaccgcaagcttccagaccctgggaggaggcctgcagaggactgtgctttgcctgatgcagggagctgggcccatcctggggcctatgagacctgagccaccctccgtcccccatcccacacatcagtggctgggcggggtgaggattcagaggcatctctactgcccctgggcacagcacctttctgagagtgggactctccatggtcatctgactaccaattctggccaccacctccaaccctcttgtgcatatggatggctctagcccttatccaccccctcaagcatttattaagcatctgctgtatgctacatacagtgttagacttggggcttcaggcatagccggtcctgaccttggggagatgccttctctagacctgagacgaccacgtgtccagatgtgacctgttgctgtcgggggtctatcaggcccttagaccgtcaccccagtaggctctccaggacccaggagcctccatcacctggaaggaccctctgtgcaaaacctcaagcgtccatctgtgcacaaggccggtggt

SEQ ID NO: 734062 - DNA, 2464 bp, Homo sapiens
tcgcccacgcgtccgacttgttgcagttgctgtaggattctaaatccaggtgattgtttcaaactgagcatcaacaacaaaaacatttgtatgatatctatatttcaatcatggaccaaaatcaacatttgaataaaacagcagaggcacaaccttcagagaataagaaaacaagatactgcaatggattgaagatgttcttggcagctctgtcactcagctttattgctaagacactaggtgcaattattatgaaaagttccatcattcatatagaacggagatttgagatatcctcttctcttgttggttttattgacggaagctttgaaattggaaatttgcttgtgattgtatttgtgagttactttggatccaaactacatagaccaaagttaattggaatcggttgtttcattatgggaattggaggtgttttgactgctttgccacatttcttcatgggatattacaggtattctaaagaaactaatatcaattcatcagaaaattcaacatcgaccttatccacttgtttaattaatcaaattttatcactcaatagagcatcacctgagatagtgggaaaaggttgtttaaaggaatctgggtcatacatgtggatatatgtgttcatgggtaatatgcttcgtggaataggggagactcccatagtaccactggggctttcttacattgatgatttcgctaaagaaggacattcttctttgtatttaggtatattgaatgcaatagcaatgattggtccaatcattggctttaccctgggatctctgttttctaaaatgtacgtggatattggatatgtagatctaagcactatcaggataactcctactgattctcgatgggttggagcttggtggcttaatttccttgtgtctggactattctccattatttcttccataccattctttttcttgccccaaactccaaataaaccacaaaaagaaagaaaagcttcactgtctttgcatgtgctggaaacaaatgatgaaaaggatcaaacagctaatttgaccaatcaaggaaaaaatattaccaaaaatgtgactggttttttccagtcttttaaaagcatccttactaatcccctgtatgttatgtttgtgcttttgacgttgttacaagtaagcagctatattggtgcttttacttatgtcttcaaatacgtagagcaacagtatggtcagccttcatctaaggctaacatcttattgggagtcataaccatacctatttttgcaagtggaatgtttttaggaggatatatcattaaaaaattcaaactgaacaccgttggaattgccaaattctcatgttttactgctgtgatgtcattgtccttttacctattatattttttcatactctgtgaaaacaaatcagttgccggactaaccatgacctatgatggaaataatccagtgacatctcatagagatgtaccactttcttattgcaactcagactgcaattgtgatgaaagtcaatgggaaccagtctgtggaaacaatggaataacttacatctcaccctgtctagcaggttgcaaatcttcaagtggcaataaaaagcctatagtgttttacaactgcagttgtttggaagtaactggtctccagaacagaaattactcagcccatttgggtgaatgcccaagagatgatgcttgtacaaggaaattttacttttttgttgcaatacaagtcttgaatttatttttctctgcacttggaggcacctcacatgtcatgctgattgttaaaattgttcaacctgaattgaaatcacttgcactgggtttccactcaatggttatacgagcactaggaggaattctagctccaatatattttggggctctgattgatacaacgtgtataaagtggtccaccaacaactgtggcacacgtgggtcatgtaggacatataattccacatcattttcaagggtctacttgggcttgtcttcaatgttaagagtctcatcacttgttttatatattatattaatttatgccatgaagaaaaaatatcaagagaaagatatcaatgcatcagaaaatggaagtgtcatggatgaagcaaacttagaatccttaaataaaaataaacattttgtcccttctgctggggcagatagtgaaacacattgttaaggggagaaaaaaagccacttctgcttctgtgtttccaaacagcattgcattgattcagtaagatgttatttttgaggagttcctggtcctttcactaagaatttccacatcttttatggtggaagtataaataagcctatgaacttataataaaacaaactgtaggtagaaaaaatgagagtactcattgttacattatagctacatatttgtggttaaggttagactatatgatccatacaaattaaagtgagagacatggttactgtgtaataaaa

SEQ ID NO: 734063 - DNA, 2794 bp, Homo sapiens; identical to SEQ ID NO: 16359
  misc_feature (2794)..(2794): n is a, c, g, or t

SEQ ID NO: 734064 - DNA, 2186 bp, Homo sapiens
tcgcccacgcgtccgacttgttgcagttgctgtaggattctaaatccaggtgattgtttcaaactgagcatcaacaacaaaaacatttgtatgatatctatatttcaatcatggaccaaaatcaacatttgaataaaacagcagaggcacaaccttcagagaataagaaaacaagatactgcaatggattgaagatgttcttggcagctctgtcactcagctttattgctaagacactaggtgcaattattatgaaaagttccatcattcatatagaacggagatttgagatatcctcttctcttgttggttttattgacggaagctttgaaattggaaatttgcttgtgattgtatttgtgagttactttggatccaaactacatagaccaaagttaattggaatcggttgtttcattatgggaattggaggtgttttgactgctttgccacatttcttcatgggatattacaggtattctaaagaaactaatatcaattcatcagaaaattcaacatcgaccttatccacttgtttaattaatcaaattttatcactcaatagagcatcacctgagatagtgggaaaaggttgtttaaaggaatctgggtcatacatgtggatatatgtgttcatgggtaatatgcttcgtggaataggggagactcccatagtaccactggggctttcttacattgatgatttcgctaaagaaggacattcttctttgtatttaggtatattgaatgcaatagcaatgattggtccaatcattggctttaccctgggatctctgttttctaaaatgtacgtggatattggatatgtagatctaagcactatcaggataactcctactgattctcgatgggttggagcttggtggcttaatttccttgtgtctggactattctccattatttcttccataccattctttttcttgccccaaactccaaataaaccacaaaaagaaagaaaagcttcactgtctttgcatgtgctggaaacaaatgatgaaaaggatcaaacagctaatttgaccaatcaaggaaaaaatattaccaaaaatgtgactggttttttccagtcttttaaaagcatccttactaatcccctgtatgttatgtttgtgcttttgacgttgttacaagtaagcagctatattggtgcttttacttatgtcttcaaatacgtagagcaacagtatggtcagccttcatctaaggctaacatcttattgggagtcataaccatacctatttttgcaagtggaatgtttttaggaggatatatcattaaaaaattcaaactgaacaccgttggaattgccaaattctcatgttttactgctgtgatgtcattgtccttttacctattatattttttcatactctgtgaaaacaaatcagttgccggactaaccatgacctatgatggaaataatccagtgacatctcatagagatgtaccactttcttattgcaactcagactgcaattgtgatgaaagtcaatgggaaccagtctgtggaaacaatggaataacttacatctcaccctgtctagcaggttgcaaatcttcaagtggcaataaaaagcctatagtgttttacaactgcagttgtttggaagtaactggtctccagaacagaaattactcagcccatttgggtgaatgcccaagagatgatgcttgtacaaggaaattttacttttttgttgcaatacaagtcttgaatttatttttctctgcacttggaggcacctcacatgtcatgctgattgttaaaattgttcaacctgaattgaaatcacttgcactgggtttccactcaatggttatacgagcactaggaggaattctagctccaatatattttggggctctgattgatacaacgtgtataaagtggtccaccaacaactgtggcacacgtgggtcatgtaggacatataattccacatcattttcaagggtctacttgggcttgtcttcaatgttaagagtctcatcacttgttttatatattatattaatttatgccatgaagaaaaaatatcaagagaaagatatcaatgcatcagaaaatggaagtgtcatggatgaagcaaacttagaatccttaaataaaaataaacattttgtcccttctgctggggcagatagtgaaacacattgttaa

SEQ ID NO: 734065 - DNA, 435 bp, Homo sapiens
aagggtctacttgggcttgtcttcaatgttaagagtctcatcacttgttttatatattatattaatttatgccatgaagaaaaaatatcaagagaaagatatcaatgcatcagaaaatggaagtgtcatggatgaagcaaacttagaatccttaaataaaaataaacattttgtcccttctgctggggcagatagtgaaacacattgttaaggggagaaaaaaagccacttctgcttctgtgtttccaaacagcattgcattgattcagtaagatgttatttttgaggagttcctggtcctttcactaagaatttccacatcttttatggtggaagtataaataagcctatgaacttataataaaacaaactgtaggtagaaactatatgatccatacaaattaaagtgagagacatggttactgtgtaataaaa

SEQ ID NO: 734066 - DNA, 813 bp, Homo sapiens; identical to SEQ ID NO: 16361

SEQ ID NO: 734067 - DNA, 2166 bp, Homo sapiens
aaactaaatattgctgcttggggacctccttctagccttaaatttcagctcatcaccttcacctgccttggtcatggctctgctattctccttgatccttgccatttgcaccagacctggattcctagcgtctccatctggagtgcggctggtggggggcctccaccgctgtgaagggcgggtggaggtggaacagaaaggccagtggggcaccgtgtgtgatgacggctgggacattaaggacgtggctgtgttgtgccgggagctgggctgtggagctgccagcggaacccctagtggtattttgtatgagccaccagcagaaaaagagcaaaaggtcctcatccaatcagtcagttgcacaggaacagaagatacattggctcagtgtgagcaagaagaagtttatgattgttcacatgatgaagatgctggggcatcgtgtgagaacccagagagctctttctccccagtcccagagggtgtcaggctggctgacggccctgggcattgcaagggacgcgtggaagtgaagcaccagaaccagtggtataccgtgtgccagacaggctggagcctccgggccgcaaaggtggtgtgccggcagctgggatgtgggagggctgtactgactcaaaaacgctgcaacaagcatgcctatggccgaaaacccatctggctgagccagatgtcatgctcaggacgagaagcaacccttcaggattgcccttctgggccttgggggaagaacacctgcaaccatgatgaagacacgtgggtcgaatgtgaagatccctttgacttgagactagtaggaggagacaacctctgctctgggcgactggaggtgctgcacaagggcgtatggggctctgtctgtgatgacaactggggagaaaaggaggaccaggtggtatgcaagcaactgggctgtgggaagtccctctctccctccttcagagaccggaaatgctatggccctggggttggccgcatctggctggataatgttcgttgctcaggggaggagcagtccctggagcagtgccagcacagattttgggggtttcacgactgcacccaccaggaagatgtggctgtcatctgctcaggatagtatcctggtgttgcttgacctggcccccctggccccgcctgccctctgcttgttctcctgagccctgattatcctcatactcattctggggctcaggcttgagccactactccctcatcccctcaggagtctgaacactgggcttatgccttactctcagggacaagcagcccccattgctgcctgtagatgtgagctgttgagttccctcttgctggggaagatgagcttccatgtatcctgtgctcaaccctgaccctttgacactggttctggcctttcctgccttttctcaagctgcctggaatcctcaaacctgtcactttggtcagatgtgcagaccattactaaggtctatgtctgcaaacattactaatctaggtcctattactaatctatgtctgcaaacattaaaggaatgaaacaatgaaaggaacatttgaaagaaaatgtgggtagacaatttcttgcaacttgggggaaagtttagaattcttttgattggactactttttttttttttcctcaagcttcaggtgaccacaatagcaacacctccctattctgttatttcttagtgtaggtagacaattctttcaggagcagagcagcgtcctataatcctagaccttttcatgacgtgtaaaaaatgatgtttcatcctctgattgccccaataaaaatctttgttgtccatccctatacaacctgccaacatggttgacatttaatgagaggaatgtcaaaaatacattttactttattcaaagaaaaatatattggttactgggaaaaggtcaagaaagaggcagaaagagatcagggagggctaaagttgtgtcttatgccaagcggaagtggaaaatatcacttttcactttatcaactgagactttggggcctgtaagcttgaggcaagacagaaataagagaatcaagacttgattgtaaaaattgacaactttagattctgaggctaggctgagtacttattatacggctacatttacacatttacacttatctaataaatcagatttcacagtctc

SEQ ID NO: 734068 - DNA, 1828 bp, Homo sapiens
aaactaaatattgctgcttggggacctccttctagccttaaatttcagctcatcaccttcacctgccttggtcatggctctgctattctccttgatccttgccatttgcaccagacctggattcctagcgtctccatctggagtgcggctggtggggggcctccaccgctgtgaagggcgggtggaggtggaacagaaaggccagtggggcaccgtgtgtgatgacggctgggacattaaggacgtggctgtgttgtgccgggagctgggctgtggagctgccagcggaacccctagtggtattttgtatgagccaccagcagaaaaagagcaaaaggtcctcatccaatcagtcagttgcacaggaacagaagatacattggctcagtgtgagcaagaagaagtttatgattgttcacatgatgaagatgctggggcatcgtgtgagaacccagagagctctttctccccagtcccagagggtgtcaggctggctgacggccctgggcattgcaagggacgcgtggaagtgaagcaccagaaccagtggtataccgtgtgccagacaggctggagcctccgggccgcaaaggtggtgtgccggcagctgggatgtgggagggctgtactgactcaaaaacgctgcaacaagcatgcctatggccgaaaacccatctggctgagccagatgtcatgctcaggacgagaagcaacccttcaggattgcccttctgggccttgggggaagaacacctgcaaccatgatgaagacacgtgggtcgaatgtgaagatccctttgacttgagactagtaggaggagacaacctctgctctgggcgactggaggtgctgcacaagggcgtatggggctctgtctgtgatgacaactggggagaaaaggaggaccaggtggtatgcaagcaactgggctgtgggaagtccctctctccctccttcagagaccggaaatgctatggccctggggttggccgcatctggctggataatgttcgttgctcaggggaggagcagtccctggagcagtgccagcacagattttgggggtttcacgactgcacccaccaggaagatgtggctgtcatctgctcaggatagtatcctggtgttgcttgacctggcccccctggccccgcctgccctctgcttgttctcctgagccctgattatcctcatactcattctggggctcaggcttgagccactactccctcatcccctcaggagtctgaacactgggcttatgccttactctcagggacaagcagcccccattgctgcctgtagatgtgagctgttgagttccctcttgctggggaagatgagcttccatgtatcctgtgctcaaccctgaccctttgacactggttctggcctttcctgccttttctcaagctgcctggaatcctcaaacctgtcactttggtcagatgtgcagaccattactaaggtctatgtctgcaaacattactaatctaggtcctattactaatctatgtctgcaaacattaaaggaatgaaacaatgaaaggaacatttgaaagaaaatgtgggtagacaatttcttgcaacttgggggaaagtttagaattcttttgattggactactttttttttttttcctcaagcttcaggtgaccacaatagcaacacctccctattctgttatttcttagtgtaggtagacaattctttcaggagcagagcagcgtcctataatcctagaccttttcatgacgtgtaaaaaatgatgtttcatcctctgattgccccaataaaaatctttgttgtccatccctatacaacctg

SEQ ID NO: 734069 - DNA, 1475 bp, Homo sapiens; identical to SEQ ID NO: 16190

SEQ ID NO: 734070 - DNA, 1137 bp, Homo sapiens
agcagttagtgcccagagaagaataaatacagctgcaggaggctagggtttgagccaggctgctgctactttgaagctgtgtaatgttagtcacttaactcctcagaacctaagtgtttccatgggtagaaatagaaagacacttgtccggtttacctcaaagactttgtgattgtgtgaggataagatatgttgatagatgtcagtactgtttgtgactcacatggagctagttgagtaagtccctgggatactgcacaaggttctggcctggctcacatcagtgtgggatctgtacatggcttagctctttttcctatgttgagccccagtcttctcccttagctaatgtgagtttcaactgaataattccttcctggactatacccatccttactgcattttcctcttctctttataggatagtatcctggtgttgcttgacctggcccccctggccccgcctgccctctgcttgttctcctgagccctgattatcctcatactcattctggggctcaggcttgagccactactccctcatcccctcaggagtctgaacactgggcttatgccttactctcagggacaagcagcccccattgctgcctgtagatgtgagctgttgagttccctcttgctggggaagatgagcttccatgtatcctgtgctcaaccctgaccctttgacactggttctggcctttcctgccttttctcaagctgcctggaatcctcaaacctgtcactttggtcagatgtgcagaccattactaaggtctatgtctgcaaacattactaatctaggtcctattactaatctatgtctgcaaacattaaaggaatgaaacaatgaaaggaacatttgaaagaaaatgtgggtagacaatttcttgcaacttgggggaaagtttagaattcttttgattggactactttttttttttttcctcaagcttcaggtgaccacaatagcaacacctccctattctgttatttcttagtgtaggtagacaattctttcaggagcagagcagcgtcctataatcctagaccttttcatgacgtgtaaaaaatgatgtttcatcctctgattgccccaataaaaatctttgttgtccatccctatacaacctg

SEQ ID NO: 734071 - DNA, 391 bp, Homo sapiens; identical to SEQ ID NO: 16191

SEQ ID NO: 734072 - DNA, 993 bp, Homo sapiens
atgccacgctccttcctggtgaagagcaagaaggctcacacctaccaccagccccgtgtgcaggaagatgaaccgctctggcctcatgcccttaccccggtgcccagagaccaggctccaagcaacagccctgtccttagcactctattcccaaaccagtgcctggactggaccaacctcaaacgagagccggagctggagcaggaccagaacttggccaggatggccccggcaccagagggccccattgtgctgtcccgaccccaggatggggactctccactgtccgactcacccccattctacaagcctagcttctcctgggacaccttggccacaacctatggccacagctaccggcaggccccctccaccatgcagtcagccttcctggagcactccgtcagcctgtacggcagtcctcttgtgcccagcactgagcccgccttggacttcagcctccgctactccccaggcatggatgcgtaccactgtgtgaagtgcaacaaggtcttctccacccctcacgggctcgaagtgcatgtgcgacgctcccatagtgggacccggcccttcgcctgtgacatctgcggcaaaaccttcggccacgctgtgagcctggagcagcacacgcacgtccactcccaggagcgcaacttcgagtgccgcatgtgcggcaaggccttcaagcgctcgtccacgctgtccacccacctgctcatccactcagacacgcggccctacccctgccagttctgcggcaagcgtttccaccagaagtccgacatgaagaagcacacctacatccacacaggtgagaagccgcacaagtgccaggtgtgcggaaaggccttcagccagagctccaacctcatcacccacagccgcaagcacacaggcttcaagcccttcagctgtgagctgtgcaccaaaggcttccagcgcaaggtggacctgcggcggcaccgcgagagccagcacaatctcaagtga

SEQ ID NO: 734073 - DNA, 2852 bp, Homo sapiens
gagatggagtcttgctctgtcgcccaggctggagtgcagtggcatcatctctgctcactgcaagctccgcctcccgggttcaccccacacgccattctcctgcctcagcctcctgagtagctgggagtacagctgccggccaccacgcccggctaattttttctatttttagtagagacggggtttcaccgtgttagccaagatggtctcgatctcctgacctcgtgatccgcccgcctcagcctcccaaagatctgggattacaggcgtgagccactgcacccggccagaagctttttcatttattcgtccagcagcatcttgtactagtccgaaatttatcagtggtgtggttcctcgtgcaacaaatatgaacgtctgaaggcaaaccaggtagctactggcattcggtacaatgaaaggaaaggaaggtctgaactaattgtcgtggaagaaggaagtgaaccctcagaacttataaaggtcttaggggaaaagccagagcttccagatggaggtgatgatgatgacattatagcagacataagtaacaggaaaatggctaaactatacatggtttcagatgcaagtggctccatgagagtgactgtggtggcagaagaaaaccccttctcaatggcaatgctgctgtctgaagaatgctttattttggaccacggggctgccaaacaaattttcgtatggaaaggtaaagatgctaatccccaagagaggaaggctgcaatgaagacagctgaagaatttctacagcaaatgaattattccaagaatacccaaattcaagttcttccagaaggaggtgaaacaccaatcttcaaacagttttttaaggactggagagataaagatcagagtgatggcttcgggaaagtttatgtcacagagaaagtggctcaaataaaacaaattccctttgatgcctcaaaattacacagttctccgcagatggcagcccagcacaatatggtggatgatggttctggcaaagtggagatttggcgtgtagaaaacaatggtaggatccaagttgaccaaaactcatatggtgaattctatggtggtgactgctacatcatactctacacctatcccagaggacagattatctacacgtggcaaggagcaaatgccacacgagatgagctgacaacatctgcgttcctgactgttcagttggatcggtcccttggaggacaggctgtgcagatccgagtctcccaaggcaaagagcctgttcacctactgagtttgttcaaagacaaaccgctcattatttacaagaatggaacatcaaagaaaggaggtcaggcacctgctccccctacacgcctctttcaagtccggagaaacctggcatctatcaccagaattgtggaggttgatgttgatgcaaattcactgaattctaacgatgtttttgtcctgaaactgccacaaaatagtggctacatctgggtaggaaaaggtgctagccaggaggaggagaaaggagcagagtatgtagcaagtgtcctaaagtgcaaaaccttaaggatccaagaaggcgaggagccagaggagttctggaattcccttggagggaaaaaagactaccagacctcaccactactggaaacccaggctgaagaccatccacctcggctttacggctgctctaacaaaactggaagatttgttattgaagagattccaggagagttcacccaggatgatttagctgaagatgatgtcatgttactagatgcttgggaacagatatttatttggattggcaaagatgctaatgaagttgagaaaaaagaatctctgaagtctgccaaaatgtaccttgagacagacccttctggaagagacaagaggacaccaattgtcatcataaaacagggccatgagccacccacattcacaggctggttcctgggctgggattccagcaagtggtaaattggtatttgtaaaaagcaaacaaacattacaaggcagttatctcattgctgttttgggagaggaacgggaaaagctttttgcttatttgtcttttgaaaattaaggctgggcgcggtggctcacacctgtaatcccagcactttgagaggatgaggtaggcggatcactggggtcaggatttcgagaccagcctggccaacatggcgaaacctcgcctctactaaaaatacaaaaaaattagctgcgcgtggtggtgcacgcctgtagtccctgctacttggaaggctgagacaggaaaattgcttgaacccaggaggctgaggttgcagtgagccaggattgcgccaccacactccagcctgggcaacagagactctgtctcaaaaaaaaaaaaaaaaaaaattaacctcaaccaaacgcctattttttaatgcttagttttggcttgaaattcttcttcacctggagttttcttacgttaatacattaaaataacctgaaggaaactttcgttatgggccaatattagctcttatggaaactgatttatatcttttttatgacctttcaaaagtaaaatactatgcataatctagaaagatttgtcagataggaaattttataatgcattagccattagtcagagttgttttttaacatgccagagaaaaagttgtaatgccttggaagttattctcttttctatagattgtgttcaaaagatgtgtatacttgcaataaggtttatgttaaggtggctttaacaattggttgctattttccttctttagtcaatatgactttgatgtcattaactgctaagtgttattttctaagaggaattttatcttttttttaaccttattaaaagcctttgaaaacac

SEQ ID NO: 734074 - DNA, 5679 bp, Homo sapiens
gagatggagtcttgctctgtcgcccaggctggagtgcagtggcatcatctctgctcactgcaagctccgcctcccgggttcaccccacacgccattctcctgcctcagcctcctgagtagctgggagtacagctgccggccaccacgcccggctaattttttctatttttagtagagacggggtttcaccgtgttagccaagatggtctcgatctcctgacctcgtgatccgcccgcctcagcctcccaaagatctgggattacaggcgtgagccactgcacccggccagaagctttttcatttattcgtccagcagcatcttgtactagtcctgactggttagtatagaaacagcactcctcttctaaaaagatacacaggccgcctttctcggcagtgaggagatctaaacctcgatggttttgaagtgtcactgctgcttaaagagtcttttggaattggagagcaagtctatttgggattggagaccccttcgtggggttttgggagggcctggtcggcttgttggcagaggagatagctcatgagggagactgttgggaggtattctcctagctgagagttagaagggggcctgttttgtaagaggaaagggcgtccgtatattaactcaaatggactgaggaaggagggtgcttttggactggctctaatgctctccagtgctatgggcaaaagggaggtccatggtttttggacttcaagagtgagtttggttaactgagccttaaggatcccatttgccctttcgacttttccggatgtctggggccagcatgggatatggagacgccactggatgccaagggactgagaaacctgttgagtgatttgggagatgaagctaggggccattgtctgattgtatggagccagggagaccaaatgtagggatgatttctgttacaagaatttgggagacttctgcggccttttctgaagaggtaggaaatgcttctacccacctagagaaggtgtctataagagtaagaataaattttgtcctcttgacgggatgaatgtgggtgaagtctatttgccagtcctcccctgggagtgttcctctgaggggatgtgtagggatggagggagagtggagggccccttgggaggaagtaacagagcatataggacagtttgaggttatgtctcttagtgaggtgaatagatggggggaggagaaatagggtgaaggagtaggtatgggggcgcacactgatatggaaggattggtgaagagatgtcagaatttctttggtctgctcttaggggaggacgagcttttgatttttgactatccagtccccttgaaaggaggctccttgctgtatagcaaagctttctcggtgggagagttcttgggtaggattgctgggataacaggaaggagaggggcagaggcagaagaaagggaggcttcttttgctgcctcatcggcctttctgttgcctcgagatttcatctgaacctgttcgatgtcctcaacagtgtataactcctgctttagctgggaggtgtgtggcctgaaggagttagtaaataaggtggccattagtgataggggttcctttggcagtaaggagtcctctcttttgccagatagcagcgtgggaacgaggaatgtgataggcatatttggagtctgtataaatgttgactcgtttgcctttggaaagatttagggccctggtgagagctatgagttctgctttttgggaggaggatcctggcttcaattacttggtcaagggaaacaactgcatatccagcaatctggggggtagctggtgggcctggaagaggagccatctatgaatagttgatcatcggggttggtgagaggctcggaggaaatgtttgggaaatgtggctgtacgtggtccaggatatcagtggaagaatgagtaggaagggaagaggatacggggagtaaggatgctgggttgagggaagcacttctggtaagactgaatttgggattttttataaagagggcatggagtaattgaatcctggaaggaggaagggagcttactgcttgggaggagaggagatcttgtagattatgagaactgtggacggtggtattctggctgaaagttagtttcctgctttctagagctaagctggctaccacttctagtgctttaaagcaggctggccaccctttgactgtgttatctagttgtttagagaggtaagctacaggggcaaaggaaggaggatttcctttctgttgtcctaagacaccgagggctattcctcagctttcagcagtatagagagtgaaaggttgggagatatcaggtaaggacggagctgacgcagtgacaagagcagtttggagtttgtggaagctggggagtatgttatgtgaggggtttaggggttcattgggagggcctttggccacttcatagaggggatgagctaggagggcaaagttggaaatccatattctaaagaagcctgctagccctgggaaggaaaggatttcgcttttggaggagggtgggggtagattttctattaatgctgccctggctggagtcatagcctgggccccaggggaaagttgaattcctaagtaagtcatcatggagatggagagttgggccttggagggggagaccctataccctttgatagcgagaaagtttaagagagcagtggccgtgtgagtttgagagtcttttagagaggggctgcaaagaagaaggtcgtccacatattgaagatgactgggagacaggtttaaggaagtgaggtttcgggctagagcttgtccaaagaaatgagggctatccctgaagccctgagggaggacagtccatgtgagttgttgtgactggagggtgtcagggtcagtccaggtgaaagcaaataggttttgggaatcagggtgtagggaaatggtaaagaaggcatccttcaggtcaattgcagtgtagagggtggtgttggtagcgacgagagagagaagtggataggggttatggactatgggatgaatagggaggacagcttgactgatggcttggaggttgtgaacgagtcggtatgagccatcagactttttaacagggaggataggggtgttatatggagagtgtgttggtctaagaagactgcatgagcagagcttgtttacgatgggctgtaggcccttttggtgggttagagagatggggtattgaggaacgttgggaaatttggaagagtcttttaactggattctgatggggtcatggtgagcagctacggaagggttaatgagagaggcaggaagtgggtactggggaaaggggtcaggggccggactagcggagaggagcaggaggggactctggttgaagggggcaagaaaaggtgatagaagctttgactttggctaaaaggtctcagcctagaatgggggtggggcaatgaggcatgataaggaaagagtgtgagaaaatggcatcaaacagggaacaagtaagaggtctggtggcaagcggacaagagatgagtccgtcaacccccacaactgagacttgagagggatgagtgggtcctgagaactcaggcaaagctgagtaggtggccccactatcaattaaaaaagagatcagcttacctgctactagtagagttaccctgggctccgatgcagtgatggcagtgggggccgggagccggggcccaggggccctggcctcatcagtcttcagtggctaggccaaggagctatgggagtgcaagtgattcttcactttttgtcttgttgaagggatggtggctctgaggagcatgcttgtctgcccatctgttgagaggacagtcagacttccagtgcccatctgctggcagactaggcaagggctcttcggcactcatgggtggggacatgcccccgtccagtggccttctttgccgcacttaaaacaaggcccaggaggtttgctgctatcaggtcttttgtgcccttgggtactatggctagactgacagatagccactgctggaagctggtatttagcacgatctctttgggctttatctaatttattttgctcgtccctgttattaaagactttgaaagccaggttaaggaggtcttgttgtggggtttgagagccatcttcagcctttttaagtttgtgccggatgtcaggggcagattgggaaataaaatgggtattaagaacaatagttcctacatatgtaacaaacctgcacattgtgcacatgtaccctaaaacttaaagtataataataattaaaaaataaataaaattttttaaagaaagaacaatagttccttctcaggaggcagggtcgatgcgggtatatttttggagagcttctgtaaggcgggaaagagattgggcaggattttcatctgccttttgggaaatgtctttaagtttttcaaaatttacagcctatgggcagctttgttaaggcctgcaatgaggcaagtaatcatatggctacagtacacttggccaggttctgtgggttggtattcccaggaaggctcttcccagggaacagcagcagctcctacgggcttagtaggatcctgctgatgaaggtcatcggcatatgcctgtgctgcgagccacactctttccttctcttctggaaggagggtagaagagaggataaagtagagatcatgccaagtgagttcataagattgagtaagatatttaaattctttgatgtaagtatcaggatcggaggagaaggacccgagacgttcttcaatctgtaagagatcgtagaaggagaaagggacgtggacatggacgatcccctcaactcccgctacttcccggagaggaagcaagggagctggttgctgagcacattgggcccgagagcgggtgaggggaggaggcagagaggactcagagtcagaagtgggttggttggagagagtgggggagaggggtagagccggagcagggacatacggtggaggatcatgatgctctggtggaggatcatgatgctgtcgaggagggagaaaatccacggggtcaaaggaagaggagtcatcggctgggtctgtgggtggggtgacgggagatgagtcaggttttgagctggtgagtaggatttggaaagtagagcaggagtggcagagagaagggtggttacggagaatgaagaaagcctgaatataaggaatctcagaccatttctcattgcgatggcaaaagttgtctaagtctctaagtatattgaaatcgaaagtgccattttcgggccattgggagccattgtccaattggtattgaggccatgcagtattgcagtaaaagataagcctcttagaacggatccctgaacggaggccgagagccttgcgattgcggaggagacacccaaggggggtggtcttgggaggggtagactgagaggctcccatagtgaatggaggaggtgagggtagaggaagaagggaccacagacgacaaagacgagagagggcggcgcctgtcttgcaggccttgtatggaatagaggaggtagctgcggagtcaggcgtccaggaaacagaggaaccagaggcctggaggccagaggaagcccttggcccagcgctgggtcttttgggagtgaagagatggtcaagggttccaggtaataggcaaaagtctctc

SEQ ID NO: 734075 - DNA, 3747 bp, Homo sapiens
aatgaaatgacagaattgatcattaggatgcttgttactcaaaaagcccattttttaaagaaggatgtattaaaattattccagcatgctaatgtggcacactcctctgctgcctaacggcaggtgttgctattagcagaggaagccttgttctaagaattattctagagggccagaaagaacaggtattgctccacccgagtaaacgctgactcaactctgcagggctggcgcgctctttcctcacctcacccctcctgccaggcacaactgagatccagaaataagaggattagcgagagaaggggaaatatgcaggacggtagtgatgggtatgcacaaaggagtgccaagcagttttaaccgttaatgttcttcgtctattgctagagaaaatgtctttccttggaggaggcattggcacgagttactataaactccctctgaatctcaagacttctgggacgccgattccgctcctggcctggggcaaggcgtgggagcttggaagccagcgctgcgctccccgtgggaagcgatcgtctcctctgtcaactcgcgcctgggcacttagcccctcccgtttcagggcgccgcctccccggatggcaaacactataaagtggcggcgaataaggttcctcctgctgctctcggtttagtccaagatcagcgatatcacgcgtcccccggagcatcgcgtgcaggagccatggcgcgggagctataccacgaagagttcgcccgggcgggcaagcaggcggggctgcaggtctggaggattgagaagctggagctggtgcccgtgccccagagcgctcacggcgacttctacgtcggggatgcctacctggtgctgcacacggccaagacgagccgaggcttcacctaccgcctgcacttctggctcggaaaggagtgttcccaggatgaaagcacagctgctgccatcttcactgttcagatggatgactatttgggtggcaagccagtgcagaatagagaacttcaaggatatgagtctaatgactttgttagctatttcaaaggcggtctgaaatacaaggctggaggcgtggcatctggattaaatcatgttcttacgaacgacctgacagccaagaggctcctacatgtgaagggtcgtagagtggtgagagccacagaagttccccttagctgggacagtttcaacaagggtgactgcttcatcattgaccttggcaccgaaatttatcagtggtgtggttcctcgtgcaacaaatatgaacgtctgaaggcaaaccaggtagctactggcattcggtacaatgaaaggaaaggaaggtctgaactaattgtcgtggaagaaggaagtgaaccctcagaacttataaaggtcttaggggaaaagccagagcttccagatggaggtgatgatgatgacattatagcagacataagtaacaggaaaatggctaaactatacatggtttcagatgcaagtggctccatgagagtgactgtggtggcagaagaaaaccccttctcaatggcaatgctgctgtctgaagaatgctttattttggaccacggggctgccaaacaaattttcgtatggaaaggtaaagatgctaatccccaagagaggaaggctgcaatgaagacagctgaagaatttctacagcaaatgaattattccaagaatacccaaattcaagttcttccagaaggaggtgaaacaccaatcttcaaacagttttttaaggactggagagataaagatcagagtgatggcttcgggaaagtttatgtcacagagaaagtggctcaaataaaacaaattccctttgatgcctcaaaattacacagttctccgcagatggcagcccagcacaatatggtggatgatggttctggcaaagtggagatttggcgtgtagaaaacaatggtaggatccaagttgaccaaaactcatatggtgaattctatggtggtgactgctacatcatactctacacctatcccagaggacagattatctacacgtggcaaggagcaaatgccacacgagatgagctgacaacatctgcgttcctgactgttcagttggatcggtcccttggaggacaggctgtgcagatccgagtctcccaaggcaaagagcctgttcacctactgagtttgttcaaagacaaaccgctcattatttacaagaatggaacatcaaagaaaggaggtcaggcacctgctccccctacacgcctctttcaagtccggagaaacctggcatctatcaccagaattgtggaggttgatgttgatgcaaattcactgaattctaacgatgtttttgtcctgaaactgccacaaaatagtggctacatctgggtaggaaaaggtgctagccaggaggaggagaaaggagcagagtatgtagcaagtgtcctaaagtgcaaaaccttaaggatccaagaaggcgaggagccagaggagttctggaattcccttggagggaaaaaagactaccagacctcaccactactggaaacccaggctgaagaccatccacctcggctttacggctgctctaacaaaactggaagatttgttattgaagagattccaggagagttcacccaggatgatttagctgaagatgatgtcatgttactagatgcttgggaacagatatttatttggattggcaaagatgctaatgaagttgagaaaaaagaatctctgaagtctgccaaaatgtaccttgagacagacccttctggaagagacaagaggacaccaattgtcatcataaaacagggccatgagccacccacattcacaggctggttcctgggctgggattccagcaagtggtaaattggtatttgtaaaaagcaaacaaacattacaaggcagttatctcattgctgttttgggagaggaacgggaaaagctttttgcttatttgtcttttgaaaattaaggctgggcgcggtggctcacacctgtaatcccagcactttgagaggatgaggtaggcggatcactggggtcaggatttcgagaccagcctggccaacatggcgaaacctcgcctctactaaaaatacaaaaaaattagctgcgcgtggtggtgcacgcctgtagtccctgctacttggaaggctgagacaggaaaattgcttgaacccaggaggctgaggttgcagtgagccaggattgcgccaccacactccagcctgggcaacagagactctgtctcaaaaaaaaaaaaaaaaaaaattaacctcaaccaaacgcctattttttaatgcttagttttggcttgaaattcttcttcacctggagttttcttacgttaatacattaaaataacctgaaggaaactttcgttatgggccaatattagctcttatggaaactgatttatatcttttttatgacctttcaaaagtaaaatactatgcataatctagaaagatttgtcagataggaaattttataatgcattagccattagtcagagttgttttttaacatgccagagaaaaagttgtaatgccttggaagttattctcttttctatagattgtgttcaaaagatgtgtatacttgcaataaggtttatgttaaggtggctttaacaattggttgctattttccttctttagtcaatatgactttgatgtcattaactgctaagtgttattttctaagaggaattttatcttttttttaaccttattaaaagcctttgaaaacac

SEQ ID NO: 734076 - DNA, 2217 bp, Homo sapiens; identical to SEQ ID NO: 277039

SEQ ID NO: 734077 - DNA, 3665 bp, Homo sapiens
gagatggagtcttgctctgtcgcccaggctggagtgcagtggcatcatctctgctcactgcaagctccgcctcccgggttcaccccacacgccattctcctgcctcagcctcctgagtagctgggagtacagctgccggccaccacgcccggctaattttttctatttttagtagagacggggtttcaccgtgttagccaagatggtctcgatctcctgacctcgtgatccgcccgcctcagcctcccaaagatctgggattacaggcgtgagccactgcacccggccagaagctttttcatttattcgtccagcagcatcttgtactagtcctgactggttagtatagaaacagcactcctcttctaaaaagatacacaggccgcctttctcggcagtgaggagatctaaacctcgatggttttgaagtgtcactgctgcttaaagagtcttttggaattggagagcaagtctatttgggattggagaccccttcgtggggttttgggagggcctggtcggcttgttggcagaggagatagctcatgagggagactgttgggaggtattctcctagctgagagttagaagggggcctgttttgtaagaggaaagggcgtccgtatattaactcaaatggactgaggaaggagggtgcttttggactggctctaatgctctccagtgctatgggcaaaagggaggtccatggtttttggacttcaagagtgagtttggttaactgagccttaaggatcccatttgccctttcgacttttccggatgtctggggccagcatgggatatggagacgccactggatgccaagggactgagaaacctgttgagtgatttgggagatgaagctaggggccattgtctgattgtatggagccagggagaccaaatgtagggatgatttctgttacaagaatttgggagacttctgcggccttttctgaagaggtaggaaatgcttctacccacctagagaaggtgtctataagagtaagaataaattttgtcctcttgacgggatgaatgtgggtgaagtctatttgccagtcctcccctgggagtgttcctctgaggggatgtgtagggatggagggagagtggagggccccttgggaggaagtaacagagcatataggacagtttgaggttatgtctcttagtgaggtgaatagatggggggaggagaaatagggtgaaggagtaggtatgggggcgcacactgatatggaaggattggtgaagagatgtcagaatttctttggtctgctcttaggggaggacgagcttttgatttttgactatccagtccccttgaaaggaggctccttgctgtatagcaaagctttctcggtgggagagttcttgggtaggattgctgggataacaggaaggagaggggcagaggcagaagaaagggaggcttcttttgctgcctcatcggcctttctgttgcctcgagatttcatctgaacctgttcgatgtcctcaacagtgtataactcctgctttagctgggaggtgtgtggcctgaaggagttagtaaataaggtggccattagtgataggggttcctttggcagtaaggagtcctctcttttgccagatagcagcgtgggaacgaggaatgtgataggcatatttggagtctgtataaatgttgactcgtttgcctttggaaagatttagggccctggtgagagctatgagttctgctttttgggaggaggatcctggcttcaattacttggtcaagggaaacaactgcatatccagcaatctggggggtagctggtgggcctggaagaggagccatctatgaatagttgatcatcggggttggtgagaggctcggaggaaatgtttgggaaatgtggctgtacgtggtccaggatatcagtggaagaatgagtaggaagggaagaggatacggggagtaaggatgctgggttgagggaagcacttctggtaagactgaatttgggattttttataaagagggcatggagtaattgaatcctggaaggaggaagggagcttactgcttgggaggagaggagatcttgtagattatgagaactgtggacggtggtattctggctgaaagttagtttcctgctttctagagctaagctggctaccacttctagtgctttaaagcaggctggccaccctttgactgtgttatctagttgtttagagaggtaagctacaggggcaaaggaaggaggatttcctttctgttgtcctaagacaccgagggctattcctcagctttcagcagtatagagagtgaaaggttgggagatatcaggtaaggacggagctgacgcagtgacaagagcagtttggagtttgtggaagctggggagtatgttatgtgaggggtttaggggttcattgggagggcctttggccacttcatagaggggatgagctaggagggcaaagttggaaatccatattctaaagaagcctgctagccctgggaaggaaaggatttcgcttttggaggagggtgggggtagattttctattaatgctgccctggctggagtcatagcctgggccccaggggaaagttgaattcctaagtaagtcatcatggagatggagagttgggccttggagggggagaccctataccctttgatagcgagaaagtttaagagagcagtggccgtgtgagtttgagagtcttttagagaggggctgcaaagaagaaggtcgtccacatattgaagatgactgggagacaggtttaaggaagtgaggtttcgggctagagcttgtccaaagaaatgagggctatccctgaagccctgagggaggacagtccatgtgagttgttgtgactggagggtgtcagggtcagtccaggtgaaagcaaataggttttgggaatcagggtgtagggaaatggtaaagaaggcatccttcaggtcaattgcagtgtagagggtggtgttggtagcgacgagagagagaagtggataggggttatggactatgggatgaatagggaggacagcttgactgatggcttggaggttgtgaacgagtcggtatgagccatcagactttttaacagggaggataggggtgttatatggagagtgtgttggtctaagaagactgcatgagcagagcttgtttacgatgggctgtaggcccttttggtgggttagagagatggggtattgaggaacgttgggaaatttggaagagtcttttaactggattctgatggggtcatggtgagcagctacggaagggttaatgagagaggcaggaagtgggtactggggaaaggggtcaggggccggactagcggagaggagcaggaggggactctggttgaagggggcaagaaaaggtgatagaagctttgactttggctaaaaggtctcagcctagaatgggggtggggcaatgaggcatgataaggaaagagtgtgagaaaatggcatcaaacagggaacaagtaagaggtctggtggcaagcggacaagagatgagtccgtcaacccccacaactgagacttgagagggatgagtgggtcctgagaactcaggcaaagctgagtaggtggccccactatcaattaaaaaagagatcaccgcgggtggagtacacccgccgtgggccg

SEQ ID NO: 734078 - DNA, 5586 bp, Homo sapiens
gagatggagtcttgctctgtcgcccaggctggagtgcagtggcatcatctctgctcactgcaagctccgcctcccgggttcaccccacacgccattctcctgcctcagcctcctgagtagctgggagtacagctgccggccaccacgcccggctaattttttctatttttagtagagacggggtttcaccgtgttagccaagatggtctcgatctcctgacctcgtgatccgcccgcctcagcctcccaaagatctgggattacaggcgtgagccactgcacccggccagaagctttttcatttattcgtccagcagcatcttgtactagtcctgactggttagtatagaaacagcactcctcttctaaaaagatacacaggccgcctttctcggcagtgaggagatctaaacctcgatggttttgaagtgtcactgctgcttaaagagtcttttggaattggagagcaagtctatttgggattggagaccccttcgtggggttttgggagggcctggtcggcttgttggcagaggagatagctcatgagggagactgttgggaggtattctcctagctgagagttagaagggggcctgttttgtaagaggaaagggcgtccgtatattaactcaaatggactgaggaaggagggtgcttttggactggctctaatgctctccagtgctatgggcaaaagggaggtccatggtttttggacttcaagagtgagtttggttaactgagccttaaggatcccatttgccctttcgacttttccggatgtctggggccagcatgggatatggagacgccactggatgccaagggactgagaaacctgttgagtgatttgggagatgaagctaggggccattgtctgattgtatggagccagggagaccaaatgtagggatgatttctgttacaagaatttgggagacttctgcggccttttctgaagaggtaggaaatgcttctacccacctagagaaggtgtctataagagtaagaataaattttgtcctcttgacgggatgaatgtgggtgaagtctatttgccagtcctcccctgggagtgttcctctgaggggatgtgtagggatggagggagagtggagggccccttgggaggaagtaacagagcatataggacagtttgaggttatgtctcttagtgaggtgaatagatggggggaggagaaatagggtgaaggagtaggtatgggggcgcacactgatatggaaggattggtgaagagatgtcagaatttctttggtctgctcttaggggaggacgagcttttgatttttgactatccagtccccttgaaaggaggctccttgctgtatagcaaagctttctcggtgggagagttcttgggtaggattgctgggataacaggaaggagaggggcagaggcagaagaaagggaggcttcttttgctgcctcatcggcctttctgttgcctcgagatttcatctgaacctgttcgatgtcctcaacagtgtataactcctgctttagctgggaggtgtgtggcctgaaggagttagtaaataaggtggccattagtgataggggttcctttggcagtaaggagtcctctcttttgccagatagcagcgtgggaacgaggaatgtgataggcatatttggagtctgtataaatgttgactcgtttgcctttggaaagatttagggccctggtgagagctatgagttctgctttttgggaggaggatcctggcttcaattacttggtcaagggaaacaactgcatatccagcaatctggggggtagctggtgggcctggaagaggagccatctatgaatagttgatcatcggggttggtgagaggctcggaggaaatgtttgggaaatgtggctgtacgtggtccaggatatcagtggaagaatgagtaggaagggaagaggatacggggagtaaggatgctgggttgagggaagcacttctggtaagactgaatttgggattttttataaagagggcatggagtaattgaatcctggaaggaggaagggagcttactgcttgggaggagaggagatcttgtagattatgagaactgtggacggtggtattctggctgaaagttagtttcctgctttctagagctaagctggctaccacttctagtgctttaaagcaggctggccaccctttgactgtgttatctagttgtttagagaggtaagctacaggggcaaaggaaggaggatttcctttctgttgtcctaagacaccgagggctattcctcagctttcagcagtatagagagtgaaaggttgggagatatcaggtaaggacggagctgacgcagtgacaagagcagtttggagtttgtggaagctggggagtatgttatgtgaggggtttaggggttcattgggagggcctttggccacttcatagaggggatgagctaggagggcaaagttggaaatccatattctaaagaagcctgctagccctgggaaggaaaggatttcgcttttggaggagggtgggggtagattttctattaatgctgccctggctggagtcatagcctgggccccaggggaaagttgaattcctaagtaagtcatcatggagatggagagttgggccttggagggggagaccctataccctttgatagcgagaaagtttaagagagcagtggccgtgtgagtttgagagtcttttagagaggggctgcaaagaagaaggtcgtccacatattgaagatgactgggagacaggtttaaggaagtgaggtttcgggctagagcttgtccaaagaaatgagggctatccctgaagccctgagggaggacagtccatgtgagttgttgtgactggagggtgtcagggtcagtccaggtgaaagcaaataggttttgggaatcagggtgtagggaaatggtaaagaaggcatccttcaggtcaattgcagtgtagagggtggtgttggtagcgacgagagagagaagtggataggggttatggactatgggatgaatagggaggacagcttgactgatggcttggaggttgtgaacgagtcggtatgagccatcagactttttaacagggaggataggggtgttatatggagagtgtgttggtctaagaagactgcatgagcagagcttgtttacgatgggctgtaggcccttttggtgggttagagagatggggtattgaggaacgttgggaaatttggaagagtcttttaactggattctgatggggtcatggtgagcagctacggaagggttaatgagagaggcaggaagtgggtactggggaaaggggtcaggggccggactagcggagaggagcaggaggggactctggttgaagggggcaagaaaaggtgatagaagctttgactttggctaaaaggtctcagcctagaatgggggtggggcaatgaggcatgataaggaaagagtgtgagaaaatggcatcaaacagggaacaagtaagaggtctggtggcaagcggacaagagatgagtccgtcaacccccacaactgagacttgagagggatgagtgggtcctgagaactcaggcaaagctgagtaggtggccccactatcaattaaaaaagagatcatcttcagtggctaggccaaggagctatgggagtgcaagtgattcttcactttttgtcttgttgaagggatggtggctctgaggagcatgcttgtctgcccatctgttgagaggacagtcagacttccagtgcccatctgctggcagactaggcaagggctcttcggcactcatgggtggggacatgcccccgtccagtggccttctttgccgcacttaaaacaaggcccaggaggtttgctgctatcaggtcttttgtgcccttgggtactatggctagactgacagatagccactgctggaagctggtatttagcacgatctctttgggctttatctaatttattttgctcgtccctgttattaaagactttgaaagccaggttaaggaggtcttgttgtggggtttgagagccatcttcagcctttttaagtttgtgccggatgtcaggggcagattgggaaataaaatgggtattaagaacaatagttcctacatatgtaacaaacctgcacattgtgcacatgtaccctaaaacttaaagtataataataattaaaaaataaataaaattttttaaagaaagaacaatagttccttctcaggaggcagggtcgatgcgggtatatttttggagagcttctgtaaggcgggaaagagattgggcaggattttcatctgccttttgggaaatgtctttaagtttttcaaaatttacagcctatgggcagctttgttaaggcctgcaatgaggcaagtaatcatatggctacagtacacttggccaggttctgtgggttggtattcccaggaaggctcttcccagggaacagcagcagctcctacgggcttagtaggatcctgctgatgaaggtcatcggcatatgcctgtgctgcgagccacactctttccttctcttctggaaggagggtagaagagaggataaagtagagatcatgccaagtgagttcataagattgagtaagatatttaaattctttgatgtaagtatcaggatcggaggagaaggacccgagacgttcttcaatctgtaagagatcgtagaaggagaaagggacgtggacatggacgatcccctcaactcccgctacttcccggagaggaagcaagggagctggttgctgagcacattgggcccgagagcgggtgaggggaggaggcagagaggactcagagtcagaagtgggttggttggagagagtgggggagaggggtagagccggagcagggacatacggtggaggatcatgatgctctggtggaggatcatgatgctgtcgaggagggagaaaatccacggggtcaaaggaagaggagtcatcggctgggtctgtgggtggggtgacgggagatgagtcaggttttgagctggtgagtaggatttggaaagtagagcaggagtggcagagagaagggtggttacggagaatgaagaaagcctgaatataaggaatctcagaccatttctcattgcgatggcaaaagttgtctaagtctctaagtatattgaaatcgaaagtgccattttcgggccattgggagccattgtccaattggtattgaggccatgcagtattgcagtaaaagataagcctcttagaacggatccctgaacggaggccgagagccttgcgattgcggaggagacacccaaggggggtggtcttgggaggggtagactgagaggctcccatagtgaatggaggaggtgagggtagaggaagaagggaccacagacgacaaagacgagagagggcggcgcctgtcttgcaggccttgtatggaatagaggaggtagctgcggagtcaggcgtccaggaaacagaggaaccagaggcctggaggccagaggaagcccttggcccagcgctgggtcttttgggagtgaagagatggtcaagggttccaggtaataggcaaaagtctctc

SEQ ID NO: 734079 - DNA, 3610 bp, Homo sapiens
  misc_feature (3609)..(3609): n is a, c, g, or t
gagatggagtcttgctctgtcgcccaggctggagtgcagtggcatcatctctgctcactgcaagctccgcctcccgggttcaccccacacgccattctcctgcctcagcctcctgagtagctgggagtacagctgccggccaccacgcccggctaattttttctatttttagtagagacggggtttcaccgtgttagccaagatggtctcgatctcctgacctcgtgatccgcccgcctcagcctcccaaagatctgggattacaggcgtgagccactgcacccggccagaagctttttcatttattcgtccagcagcatcttgtactagtcctgactggttagtatagaaacagcactcctcttctaaaaagatacacaggccgcctttctcggcagtgaggagatctaaacctcgatggttttgaagtgtcactgctgcttaaagagtcttttggaattggagagcaagtctatttgggattggagaccccttcgtggggttttgggagggcctggtcggcttgttggcagaggagatagctcatgagggagactgttgggaggtattctcctagctgagagttagaagggggcctgttttgtaagaggaaagggcgtccgtatattaactcaaatggactgaggaaggagggtgcttttggactggctctaatgctctccagtgctatgggcaaaagggaggtccatggtttttggacttcaagagtgagtttggttaactgagccttaaggatcccatttgccctttcgacttttccggatgtctggggccagcatgggatatggagacgccactggatgccaagggactgagaaacctgttgagtgatttgggagatgaagctaggggccattgtctgattgtatggagccagggagaccaaatgtagggatgatttctgttacaagaatttgggagacttctgcggccttttctgaagaggtaggaaatgcttctacccacctagagaaggtgtctataagagtaagaataaattttgtcctcttgacgggatgaatgtgggtgaagtctatttgccagtcctcccctgggagtgttcctctgaggggatgtgtagggatggagggagagtggagggccccttgggaggaagtaacagagcatataggacagtttgaggttatgtctcttagtgaggtgaatagatggggggaggagaaatagggtgaaggagtaggtatgggggcgcacactgatatggaaggattggtgaagagatgtcagaatttctttggtctgctcttaggggaggacgagcttttgatttttgactatccagtccccttgaaaggaggctccttgctgtatagcaaagctttctcggtgggagagttcttgggtaggattgctgggataacaggaaggagaggggcagaggcagaagaaagggaggcttcttttgctgcctcatcggcctttctgttgcctcgagatttcatctgaacctgttcgatgtcctcaacagtgtataactcctgctttagctgggaggtgtgtggcctgaaggagttagtaaataaggtggccattagtgataggggttcctttggcagtaaggagtcctctcttttgccagatagcagcgtgggaacgaggaatgtgataggcatatttggagtctgtataaatgttgactcgtttgcctttggaaagatttagggccctggtgagagctatgagttctgctttttgggaggaggatcctggcttcaattacttggtcaagggaaacaactgcatatccagcaatctggggggtagctggtgggcctggaagaggagccatctatgaatagttgatcatcggggttggtgagaggctcggaggaaatgtttgggaaatgtggctgtacgtggtccaggatatcagtggaagaatgagtaggaagggaagaggatacggggagtaaggatgctgggttgagggaagcacttctggtaagactgaatttgggattttttataaagagggcatggagtaattgaatcctggaaggaggaagggagcttactgcttgggaggagaggagatcttgtagattatgagaactgtggacggtggtattctggctgaaagttagtttcctgctttctagagctaagctggctaccacttctagtgctttaaagcaggctggccaccctttgactgtgttatctagttgtttagagaggtaagctacaggggcaaaggaaggaggatttcctttctgttgtcctaagacaccgagggctattcctcagctttcagcagtatagagagtgaaaggttgggagatatcaggtaaggacggagctgacgcagtgacaagagcagtttggagtttgtggaagctggggagtatgttatgtgaggggtttaggggttcattgggagggcctttggccacttcatagaggggatgagctaggagggcaaagttggaaatccatattctaaagaagcctgctagccctgggaaggaaaggatttcgcttttggaggagggtgggggtagattttctattaatgctgccctggctggagtcatagcctgggccccaggggaaagttgaattcctaagtaagtcatcatggagatggagagttgggccttggagggggagaccctataccctttgatagcgagaaagtttaagagagcagtggccgtgtgagtttgagagtcttttagagaggggctgcaaagaagaaggtcgtccacatattgaagatgactgggagacaggtttaaggaagtgaggtttcgggctagagcttgtccaaagaaatgagggctatccctgaagccctgagggaggacagtccatgtgagttgttgtgactggagggtgtcagggtcagtccaggtgaaagcaaataggttttgggaatcagggtgtagggaaatggtaaagaaggcatccttcaggtcaattgcagtgtagagggtggtgttggtagcgacgagagagagaagtggataggggttatggactatgggatgaatagggaggacagcttgactgatggcttggaggttgtgaacgagtcggtatgagccatcagactttttaacagggaggataggggtgttatatggagagtgtgttggtctaagaagactgcatgagcagagcttgtttacgatgggctgtaggcccttttggtgggttagagagatggggtattgaggaacgttgggaaatttggaagagtcttttaactggattctgatggggtcatggtgagcagctacggaagggttaatgagagaggcaggaagtgggtactggggaaaggggtcaggggccggactagcggagaggagcaggaggggactctggttgaagggggcaagaaaaggtgatagaagctttgactttggctaaaaggtctcagcctagaatgggggtggggcaatgaggcatgataaggaaagagtgtgagaaaatggcatcaaacagggaacaagtaagaggtctggtggcaagcggacaagagatgagtccgtcaacccccacaactgagacttgagagggatgagtgggtcctgagagtcgccctgtcgtcgtaccggctcnt

SEQ ID NO: 734080 - DNA, 3555 bp, Homo sapiens
  misc_feature (3554)..(3554): n is a, c, g, or t
gagatggagtcttgctctgtcgcccaggctggagtgcagtggcatcatctctgctcactgcaagctccgcctcccgggttcaccccacacgccattctcctgcctcagcctcctgagtagctgggagtacagctgccggccaccacgcccggctaattttttctatttttagtagagacggggtttcaccgtgttagccaagatggtctcgatctcctgacctcgtgatccgcccgcctcagcctcccaaagatctgggattacaggcgtgagccactgcacccggccagaagctttttcatttattcgtccagcagcatcttgtactagtcctgactggttagtatagaaacagcactcctcttctaaaaagatacacaggccgcctttctcggcagtgaggagatctaaacctcgatggttttgaagtgtcactgctgcttaaagagtcttttggaattggagagcaagtctatttgggattggagaccccttcgtggggttttgggagggcctggtcggcttgttggcagaggagatagctcatgagggagactgttgggaggtattctcctagctgagagttagaagggggcctgttttgtaagaggaaagggcgtccgtatattaactcaaatggactgaggaaggagggtgcttttggactggctctaatgctctccagtgctatgggcaaaagggaggtccatggtttttggacttcaagagtgagtttggttaactgagccttaaggatcccatttgccctttcgacttttccggatgtctggggccagcatgggatatggagacgccactggatgccaagggactgagaaacctgttgagtgatttgggagatgaagctaggggccattgtctgattgtatggagccagggagaccaaatgtagggatgatttctgttacaagaatttgggagacttctgcggccttttctgaagaggtaggaaatgcttctacccacctagagaaggtgtctataagagtaagaataaattttgtcctcttgacgggatgaatgtgggtgaagtctatttgccagtcctcccctgggagtgttcctctgaggggatgtgtagggatggagggagagtggagggccccttgggaggaagtaacagagcatataggacagtttgaggttatgtctcttagtgaggtgaatagatggggggaggagaaatagggtgaaggagtaggtatgggggcgcacactgatatggaaggattggtgaagagatgtcagaatttctttggtctgctcttaggggaggacgagcttttgatttttgactatccagtccccttgaaaggaggctccttgctgtatagcaaagctttctcggtgggagagttcttgggtaggattgctgggataacaggaaggagaggggcagaggcagaagaaagggaggcttcttttgctgcctcatcggcctttctgttgcctcgagatttcatctgaacctgttcgatgtcctcaacagtgtataactcctgctttagctgggaggtgtgtggcctgaaggagttagtaaataaggtggccattagtgataggggttcctttggcagtaaggagtcctctcttttgccagatagcagcgtgggaacgaggaatgtgataggcatatttggagtctgtataaatgttgactcgtttgcctttggaaagatttagggccctggtgagagctatgagttctgctttttgggaggaggatcctggcttcaattacttggtcaagggaaacaactgcatatccagcaatctggggggtagctggtgggcctggaagaggagccatctatgaatagttgatcatcggggttggtgagaggctcggaggaaatgtttgggaaatgtggctgtacgtggtccaggatatcagtggaagaatgagtaggaagggaagaggatacggggagtaaggatgctgggttgagggaagcacttctggtaagactgaatttgggattttttataaagagggcatggagtaattgaatcctggaaggaggaagggagcttactgcttgggaggagaggagatcttgtagattatgagaactgtggacggtggtattctggctgaaagttagtttcctgctttctagagctaagctggctaccacttctagtgctttaaagcaggctggccaccctttgactgtgttatctagttgtttagagaggtaagctacaggggcaaaggaaggaggatttcctttctgttgtcctaagacaccgagggctattcctcagctttcagcagtatagagagtgaaaggttgggagatatcaggtaaggacggagctgacgcagtgacaagagcagtttggagtttgtggaagctggggagtatgttatgtgaggggtttaggggttcattgggagggcctttggccacttcatagaggggatgagctaggagggcaaagttggaaatccatattctaaagaagcctgctagccctgggaaggaaaggatttcgcttttggaggagggtgggggtagattttctattaatgctgccctggctggagtcatagcctgggccccaggggaaagttgaattcctaagtaagtcatcatggagatggagagttgggccttggagggggagaccctataccctttgatagcgagaaagtttaagagagcagtggccgtgtgagtttgagagtcttttagagaggggctgcaaagaagaaggtcgtccacatattgaagatgactgggagacaggtttaaggaagtgaggtttcgggctagagcttgtccaaagaaatgagggctatccctgaagccctgagggaggacagtccatgtgagttgttgtgactggagggtgtcagggtcagtccaggtgaaagcaaataggttttgggaatcagggtgtagggaaatggtaaagaaggcatccttcaggtcaattgcagtgtagagggtggtgttggtagcgacgagagagagaagtggataggggttatggactatgggatgaatagggaggacagcttgactgatggcttggaggttgtgaacgagtcggtatgagccatcagactttttaacagggaggataggggtgttatatggagagtgtgttggtctaagaagactgcatgagcagagcttgtttacgatgggctgtaggcccttttggtgggttagagagatggggtattgaggaacgttgggaaatttggaagagtcttttaactggattctgatggggtcatggtgagcagctacggaagggttaatgagagaggcaggaagtgggtactggggaaaggggtcaggggccggactagcggagaggagcaggaggggactctggttgaagggggcaagaaaaggtgatagaagctttgactttggctaaaaggtctcagcctagaatgggggtggggcaatgaggcatgataaggaaagagtgtgagaaaatggcatcaaacagggaacaagtaagaggtctggtggcaagcggacaagaggtcgccctgtcgtcgtaccggctcnt

SEQ ID NO: 734081 - DNA, 5478 bp, Homo sapiens
gagatggagtcttgctctgtcgcccaggctggagtgcagtggcatcatctctgctcactgcaagctccgcctcccgggttcaccccacacgccattctcctgcctcagcctcctgagtagctgggagtacagctgccggccaccacgcccggctaattttttctatttttagtagagacggggtttcaccgtgttagccaagatggtctcgatctcctgacctcgtgatccgcccgcctcagcctcccaaagatctgggattacaggcgtgagccactgcacccggccagaagctttttcatttattcgtccagcagcatcttgtactagtcctgactggttagtatagaaacagcactcctcttctaaaaagatacacaggccgcctttctcggcagtgaggagatctaaacctcgatggttttgaagtgtcactgctgcttaaagagtcttttggaattggagagcaagtctatttgggattggagaccccttcgtggggttttgggagggcctggtcggcttgttggcagaggagatagctcatgagggagactgttgggaggtattctcctagctgagagttagaagggggcctgttttgtaagaggaaagggcgtccgtatattaactcaaatggactgaggaaggagggtgcttttggactggctctaatgctctccagtgctatgggcaaaagggaggtccatggtttttggacttcaagagtgagtttggttaactgagccttaaggatcccatttgccctttcgacttttccggatgtctggggccagcatgggatatggagacgccactggatgccaagggactgagaaacctgttgagtgatttgggagatgaagctaggggccattgtctgattgtatggagccagggagaccaaatgtagggatgatttctgttacaagaatttgggagacttctgcggccttttctgaagaggtaggaaatgcttctacccacctagagaaggtgtctataagagtaagaataaattttgtcctcttgacgggatgaatgtgggtgaagtctatttgccagtcctcccctgggagtgttcctctgaggggatgtgtagggatggagggagagtggagggccccttgggaggaagtaacagagcatataggacagtttgaggttatgtctcttagtgaggtgaatagatggggggaggagaaatagggtgaaggagtaggtatgggggcgcacactgatatggaaggattggtgaagagatgtcagaatttctttggtctgctcttaggggaggacgagcttttgatttttgactatccagtccccttgaaaggaggctccttgctgtatagcaaagctttctcggtgggagagttcttgggtaggattgctgggataacaggaaggagaggggcagaggcagaagaaagggaggcttcttttgctgcctcatcggcctttctgttgcctcgagatttcatctgaacctgttcgatgtcctcaacagtgtataactcctgctttagctgggaggtgtgtggcctgaaggagttagtaaataaggtggccattagtgataggggttcctttggcagtaaggagtcctctcttttgccagatagcagcgtgggaacgaggaatgtgataggcatatttggagtctgtataaatgttgactcgtttgcctttggaaagatttagggccctggtgagagctatgagttctgctttttgggaggaggatcctggcttcaattacttggtcaagggaaacaactgcatatccagcaatctggggggtagctggtgggcctggaagaggagccatctatgaatagttgatcatcggggttggtgagaggctcggaggaaatgtttgggaaatgtggctgtacgtggtccaggatatcagtggaagaatgagtaggaagggaagaggatacggggagtaaggatgctgggttgagggaagcacttctggtaagactgaatttgggattttttataaagagggcatggagtaattgaatcctggaaggaggaagggagcttactgcttgggaggagaggagatcttgtagattatgagaactgtggacggtggtattctggctgaaagttagtttcctgctttctagagctaagctggctaccacttctagtgctttaaagcaggctggccaccctttgactgtgttatctagttgtttagagaggtaagctacaggggcaaaggaaggaggatttcctttctgttgtcctaagacaccgagggctattcctcagctttcagcagtatagagagtgaaaggttgggagatatcaggtaaggacggagctgacgcagtgacaagagcagtttggagtttgtggaagctggggagtatgttatgtgaggggtttaggggttcattgggagggcctttggccacttcatagaggggatgagctaggagggcaaagttggaaatccatattctaaagaagcctgctagccctgggaaggaaaggatttcgcttttggaggagggtgggggtagattttctattaatgctgccctggctggagtcatagcctgggccccaggggaaagttgaattcctaagtaagtcatcatggagatggagagttgggccttggagggggagaccctataccctttgatagcgagaaagtttaagagagcagtggccgtgtgagtttgagagtcttttagagaggggctgcaaagaagaaggtcgtccacatattgaagatgactgggagacaggtttaaggaagtgaggtttcgggctagagcttgtccaaagaaatgagggctatccctgaagccctgagggaggacagtccatgtgagttgttgtgactggagggtgtcagggtcagtccaggtgaaagcaaataggttttgggaatcagggtgtagggaaatggtaaagaaggcatccttcaggtcaattgcagtgtagagggtggtgttggtagcgacgagagagagaagtggataggggttatggactatgggatgaatagggaggacagcttgactgatggcttggaggttgtgaacgagtcggtatgagccatcagactttttaacagggaggataggggtgttatatggagagtgtgttggtctaagaagactgcatgagcagagcttgtttacgatgggctgtaggcccttttggtgggttagagagatggggtattgaggaacgttgggaaatttggaagagtcttttaactggattctgatggggtcatggtgagcagctacggaagggttaatgagagaggcaggaagtgggtactggggaaaggggtcaggggccggactagcggagaggagcaggaggggactctggttgaagggggcaagaaaaggtgatagaagctttgactttggctaaaaggtctcagcctagaatgggggtggggcaatgaggcatgataaggaaagagtgtgagaaaatggcagtgggggccgggagccggggcccaggggccctggcctcatcagtcttcagtggctaggccaaggagctatgggagtgcaagtgattcttcactttttgtcttgttgaagggatggtggctctgaggagcatgcttgtctgcccatctgttgagaggacagtcagacttccagtgcccatctgctggcagactaggcaagggctcttcggcactcatgggtggggacatgcccccgtccagtggccttctttgccgcacttaaaacaaggcccaggaggtttgctgctatcaggtcttttgtgcccttgggtactatggctagactgacagatagccactgctggaagctggtatttagcacgatctctttgggctttatctaatttattttgctcgtccctgttattaaagactttgaaagccaggttaaggaggtcttgttgtggggtttgagagccatcttcagcctttttaagtttgtgccggatgtcaggggcagattgggaaataaaatgggtattaagaacaatagttcctacatatgtaacaaacctgcacattgtgcacatgtaccctaaaacttaaagtataataataattaaaaaataaataaaattttttaaagaaagaacaatagttccttctcaggaggcagggtcgatgcgggtatatttttggagagcttctgtaaggcgggaaagagattgggcaggattttcatctgccttttgggaaatgtctttaagtttttcaaaatttacagcctatgggcagctttgttaaggcctgcaatgaggcaagtaatcatatggctacagtacacttggccaggttctgtgggttggtattcccaggaaggctcttcccagggaacagcagcagctcctacgggcttagtaggatcctgctgatgaaggtcatcggcatatgcctgtgctgcgagccacactctttccttctcttctggaaggagggtagaagagaggataaagtagagatcatgccaagtgagttcataagattgagtaagatatttaaattctttgatgtaagtatcaggatcggaggagaaggacccgagacgttcttcaatctgtaagagatcgtagaaggagaaagggacgtggacatggacgatcccctcaactcccgctacttcccggagaggaagcaagggagctggttgctgagcacattgggcccgagagcgggtgaggggaggaggcagagaggactcagagtcagaagtgggttggttggagagagtgggggagaggggtagagccggagcagggacatacggtggaggatcatgatgctctggtggaggatcatgatgctgtcgaggagggagaaaatccacggggtcaaaggaagaggagtcatcggctgggtctgtgggtggggtgacgggagatgagtcaggttttgagctggtgagtaggatttggaaagtagagcaggagtggcagagagaagggtggttacggagaatgaagaaagcctgaatataaggaatctcagaccatttctcattgcgatggcaaaagttgtctaagtctctaagtatattgaaatcgaaagtgccattttcgggccattgggagccattgtccaattggtattgaggccatgcagtattgcagtaaaagataagcctcttagaacggatccctgaacggaggccgagagccttgcgattgcggaggagacacccaaggggggtggtcttgggaggggtagactgagaggctcccatagtgaatggaggaggtgagggtagaggaagaagggaccacagacgacaaagacgagagagggcggcgcctgtcttgcaggccttgtatggaatagaggaggtagctgcggagtcaggcgtccaggaaacagaggaaccagaggcctggaggccagaggaagcccttggcccagcgctgggtcttttgggagtgaagagatggtcaagggttccaggtaataggcaaaagtctctc

SEQ ID NO: 734082 - DNA, 1018 bp, Homo sapiens
tggcgacgagtcagtatttcgacttcgcgcagggcggcggcccgcagtacagcaccctcctggaggacgggactttggtctggttattccccgctgctgtgacagcgcccatgacagcagctggtccccactggcacccaggaagtatttatccaatgactcaatgaatctgccgccggatcgcccgggactgctttcactttctgtcagtccagaagtggagaccactcccccggcccttgcatctgggcttccttgtgccctgccttggacagttggctgcagtggaagtgacgctgtgactgccctgtgcccaagcttaagaggccttgcctgcatctgctccatcttatgggaccctgcctggtgaaggacccaaggctggcctgctggaggaggagatataaggagaagagtcacagtgccccatccaacaggtagctgccctccaggggcagagaagcccagccatggtcaggagagccacccagctgaggcccacctccaccaggattgccacccagctgaaccccacctcagccgggagagccacccagctgagccccatctggccaggagagccatccagctgagccccacctctgccaggattgccacccagctgagccccgccttggccaggagagccacccagctgagccccgccttggccagaagagccacccagctgagccccgccttggccagaagagccacccagctgagcaccgccttggccagaagaggcacccagctgagccccgcctggccaggagagctgcccagctgatccccgcctgcagaatcacaagtgaaataaatgattgttgctttgagtcagaggtcagcggaccttttctgtaaaaagccacatagtaaatatctttggctttgtgagccacaccatgtctgtcacattagtgaaccctgctattgtattgcaagatgagccgtggacaatgtgtcatccagtgggcttggctgtgtgccaataaaactttatttttttggacactga

SEQ ID NO: 734083 - DNA, 863 bp, Homo sapiens
cttcatccacccttatatccatgcccttcccaccatgtccttgctactcttccagtccagaagtggagaccactcccccggcccttgcatctgggcttccttgtgccctgccttggacagttggctgcagtggaagtgacgctgtgactgccctgtgcccaagcttaagaggccttgcctgcatctgctccatcttatgggaccctgcctggtgaaggacccaaggctggcctgctggaggaggagatataaggagaagagtcacagtgccccatccaacaggtagctgccctccaggggcagagaagcccagccatggtcaggagagccacccagctgaggcccacctccaccaggattgccacccagctgaaccccacctcagccgggagagccacccagctgagccccatctggccaggagagccatccagctgagccccacctctgccaggattgccacccagctgagccccgccttggccaggagagccacccagctgagccccgccttggccagaagagccacccagctgagccccgccttggccagaagagccacccagctgagcaccgccttggccagaagaggcacccagctgagccccgcctggccaggagagctgcccagctgatccccgcctgcagaatcacaagtgaaataaatgattgttgctttgagtcagaggtcagcggaccttttctgtaaaaagccacatagtaaatatctttggctttgtgagccacaccatgtctgtcacattagtgaaccctgctattgtattgcaagatgagccgtggacaatgtgtcatccagtgggcttggctgtgtgccaataaaactttatttttttggacactga

SEQ ID NO: 734084 - DNA, 2453 bp, Homo sapiens; identical to SEQ ID NO: 29723

SEQ ID NO: 734085 - DNA, 852 bp, Homo sapiens
tgctgaaggttctgggctgcaaagctgaagctttggtttctgctctaaatgaaggacttttccaggacccaaggccacacactggaagtcttgcagctgaagggaggcactccttggcctccgcagccgatcacatgaaggtggtgccaagtctcctgctctccgtcctcctggcacaggtgtggctggtacccggcttggcccccagtcctcagtcgccagagaccccagcccctcagaaccagaccagcagggtagtgcaggctcccaaggaggaagaggaagatgagcaggaggccagcgaggagaaggccagtgaggaagagaaagcctggctgatggccagcaggcagcagcttgccaaggagacttcaaacttcggattcagcctgctgcgaaagatctccatgaggcacgatggcaacatggtcttctctccatttggcatgtccttggccatgacaggcttgatgctgggggccacagggccgactgaaacccagatcaagagagggctccacttgcaggccctgaagcccaccaagcccgggctcctgccttccctctttaagggactcagagagaccctctcccgcaacctggaactgggcctcacacaggggagttttgccttcatccacaaggattttgatgtcaaagagactttcttcaatttatccaagaggtattttgatacagagtgcgtgcctatgaattttcgcaatgcctcacaggccaaaaggctcatgaatcattacattaacaaagagactcgggggaaaattcccaaactgtttgatgagattaatcctgaaaccaaattaattcttgtggattacatcttgttcaaag

SEQ ID NO: 734086 - DNA, 790 bp, Homo sapiens
gttttacaaagaacagtgattgaagttgatgaaaggggcactgaggcagtggcaggaatcttgtcagaaattactgcttattccatgcctcctgtcatcaaagtggaccggccatttcatttcatgatctatgaagaaacctctggaatgcttctgtttctgggcagggtggtgaatccgactctcctataattcaggacacgcataagcacttcgcgctgtagtagatgctgaatctgaggtatcaaacacacacaggataccagcaatggatggcaggggagagtgttccttttgttcttaactagtttagggtgttctcaaataaatacagtagtccccacttatctgagggggatacattcaaagacccccagcagatgcctgaaacggtggacagtgctgaaccttatatatattttttcctacacatacatacctatgataaagtttaatttataaattaggcacagtaagagattaacaataataacaacattaagttagagaaggctactaagtgactcatgggcgaggagcatagacagtgtggagacattgggcaaggggagaattcacatcctgggtgggacagagcaggacaatgcaagattccatcccactactcagaatggcatgctgcttaagacttttagattgtttatttctggaatttttcatttaatgtttttggaccatggttgaccatggttaactgagactgcagaaagcaaaaccatggataagggaggactactacaaaagcattaaattgatacatattttttaa

SEQ ID NO: 734087 - DNA, 558 bp, Homo sapiens
tgctgaaggttctgggctgcaaagctgaagctttggtttctgctctaaatgaaggacttttccaggacccaaggccacacactggaagtcttgcagctgaagggaggcactccttggcctccgcagccgatcacatgaaggtggtgccaagtctcctgctctccgtcctcctggcacagggaaatggttgaccccatttgaccctgtcttcaccgaagtcgacactttccacctggacaagtacaagaccattaaggtgcccatgatgtacggtgcaggcaagtttgcctccacctttgacaagaattttcgttgtcatgtcctcaaactgccctaccaaggaaatgccaccatgctggtggtcctcatggagaaaatgggtgaccacctcgcccttgaagactacctgaccacagacttggtggagacatggctcagaaacatgaaaaccaggagatgcatgagctgcttaggcagatgggaatcagaagaatcttctcaccctttgctgaccttagtgaactctcagctactggaagaaatctccaagtatccagg

SEQ ID NO: 734088 - DNA, 412 bp, Homo sapiens; identical to SEQ ID NO: 29727

SEQ ID NO: 734089 - DNA, 744 bp, Homo sapiens
  misc_feature (3)..(3): n is a, c, g, or t
  misc_feature (7)..(8): n is a, c, g, or t
  misc_feature (10)..(10): n is a, c, g, or t
ttngtannangggcgaaagggtccatgccagcaacacaatcactcaaagtccagatgagggatcagtaaatacaacgtgcctgaaaggtggcccttgagcacattcctccggtagacattaacttattaaattgattctgattacaaatataaactttgcccccatctcacccagtaacaatgcaagagttgatgtcagtctataaaaggaagtaggaactgtccctggctttcaggctccaacatcctccccctgtcaagatgtggcacctcaaactttgtgcagtcctcatgatcttcctgttgctgttgggccagatagatggctccccaataccagaagtgagttcggcaaagagaaggccacggagaatgaccccattttggagaggggtttccctcaggcctattggagcctcctgccgggatgattctgagtgtatcacaaggctatgcagaaaaagacgctgttccttaagtgtggcccaggaatgatgtacataccagggaaagaaaggacagcagtcacctccgacaatgctccgttctatggaatattgattaactgcattttggctggagacacccaagtgaagcaatcttgtatttttaatatttaaaggcagatgtacgctttaaattggtctccatttcttcttagaatgttgatatatggataagcataactaaacttgtcaatttagagtttatttttctatggatactattaaatgtctcaaattg

SEQ ID NO: 734090 - DNA, 943 bp, Homo sapiens
  misc_feature (3)..(3): n is a, c, g, or t
  misc_feature (7)..(8): n is a, c, g, or t
  misc_feature (10)..(10): n is a, c, g, or t
ttngtannangggcgaaagggtccatgccagcaacacaatcactcaaagtccagatgagggatcagtaaatacaacgtgcctgaaaggtggcccttgagcacattcctccggtagacattaacttattaaattgattctgattacaaatataaactttgcccccatctcacccagtaacaatgcaagagttgatgtcagtctataaaaggaagtaggaactgtccctggctttcaggctccaacatcctccccctgtcaagatgtggcacctcaaactttgtgcagtcctcatgatcttcctgttgctgttgggccaggtaaggaggggaaggatacttatgtgtgtgtgtggagtgtggagatgatagtggtggtggaacttgaaagctagattcagtcctgaggaatggttcctctgttctgagtctacagcatctgcggaatggaatgatcactcttccaaggtgtgcagcagggtgtcaacactttcatatctgaatgtctttgcccttacagatagatggctccccaataccagaagtgagttcggcaaagagaaggccacggagaatgaccccattttggagaggggtttccctcaggcctattggagcctcctgccgggatgattctgagtgtatcacaaggctatgcagaaaaagacgctgttccttaagtgtggcccaggaatgatgtacataccagggaaagaaaggacagcagtcacctccgacaatgctccgttctatggaatattgattaactgcattttggctggagacacccaagtgaagcaatcttgtatttttaatatttaaaggcagatgtacgctttaaattggtctccatttcttcttagaatgttgatatatggataagcataactaaacttgtcaatttagagtttatttttctatggatactattaaatgtctcaaattg

SEQ ID NO: 734091 - DNA, 884 bp, Homo sapiens
  misc_feature (3)..(3): n is a, c, g, or t
  misc_feature (7)..(8): n is a, c, g, or t
  misc_feature (10)..(10): n is a, c, g, or t
ttngtannangggcgaaagggtccatgccagcaacacaatcactcaaagtccagatgagggatcagtaaatacaacgtgcctgaaaggtggcccttgagcacattcctccggtagacattaacttattaaattgattctgattacaaatataaactttgcccccatctcacccagtaacaatgcaagagttgatgtcagtctataaaaggaagtaggaactgtccctggctttcaggctccaacatcctccccctgtcaagatgtggcacctcaaactttgtgcagtcctcatgatcttcctgttgctgttgggccaggtaaggaggggaaggatacttatgtgtgtgtgtggagtgtggagatgatagtggtggtggaacttgaaagctagattcagtcctgaggaatggttcctctgttctgagtctacagcatctgcggaatggaatgatcactcttccaaggtgtgcagcagggtgtcaacactttcatatctgaatgtctttgcccttacagatagatggctccccaataccagaagtgagttcggcaaagagaaggccacggagaatgaccccattttggagaggggtttccctcaggcctattggagcctcctgccgggatgattctgagtgtatcacaaggctatgcaggtactccctgaacctgggagcagggttgggccagagagccctgggaagctgggcagaggagtgacaaggggacacatgaacctaagaataaagctgggatggaggagttctagactgagactgggagctccatggaaaatcccttaggagttaggagccaagaacagctctatgtgggtaccatgaaagaaggaaggaaatgcagcataggtggccctggtcattcc

SEQ ID NO: 734092 - DNA, 1028 bp, Homo sapiens
  misc_feature (3)..(3): n is a, c, g, or t
  misc_feature (7)..(8): n is a, c, g, or t
  misc_feature (10)..(10): n is a, c, g, or t
ttngtannangggcgaaagggtccatgccagcaacacaatcactcaaagtccagatgagggatcagtaaatacaacgtgcctgaaaggtggcccttgagcacattcctccggtagacattaacttattaaattgattctgattacaaatataaactttgcccccatctcacccagtaacaatgcaagagttgatgtcagtctataaaaggaagtaggaactgtccctggctttcaggctccaacatcctccccctgtcaagatgtggcacctcaaactttgtgcagtcctcatgatcttcctgttgctgttgggccagatagatggctccccaataccagaagtgagttcggcaaagagaaggccacggagaatgaccccattttggagaggggtttccctcaggcctattggagcctcctgccgggatgattctgagtgtatcacaaggctatgcagaaaaagacgctgttccttaagtgtggcccaggaatgatgtacataccagggaaagaaaggacagcagtcacctccgacaatgctccgttctatggaatattgattaactgcattttggctggagacacccaagtgaagcaatcttgtatttttaatatttaaaggcagatgtacgctttaaattggtctccatttcttcttagaatgttgatatatggataagcataactaaacttgtcaatttagagtttatttttctatggatactattaaatgtctcaaattgaaattttagcagtctggaattcaagcttttgagggaaagaaggattcattttgtatactaaagaaaagctacataatcaatagctacgtaatcaacttcagcaagttcctaagctgtggccctggatcccttcactccatactcttcagggaggtgtcaaaggtggtcaagcttgggaggctgaggcaggagaatcacttgaacctgggaggtggaggttgcagtgagccaagatcatgccactgcaccccagcctgggtgacatagagagactctgtctcaaa

SEQ ID NO: 734093 - DNA, 1082 bp, Homo sapiens
  misc_feature (3)..(3): n is a, c, g, or t
  misc_feature (7)..(8): n is a, c, g, or t
  misc_feature (10)..(10): n is a, c, g, or t
ttngtannangggcgaaagggtccatgccagcaacacaatcactcaaagtccagatgagggatcagtaaatacaacgtgcctgaaaggtggcccttgagcacattcctccggtagacattaacttattaaattgattctgattacaaatataaactttgcccccatctcacccagtaacaatgcaagagttgatgtcagtctataaaaggaagtaggaactgtccctggctttcaggctccaacatcctccccctgtcaagatgtggcacctcaaactttgtgcagtcctcatgatcttcctgttgctgttgggccagatagatggctccccaataccagaagtgagttcggcaaagagaaggccacggagaatgaccccattttggagaggggtttccctcaggcctattggagcctcctgccgggatgattctgagtgtatcacaaggctatgcagaaaaagacgctgttccttaagtgtggcccaggaatgatgtacataccagggaaagaaaggacagcagtcacctccgacaatgctccgttctatggaatattgattaactgcattttggctggagacacccaagtgaagcaatcttgtatttttaatatttaaaggcagatgtacgctttaaattggtctccatttcttcttagaatgttgatatatggataagcataactaaacttgtcaatttagagtttatttttctatggatactattaaatgtctcaaattgaaattttagcagtctggaattcaagcttttgagggaaagaaggattcattttgtatactaaagaaaaaaacagcattgcccaataatgtgttaacttctcaatctggaaagtgtagtgagagctacataatcaatagctacgtaatcaacttcagcaagttcctaagctgtggccctggatcccttcactccatactcttcagggaggtgtcaaaggtggtcaagcttgggaggctgaggcaggagaatcacttgaacctgggaggtggaggttgcagtgagccaagatcatgccactgcaccccagcctgggtgacatagagagactctgtctcaaa

SEQ ID NO: 734094 - DNA, 1027 bp, Homo sapiens
  misc_feature (3)..(3): n is a, c, g, or t
  misc_feature (7)..(8): n is a, c, g, or t
  misc_feature (10)..(10): n is a, c, g, or t
ttngtannangggcgaaagggtccatgccagcaacacaatcactcaaagtccagatgagggatcagtaaatacaacgtgcctgaaaggtggcccttgagcacattcctccggtagacattaacttattaaattgattctgattacaaatataaactttgcccccatctcacccagtaacaatgcaagagttgatgtcagtctataaaaggaagtaggaactgtccctggctttcaggctccaacatcctccccctgtcaagatgtggcacctcaaactttgtgcagtcctcatgatcttcctgttgctgttgggccagatagatggctccccaataccagaagtgagttcggcaaagagaaggccacggagaatgaccccattttggagaggggtttccctcaggcctattggagcctcctgccgggatgattctgagtgtatcacaaggctatgcagaaaggacagcagtcacctccgacaatgctccgttctatggaatattgattaactgcattttggctggagacacccaagtgaagcaatcttgtatttttaatatttaaaggcagatgtacgctttaaattggtctccatttcttcttagaatgttgatatatggataagcataactaaacttgtcaatttagagtttatttttctatggatactattaaatgtctcaaattgaaattttagcagtctggaattcaagcttttgagggaaagaaggattcattttgtatactaaagaaaaaaacagcattgcccaataatgtgttaacttctcaatctggaaagtgtagtgagagctacataatcaatagctacgtaatcaacttcagcaagttcctaagctgtggccctggatcccttcactccatactcttcagggaggtgtcaaaggtggtcaagcttgggaggctgaggcaggagaatcacttgaacctgggaggtggaggttgcagtgagccaagatcatgccactgcaccccagcctgggtgacatagagagactctgtctcaaa

SEQ ID NO: 734095 - DNA, 973 bp, Homo sapiens
  misc_feature (3)..(3): n is a, c, g, or t
  misc_feature (7)..(8): n is a, c, g, or t
  misc_feature (10)..(10): n is a, c, g, or t
ttngtannangggcgaaagggtccatgccagcaacacaatcactcaaagtccagatgagggatcagtaaatacaacgtgcctgaaaggtggcccttgagcacattcctccggtagacattaacttattaaattgattctgattacaaatataaactttgcccccatctcacccagtaacaatgcaagagttgatgtcagtctataaaaggaagtaggaactgtccctggctttcaggctccaacatcctccccctgtcaagatgtggcacctcaaactttgtgcagtcctcatgatcttcctgttgctgttgggccagatagatggctccccaataccagaagtgagttcggcaaagagaaggccacggagaatgaccccattttggagaggggtttccctcaggcctattggagcctcctgccgggatgattctgagtgtatcacaaggctatgcagaaaggacagcagtcacctccgacaatgctccgttctatggaatattgattaactgcattttggctggagacacccaagtgaagcaatcttgtatttttaatatttaaaggcagatgtacgctttaaattggtctccatttcttcttagaatgttgatatatggataagcataactaaacttgtcaatttagagtttatttttctatggatactattaaatgtctcaaattgaaattttagcagtctggaattcaagcttttgagggaaagaaggattcattttgtatactaaagaaaagctacataatcaatagctacgtaatcaacttcagcaagttcctaagctgtggccctggatcccttcactccatactcttcagggaggtgtcaaaggtggtcaagcttgggaggctgaggcaggagaatcacttgaacctgggaggtggaggttgcagtgagccaagatcatgccactgcaccccagcctgggtgacatagagagactctgtctcaaa

SEQ ID NO: 734096 - DNA, 1227 bp, Homo sapiens
  misc_feature (3)..(3): n is a, c, g, or t
  misc_feature (7)..(8): n is a, c, g, or t
  misc_feature (10)..(10): n is a, c, g, or t
ttngtannangggcgaaagggtccatgccagcaacacaatcactcaaagtccagatgagggatcagtaaatacaacgtgcctgaaaggtggcccttgagcacattcctccggtagacattaacttattaaattgattctgattacaaatataaactttgcccccatctcacccagtaacaatgcaagagttgatgtcagtctataaaaggaagtaggaactgtccctggctttcaggctccaacatcctccccctgtcaagatgtggcacctcaaactttgtgcagtcctcatgatcttcctgttgctgttgggccaggtaaggaggggaaggatacttatgtgtgtgtgtggagtgtggagatgatagtggtggtggaacttgaaagctagattcagtcctgaggaatggttcctctgttctgagtctacagcatctgcggaatggaatgatcactcttccaaggtgtgcagcagggtgtcaacactttcatatctgaatgtctttgcccttacagatagatggctccccaataccagaagtgagttcggcaaagagaaggccacggagaatgaccccattttggagaggggtttccctcaggcctattggagcctcctgccgggatgattctgagtgtatcacaaggctatgcagaaaaagacgctgttccttaagtgtggcccaggaatgatgtacataccagggaaagaaaggacagcagtcacctccgacaatgctccgttctatggaatattgattaactgcattttggctggagacacccaagtgaagcaatcttgtatttttaatatttaaaggcagatgtacgctttaaattggtctccatttcttcttagaatgttgatatatggataagcataactaaacttgtcaatttagagtttatttttctatggatactattaaatgtctcaaattgaaattttagcagtctggaattcaagcttttgagggaaagaaggattcattttgtatactaaagaaaagctacataatcaatagctacgtaatcaacttcagcaagttcctaagctgtggccctggatcccttcactccatactcttcagggaggtgtcaaaggtggtcaagcttgggaggctgaggcaggagaatcacttgaacctgggaggtggaggttgcagtgagccaagatcatgccactgcaccccagcctgggtgacatagagagactctgtctcaaa

SEQ ID NO: 734097 - DNA, 1281 bp, Homo sapiens
  misc_feature (3)..(3): n is a, c, g, or t
  misc_feature (7)..(8): n is a, c, g, or t
  misc_feature (10)..(10): n is a, c, g, or t
ttngtannangggcgaaagggtccatgccagcaacacaatcactcaaagtccagatgagggatcagtaaatacaacgtgcctgaaaggtggcccttgagcacattcctccggtagacattaacttattaaattgattctgattacaaatataaactttgcccccatctcacccagtaacaatgcaagagttgatgtcagtctataaaaggaagtaggaactgtccctggctttcaggctccaacatcctccccctgtcaagatgtggcacctcaaactttgtgcagtcctcatgatcttcctgttgctgttgggccaggtaaggaggggaaggatacttatgtgtgtgtgtggagtgtggagatgatagtggtggtggaacttgaaagctagattcagtcctgaggaatggttcctctgttctgagtctacagcatctgcggaatggaatgatcactcttccaaggtgtgcagcagggtgtcaacactttcatatctgaatgtctttgcccttacagatagatggctccccaataccagaagtgagttcggcaaagagaaggccacggagaatgaccccattttggagaggggtttccctcaggcctattggagcctcctgccgggatgattctgagtgtatcacaaggctatgcagaaaaagacgctgttccttaagtgtggcccaggaatgatgtacataccagggaaagaaaggacagcagtcacctccgacaatgctccgttctatggaatattgattaactgcattttggctggagacacccaagtgaagcaatcttgtatttttaatatttaaaggcagatgtacgctttaaattggtctccatttcttcttagaatgttgatatatggataagcataactaaacttgtcaatttagagtttatttttctatggatactattaaatgtctcaaattgaaattttagcagtctggaattcaagcttttgagggaaagaaggattcattttgtatactaaagaaaaaaacagcattgcccaataatgtgttaacttctcaatctggaaagtgtagtgagagctacataatcaatagctacgtaatcaacttcagcaagttcctaagctgtggccctggatcccttcactccatactcttcagggaggtgtcaaaggtggtcaagcttgggaggctgaggcaggagaatcacttgaacctgggaggtggaggttgcagtgagccaagatcatgccactgcaccccagcctgggtgacatagagagactctgtctcaaa

SEQ ID NO: 734098 - DNA, 496 bp, Homo sapiens
gttgtaacaaaaccgctcaagtctgccttaaagagccttacaagccagccagtccctgcagctccacaaactgacccatcctgggccttgttctccacagaatgggtctgctccttcccctggcactctgcatcctagtcctgtgctgcggagcaatgtctccaccccagctggccctcaacccctcggctctgctctcccggggctgcaatgactccgatgtgctggcagttgcaggctttgccctgcgggatattaacaaagacagaaaggatggctatgtgctgagactcaaccgagtgaacgacgcccaggaatacagacggtttcaaaaaaaaagatttacatgacgtgccctgactgcccaagctccatacccactgactcttccaatcaccaagtgctggaggctgccaccgagtctcttgcgaaatacaacaatgagaacacatccaagcagtattctctcttcaaagtcaccagggcttctagccag

SEQ ID NO: 734099 - DNA, 1635 bp, Homo sapiens; identical to SEQ ID NO: 56954
  misc_feature (701)..(701): n is a, c, g, or t
  misc_feature (719)..(719): n is a, c, g, or t
  misc_feature (728)..(728): n is a, c, g, or t

SEQ ID NO: 734100 - DNA, 1568 bp, Homo sapiens
  misc_feature (701)..(701): n is a, c, g, or t
  misc_feature (719)..(719): n is a, c, g, or t
  misc_feature (728)..(728): n is a, c, g, or t
gttgtaacaaaaccgctcaagtctgccttaaagagccttacaagccagccagtccctgcagctccacaaactgacccatcctgggccttgttctccacagaatgggtctgctccttcccctggcactctgcatcctagtcctgtgctgcggagcaatgtctccaccccagctggccctcaacccctcggctctgctctcccggggctgcaatgactccgatgtgctggcagttgcaggctttgccctgcgggatattaacaaagacagaaaggatggctatgtgctgagactcaaccgagtgaacgacgcccaggaatacagacggggtggcctgggatctctgttctatcttacactggatgtgctagagactgactgccatgtgctcagaaagaaggcatggcaagactgtggaatgaggatattttttgaatcagtttatggtcaatgcaaagcaatattttatatgaacaacccaagtagagttctctatttagctgcttataactgtactcttcgcccagtttcaaaaaaaaagatttacatgacgtgccctgactgcccaagctccatacccactgactcttccaatcaccaagtgctggaggctgccaccgagtctcttgcgaaatacaacaatgagaacacatccaagcagtattctctcttcaaagtcaccagggcttctagccagtgggtngtcggcccttcttacttngtggaatanttaattaaagaatcaccatgtactaaatcccaggccagcagctgttcacttcagtcctccgactctgtgcctgttggtctttgcaaaggttctctgactcgaacacactgggaaaagtttgtctctgtgacttgtgacttctttgaatcacaggctccagccactggaagtgaaaactctgctgttaaccagaaacctacaaaccttcccaaggtggaagaatcccagcagaaaaacacccccccaacagactccccctccaaagctgggccaagaggatctgtccaatatcttcctgacttggatgataaaaattcccaggaaaagggccctcaggaggcctttcctgtgcatctggacctaaccacgaatccccagggagaaaccctggatatttccttcctcttcctggagcctatggaggagaagctggttgtcctgcctttcccccaaagaaaaagcacgcactgctgagtgcccagggccagcccagaatgccagccctcttgtccttccgccatgagaatcacacagagtcttctgtaggggtatggtgcgccgcatgacatgggaggcgatggggacgatggacagagacagagcgtgcacacgtagagtggctagtgaaggacgcctttttgactcttcttggtctcagcatgttgactgggattggaaataatgagactgaccctcggcttgggctgcactctaccctgtacactgccttgtaccctgagctgcatcacctcctaaactgagcagtctcataccatggagagatgcctctcttatgtcttcagccactcacttataaagatacttatcttttcagcagta

SEQ ID NO: 734101 - DNA, 629 bp, Homo sapiens
gttgtaacaaaaccgctcaagtctgccttaaagagccttacaagccagccagtccctgcagctccacaaactgacccatcctgggccttgttctccacagaatgggtctgctccttcccctggcactctgcatcctagtcctgtgctgcggagcaatgtctccaccccagctggccctcaacccctcggctctgctctcccggggctgcaatgactccgatgtgctggcagttgcaggctttgccctgcgggatattaacaaagacagaaaggatggctatgtgctgagactcaaccgagtgaacgacgcccaggaatacagacggggtggcctgggatctctgttctatcttacactggatgtgctagagactgactgccatgtgctcagaaagaaggcatggcaagactgtggaatgaggatattttttgaatcagtttatggtcaatgcaaagcaatattttatatgaacaacccaagtagagttctctatttagctgcttataactgtactcttcgcccagatcaccaagtgctggaggctgccaccgagtctcttgcgaaatacaacaatgagaacacatccaagcagtattctctcttcaaagtcaccagggcttctagccag

SEQ ID NO: 734102 - DNA, 281 bp, Homo sapiens
cagtctccagtacaaattaacaaaccggctgctggcttatgtatcagttgcctatgcatagggtcagtatactcacccccaggcctgaacaactctgggtcctcaggaaccctgaaggtgtgactggcaaagctgaggccctggctcgggagctgcttccctgagaggactgcgcctacagcatccttgacatcttttcataaaccagcacaacttttcaaaaaaaaagatttacatgacgtgccctgactgcccaagctccatacccactgactcttcca

SEQ ID NO: 734103 - DNA, 1317 bp, Homo sapiens
  misc_feature (701)..(701): n is a, c, g, or t
  misc_feature (719)..(719): n is a, c, g, or t
  misc_feature (728)..(728): n is a, c, g, or t
gttgtaacaaaaccgctcaagtctgccttaaagagccttacaagccagccagtccctgcagctccacaaactgacccatcctgggccttgttctccacagaatgggtctgctccttcccctggcactctgcatcctagtcctgtgctgcggagcaatgtctccaccccagctggccctcaacccctcggctctgctctcccggggctgcaatgactccgatgtgctggcagttgcaggctttgccctgcgggatattaacaaagacagaaaggatggctatgtgctgagactcaaccgagtgaacgacgcccaggaatacagacggggtggcctgggatctctgttctatcttacactggatgtgctagagactgactgccatgtgctcagaaagaaggcatggcaagactgtggaatgaggatattttttgaatcagtttatggtcaatgcaaagcaatattttatatgaacaacccaagtagagttctctatttagctgcttataactgtactcttcgcccagtttcaaaaaaaaagatttacatgacgtgccctgactgcccaagctccatacccactgactcttccaatcaccaagtgctggaggctgccaccgagtctcttgcgaaatacaacaatgagaacacatccaagcagtattctctcttcaaagtcaccagggcttctagccagtgggtngtcggcccttcttacttngtggaatanttaattaaagaatcaccatgtactaaatcccaggccagcagctgttcacttcagtcctccgactctgtgcctgttggtctttgcaaaggttctctgactcgaacacactgggaaaagtttgtctctgtgacttgtgacttctttgaatcacaggctccagccactggaagtgaaaactctgctgttaaccagaaacctacaaaccttcccaaggtggaagaatcccagcagaaaaacacccccccaacagactccccgtccttccgccatgagaatcacacagagtcttctgtaggggtatggtgcgccgcatgacatgggaggcgatggggacgatggacagagacagagcgtgcacacgtagagtggctagtgaaggacgcctttttgactcttcttggtctcagcatgttgactgggattggaaataatgagactgaccctcggcttgggctgcactctaccctgtacactgccttgtaccctgagctgcatcacctcctaaactgagcagtctcataccatggagagatgcctctcttatgtcttcagccactcacttataaagatacttatcttttcagcagta

SEQ ID NO: 734104 - DNA, 3568 bp, Homo sapiens; identical to SEQ ID NO: 92315

SEQ ID NO: 734105 - DNA, 458 bp, Homo sapiens; identical to SEQ ID NO: 92312

SEQ ID NO: 734106 - DNA, 3262 bp, Homo sapiens
gccaagggctcagaggcttacagggcccccctggaaagttggggcctccaggaaatccagggccttctgggtcaccaggaccaaagggccaaaaaggagaccctggaaaaagtccggatggtgatagtagcctggctgcctcagaaagaaaagctctgcaaacagaaatggcacgtatcaaaaagtggctgaccttctctctgggcaaacaagttgggaacaagttcttcctgaccaatggtgaaataatgacctttgatgctgcagagaatggagccattcagaatctcatcaaggaggaagccttcctgggcatcactgatgagaagacagaagggcagtttgtggatctgacaggaaatagactgacctacacaaactggaacgagggtgaacccaacaatgctggttctgatgaagattgtgtattgctactgaaaaatggccagtggaatgacgtcccctgctccacctcccatctggccgtctgtgagttccctatctgaagggtcatatcactcaggccctccttgtctttttactgcaacccacaggcccacagtatgcttgaaaagataaattatatcaatttcctcatatccagtattgttccttttgtgggcaatcactaaaaatgatcactaacagcaccaacaaagcaataatagtagtagtagtagttagcagcagcagtagtagtcatgctaattatataatatttttaatatatactatgaggccctatcttttgcatcctacattaattatctagtttaattaatctgtaatgctttcgatagtgttaacttgctgcagtatgaaaataagacggatttatttttccatttacaacaaacacctgtgctctgttgagccttcctttctgtttgggtagagggctcccctaatgacatcaccacagtttaataccacagctttttaccaagtttcaggtattaagaaaatctattttgtaactttctctatgaactctgttttctttctaatgagatattaaaccatgtaaagaacataaataacaaatctcaagcaaacagcttcacaaattctcacacacatacatacctatatactcactttctagattaagatatgggacatttttgactccctagaagccccgttataactcctcctagtactaactcctaggaaaatactattctgacctccatgactgcacagtaatttcgtctgtttataaacattgtatagttggaatcatattgtgtgtaatgttgtatgtcttgcttactcagaattaagtctgtgagattcattcatgtcatgtgtacaaaagtttcatccttttcattgccatgtagggttcccttatattaatattcctcagttcatccattctattgttaataggcacttaagtggcttccaatttttggccatgaggaagagaacccacgaacattcctggacttgtcttttggtggacatggtgcactaatttcactacctatccaggagtggaactggtagaggatgaggaaagcatgtattcagctttagtagatattaccagttttcctaagtgattgtatgaatttatgctcctaccggcaatgtgtggcagtcctagatgctctatgtgcttgtaaaaagtcaatgttttcagttctcttgattttcattattcctgtggatgtaaagtgatatttccccatggttttaatctgtatttccccaacatgtaataaggttgaacacttttttatatgcttattgggcacttgggtatcttcttctgtgaagtacccgttcacatttttgtattttgtttaaattagttagccaatatttttcttactgatttttaagttatttttacattctgaatatgtcctttttaatgtgtattacaaatattttgctagtttttgacttgctcctaatgttgaattttgatgaacaaaatttcctaattttgagaaagtcttatttattcatattttctttcaaaattagtgctttttgtgtcatgtttaagaaatttttgcccatcccaaaatcataagatatttttcatgattttgaaaccatgaagagatttttcatgattttgaaatcatgaagatatttttccatttttttctaatagttttattaataaacattctatctattcctggtagaatagatatccacttgagacagcactatgtaggaaagaccatttttcctccactgaactagggtggtgcatttttgtaagttaggtaactgtatgtgtgtgtgtctgtttctgggctgtctattctagtctatttgttgatgcttgtgtcaaacagtacactatcttaattattgtacatttatagttgtaactgtagtccagctttgttcttcttcaagtcaagatttccatataaatattagaaacagtttctcaatttctacaaaatcctgatgaggtttctactgggaccacattgagtctatcaatcaacttatgcagaactggcaacttactactgaatctctaatcaatgttcatcatgtatcgcttcatttaactaggatttctttaacttaattgctatgttttgacatttttagtttaaaaaccttgtatatcttgttttggtggttttagtgattttaataatatattttaaatattttttcttttctattgttgtacacagaaatacagttaagttttgtgtgtagtcttacgatgtttagtaacctcaataagtttatttcttaaatctagtaatttgtagattcctctggattttgtatatgcatagtcatgtaagctgaaaatatggcaatacttgcttcttcccaattgctttaccttttttcttaccttattgcactggttagcaaccccaatacagagaccaccagatcaggtatagactcctgaaagacaatataatgaagtgctccagtcaggcctatctaaactggattcacagctctgtcacttaattgctacatgatctagagccagttactttgtgtttcagccatgtatttgcagctgagagaaaataatcattcttatttcatgaaaattgtggggatgatgaaataagttaacacctttaaagtgtgtagtaaagtatcaggatactatattttaggtcttaatacacacagttatgccgctagatacatgctttttaatgagataatgtgatattatacataacacatatcgatttttaaaaattaaatcaaccttgctttgatggaataaactccatttagtcac

SEQ ID NO: 734107 - DNA, 3514 bp, Homo sapiens; identical to SEQ ID NO: 92316

SEQ ID NO: 734108 - DNA, 3514 bp, Homo sapiens; identical to SEQ ID NO: 92313

SEQ ID NO: 734109 - DNA, 3460 bp, Homo sapiens
ggtaaatatgtgttcattaactgagattaaccttccctgagttttctcacaccaaggtgaggaccatgtccctgtttccatcactccctctccttctcctgagtatggtggcagcgtcttactcagaaactgtgacctgtgaggatgcccaaaagacctgccctgcagtgattgcctgtagctctccaggcatcaacggcttcccaggcaaagatgggcgtgatggcaccaagggagaaaagggggaaccaggccaagggctcagaggcttacagggcccccctggaaagttggggcctccaggaaatccagggccttctgggtcaccaggaccaaagggccaaaaaggagaccctggaaaaagtccggatggtgatagtagcctggctgcctcagaaagaaaagctctgcaaacagaaatggcacgtatcaaaaagtggctgaccttctctctgggcaaacaagttgggaacaagttcttcctgaccaatggtgaaataatgacctttgaaaaagtgaaggccttgtgtgtcaagttccaggcctctgtggccacccccaggaatgctgcagagaatggagccattcagaatctcatcaaggaggaagccttcctgggcatcactgatgagaagacagaagggcagtttgtggatctgacaggaaatagactgacctacacaaactggaacgagggtgaacccaacaatgctggttctgatgaagattgtgtattgctactgaaaaatggccagtggaatgacgtcccctgctccacctcccatctggccgtctgtgagttccctatctgaagggtcatatcactcaggccctccttgtctttttactgcaacccacaggcccacagtatgcttgaaaagataaattatatcaatttcctcatatccagtattgttccttttgtgggcaatcactaagcagcagtagtagtcatgctaattatataatatttttaatatatactatgaggccctatcttttgcatcctacattaattatctagtttaattaatctgtaatgctttcgatagtgttaacttgctgcagtatgaaaataagacggatttatttttccatttacaacaaacacctgtgctctgttgagccttcctttctgtttgggtagagggctcccctaatgacatcaccacagtttaataccacagctttttaccaagtttcaggtattaagaaaatctattttgtaactttctctatgaactctgttttctttctaatgagatattaaaccatgtaaagaacataaataacaaatctcaagcaaacagcttcacaaattctcacacacatacatacctatatactcactttctagattaagatatgggacatttttgactccctagaagccccgttataactcctcctagtactaactcctaggaaaatactattctgacctccatgactgcacagtaatttcgtctgtttataaacattgtatagttggaatcatattgtgtgtaatgttgtatgtcttgcttactcagaattaagtctgtgagattcattcatgtcatgtgtacaaaagtttcatccttttcattgccatgtagggttcccttatattaatattcctcagttcatccattctattgttaataggcacttaagtggcttccaatttttggccatgaggaagagaacccacgaacattcctggacttgtcttttggtggacatggtgcactaatttcactacctatccaggagtggaactggtagaggatgaggaaagcatgtattcagctttagtagatattaccagttttcctaagtgattgtatgaatttatgctcctaccggcaatgtgtggcagtcctagatgctctatgtgcttgtaaaaagtcaatgttttcagttctcttgattttcattattcctgtggatgtaaagtgatatttccccatggttttaatctgtatttccccaacatgtaataaggttgaacacttttttatatgcttattgggcacttgggtatcttcttctgtgaagtacccgttcacatttttgtattttgtttaaattagttagccaatatttttcttactgatttttaagttatttttacattctgaatatgtcctttttaatgtgtattacaaatattttgctagtttttgacttgctcctaatgttgaattttgatgaacaaaatttcctaattttgagaaagtcttatttattcatattttctttcaaaattagtgctttttgtgtcatgtttaagaaatttttgcccatcccaaaatcataagatatttttcatgattttgaaaccatgaagagatttttcatgattttgaaatcatgaagatatttttccatttttttctaatagttttattaataaacattctatctattcctggtagaatagatatccacttgagacagcactatgtaggaaagaccatttttcctccactgaactagggtggtgcatttttgtaagttaggtaactgtatgtgtgtgtgtctgtttctgggctgtctattctagtctatttgttgatgcttgtgtcaaacagtacactatcttaattattgtacatttatagttgtaactgtagtccagctttgttcttcttcaagtcaagatttccatataaatattagaaacagtttctcaatttctacaaaatcctgatgaggtttctactgggaccacattgagtctatcaatcaacttatgcagaactggcaacttactactgaatctctaatcaatgttcatcatgtatcgcttcatttaactaggatttctttaacttaattgctatgttttgacatttttagtttaaaaaccttgtatatcttgttttggtggttttagtgattttaataatatattttaaatattttttcttttctattgttgtacacagaaatacagttaagttttgtgtgtagtcttacgatgtttagtaacctcaataagtttatttcttaaatctagtaatttgtagattcctctggattttgtatatgcatagtcatgtaagctgaaaatatggcaatacttgcttcttcccaattgctttaccttttttcttaccttattgcactggttagcaaccccaatacagagaccaccagatcaggtatagactcctgaaagacaatataatgaagtgctccagtcaggcctatctaaactggattcacagctctgtcacttaattgctacatgatctagagccagttactttgtgtttcagccatgtatttgcagctgagagcctttaaagtgtgtagtaaagtatcaggatactatattttaggtcttaatacacacagttatgccgctagatacatgctttttaatgagataatgtgatattatacataacacatatcgatttttaaaaattaaatcaaccttgctttgatggaataaactccatttagtcac

SEQ ID NO: 734110 - DNA, 3208 bp, Homo sapiens
gccaagggctcagaggcttacagggcccccctggaaagttggggcctccaggaaatccagggccttctgggtcaccaggaccaaagggccaaaaaggagaccctggaaaaagtccggatggtgatagtagcctggctgcctcagaaagaaaagctctgcaaacagaaatggcacgtatcaaaaagtggctgaccttctctctgggcaaacaagttgggaacaagttcttcctgaccaatggtgaaataatgacctttgatgctgcagagaatggagccattcagaatctcatcaaggaggaagccttcctgggcatcactgatgagaagacagaagggcagtttgtggatctgacaggaaatagactgacctacacaaactggaacgagggtgaacccaacaatgctggttctgatgaagattgtgtattgctactgaaaaatggccagtggaatgacgtcccctgctccacctcccatctggccgtctgtgagttccctatctgaagggtcatatcactcaggccctccttgtctttttactgcaacccacaggcccacagtatgcttgaaaagataaattatatcaatttcctcatatccagtattgttccttttgtgggcaatcactaaaaatgatcactaacagcaccaacaaagcaataatagtagtagtagtagttagcagcagcagtagtagtcatgctaattatataatatttttaatatatactatgaggccctatcttttgcatcctacattaattatctagtttaattaatctgtaatgctttcgatagtgttaacttgctgcagtatgaaaataagacggatttatttttccatttacaacaaacacctgtgctctgttgagccttcctttctgtttgggtagagggctcccctaatgacatcaccacagtttaataccacagctttttaccaagtttcaggtattaagaaaatctattttgtaactttctctatgaactctgttttctttctaatgagatattaaaccatgtaaagaacataaataacaaatctcaagcaaacagcttcacaaattctcacacacatacatacctatatactcactttctagattaagatatgggacatttttgactccctagaagccccgttataactcctcctagtactaactcctaggaaaatactattctgacctccatgactgcacagtaatttcgtctgtttataaacattgtatagttggaatcatattgtgtgtaatgttgtatgtcttgcttactcagaattaagtctgtgagattcattcatgtcatgtgtacaaaagtttcatccttttcattgccatgtagggttcccttatattaatattcctcagttcatccattctattgttaataggcacttaagtggcttccaatttttggccatgaggaagagaacccacgaacattcctggacttgtcttttggtggacatggtgcactaatttcactacctatccaggagtggaactggtagaggatgaggaaagcatgtattcagctttagtagatattaccagttttcctaagtgattgtatgaatttatgctcctaccggcaatgtgtggcagtcctagatgctctatgtgcttgtaaaaagtcaatgttttcagttctcttgattttcattattcctgtggatgtaaagtgatatttccccatggttttaatctgtatttccccaacatgtaataaggttgaacacttttttatatgcttattgggcacttgggtatcttcttctgtgaagtacccgttcacatttttgtattttgtttaaattagttagccaatatttttcttactgatttttaagttatttttacattctgaatatgtcctttttaatgtgtattacaaatattttgctagtttttgacttgctcctaatgttgaattttgatgaacaaaatttcctaattttgagaaagtcttatttattcatattttctttcaaaattagtgctttttgtgtcatgtttaagaaatttttgcccatcccaaaatcataagatatttttcatgattttgaaaccatgaagagatttttcatgattttgaaatcatgaagatatttttccatttttttctaatagttttattaataaacattctatctattcctggtagaatagatatccacttgagacagcactatgtaggaaagaccatttttcctccactgaactagggtggtgcatttttgtaagttaggtaactgtatgtgtgtgtgtctgtttctgggctgtctattctagtctatttgttgatgcttgtgtcaaacagtacactatcttaattattgtacatttatagttgtaactgtagtccagctttgttcttcttcaagtcaagatttccatataaatattagaaacagtttctcaatttctacaaaatcctgatgaggtttctactgggaccacattgagtctatcaatcaacttatgcagaactggcaacttactactgaatctctaatcaatgttcatcatgtatcgcttcatttaactaggatttctttaacttaattgctatgttttgacatttttagtttaaaaaccttgtatatcttgttttggtggttttagtgattttaataatatattttaaatattttttcttttctattgttgtacacagaaatacagttaagttttgtgtgtagtcttacgatgtttagtaacctcaataagtttatttcttaaatctagtaatttgtagattcctctggattttgtatatgcatagtcatgtaagctgaaaatatggcaatacttgcttcttcccaattgctttaccttttttcttaccttattgcactggttagcaaccccaatacagagaccaccagatcaggtatagactcctgaaagacaatataatgaagtgctccagtcaggcctatctaaactggattcacagctctgtcacttaattgctacatgatctagagccagttactttgtgtttcagccatgtatttgcagctgagagcctttaaagtgtgtagtaaagtatcaggatactatattttaggtcttaatacacacagttatgccgctagatacatgctttttaatgagataatgtgatattatacataacacatatcgatttttaaaaattaaatcaaccttgctttgatggaataaactccatttagtcac

SEQ ID NO: 734111 - DNA, 3208 bp, Homo sapiens
gccaagggctcagaggcttacagggcccccctggaaagttggggcctccaggaaatccagggccttctgggtcaccaggaccaaagggccaaaaaggagaccctggaaaaagtccggatggtgatagtagcctggctgcctcagaaagaaaagctctgcaaacagaaatggcacgtatcaaaaagtggctgaccttctctctgggcaaacaagttgggaacaagttcttcctgaccaatggtgaaataatgacctttgatgctgcagagaatggagccattcagaatctcatcaaggaggaagccttcctgggcatcactgatgagaagacagaagggcagtttgtggatctgacaggaaatagactgacctacacaaactggaacgagggtgaacccaacaatgctggttctgatgaagattgtgtattgctactgaaaaatggccagtggaatgacgtcccctgctccacctcccatctggccgtctgtgagttccctatctgaagggtcatatcactcaggccctccttgtctttttactgcaacccacaggcccacagtatgcttgaaaagataaattatatcaatttcctcatatccagtattgttccttttgtgggcaatcactaagcagcagtagtagtcatgctaattatataatatttttaatatatactatgaggccctatcttttgcatcctacattaattatctagtttaattaatctgtaatgctttcgatagtgttaacttgctgcagtatgaaaataagacggatttatttttccatttacaacaaacacctgtgctctgttgagccttcctttctgtttgggtagagggctcccctaatgacatcaccacagtttaataccacagctttttaccaagtttcaggtattaagaaaatctattttgtaactttctctatgaactctgttttctttctaatgagatattaaaccatgtaaagaacataaataacaaatctcaagcaaacagcttcacaaattctcacacacatacatacctatatactcactttctagattaagatatgggacatttttgactccctagaagccccgttataactcctcctagtactaactcctaggaaaatactattctgacctccatgactgcacagtaatttcgtctgtttataaacattgtatagttggaatcatattgtgtgtaatgttgtatgtcttgcttactcagaattaagtctgtgagattcattcatgtcatgtgtacaaaagtttcatccttttcattgccatgtagggttcccttatattaatattcctcagttcatccattctattgttaataggcacttaagtggcttccaatttttggccatgaggaagagaacccacgaacattcctggacttgtcttttggtggacatggtgcactaatttcactacctatccaggagtggaactggtagaggatgaggaaagcatgtattcagctttagtagatattaccagttttcctaagtgattgtatgaatttatgctcctaccggcaatgtgtggcagtcctagatgctctatgtgcttgtaaaaagtcaatgttttcagttctcttgattttcattattcctgtggatgtaaagtgatatttccccatggttttaatctgtatttccccaacatgtaataaggttgaacacttttttatatgcttattgggcacttgggtatcttcttctgtgaagtacccgttcacatttttgtattttgtttaaattagttagccaatatttttcttactgatttttaagttatttttacattctgaatatgtcctttttaatgtgtattacaaatattttgctagtttttgacttgctcctaatgttgaattttgatgaacaaaatttcctaattttgagaaagtcttatttattcatattttctttcaaaattagtgctttttgtgtcatgtttaagaaatttttgcccatcccaaaatcataagatatttttcatgattttgaaaccatgaagagatttttcatgattttgaaatcatgaagatatttttccatttttttctaatagttttattaataaacattctatctattcctggtagaatagatatccacttgagacagcactatgtaggaaagaccatttttcctccactgaactagggtggtgcatttttgtaagttaggtaactgtatgtgtgtgtgtctgtttctgggctgtctattctagtctatttgttgatgcttgtgtcaaacagtacactatcttaattattgtacatttatagttgtaactgtagtccagctttgttcttcttcaagtcaagatttccatataaatattagaaacagtttctcaatttctacaaaatcctgatgaggtttctactgggaccacattgagtctatcaatcaacttatgcagaactggcaacttactactgaatctctaatcaatgttcatcatgtatcgcttcatttaactaggatttctttaacttaattgctatgttttgacatttttagtttaaaaaccttgtatatcttgttttggtggttttagtgattttaataatatattttaaatattttttcttttctattgttgtacacagaaatacagttaagttttgtgtgtagtcttacgatgtttagtaacctcaataagtttatttcttaaatctagtaatttgtagattcctctggattttgtatatgcatagtcatgtaagctgaaaatatggcaatacttgcttcttcccaattgctttaccttttttcttaccttattgcactggttagcaaccccaatacagagaccaccagatcaggtatagactcctgaaagacaatataatgaagtgctccagtcaggcctatctaaactggattcacagctctgtcacttaattgctacatgatctagagccagttactttgtgtttcagccatgtatttgcagctgagagaaaataatcattcttatttcatgaaaattgtggggatgatgaaataagttaacacctttaaagtgtgtagtaaagtatcaggatactatattttaggtcttaatacacacagttatgccgctagatacatgctttttaatgagataatgtgatattatacataacacatatcgatttttaaaaattaaatcaaccttgctttgatggaataaactccatttagtcac

SEQ ID NO: 734112 - DNA, 3154 bp, Homo sapiens
gccaagggctcagaggcttacagggcccccctggaaagttggggcctccaggaaatccagggccttctgggtcaccaggaccaaagggccaaaaaggagaccctggaaaaagtccggatggtgatagtagcctggctgcctcagaaagaaaagctctgcaaacagaaatggcacgtatcaaaaagtggctgaccttctctctgggcaaacaagttgggaacaagttcttcctgaccaatggtgaaataatgacctttgatgctgcagagaatggagccattcagaatctcatcaaggaggaagccttcctgggcatcactgatgagaagacagaagggcagtttgtggatctgacaggaaatagactgacctacacaaactggaacgagggtgaacccaacaatgctggttctgatgaagattgtgtattgctactgaaaaatggccagtggaatgacgtcccctgctccacctcccatctggccgtctgtgagttccctatctgaagggtcatatcactcaggccctccttgtctttttactgcaacccacaggcccacagtatgcttgaaaagataaattatatcaatttcctcatatccagtattgttccttttgtgggcaatcactaagcagcagtagtagtcatgctaattatataatatttttaatatatactatgaggccctatcttttgcatcctacattaattatctagtttaattaatctgtaatgctttcgatagtgttaacttgctgcagtatgaaaataagacggatttatttttccatttacaacaaacacctgtgctctgttgagccttcctttctgtttgggtagagggctcccctaatgacatcaccacagtttaataccacagctttttaccaagtttcaggtattaagaaaatctattttgtaactttctctatgaactctgttttctttctaatgagatattaaaccatgtaaagaacataaataacaaatctcaagcaaacagcttcacaaattctcacacacatacatacctatatactcactttctagattaagatatgggacatttttgactccctagaagccccgttataactcctcctagtactaactcctaggaaaatactattctgacctccatgactgcacagtaatttcgtctgtttataaacattgtatagttggaatcatattgtgtgtaatgttgtatgtcttgcttactcagaattaagtctgtgagattcattcatgtcatgtgtacaaaagtttcatccttttcattgccatgtagggttcccttatattaatattcctcagttcatccattctattgttaataggcacttaagtggcttccaatttttggccatgaggaagagaacccacgaacattcctggacttgtcttttggtggacatggtgcactaatttcactacctatccaggagtggaactggtagaggatgaggaaagcatgtattcagctttagtagatattaccagttttcctaagtgattgtatgaatttatgctcctaccggcaatgtgtggcagtcctagatgctctatgtgcttgtaaaaagtcaatgttttcagttctcttgattttcattattcctgtggatgtaaagtgatatttccccatggttttaatctgtatttccccaacatgtaataaggttgaacacttttttatatgcttattgggcacttgggtatcttcttctgtgaagtacccgttcacatttttgtattttgtttaaattagttagccaatatttttcttactgatttttaagttatttttacattctgaatatgtcctttttaatgtgtattacaaatattttgctagtttttgacttgctcctaatgttgaattttgatgaacaaaatttcctaattttgagaaagtcttatttattcatattttctttcaaaattagtgctttttgtgtcatgtttaagaaatttttgcccatcccaaaatcataagatatttttcatgattttgaaaccatgaagagatttttcatgattttgaaatcatgaagatatttttccatttttttctaatagttttattaataaacattctatctattcctggtagaatagatatccacttgagacagcactatgtaggaaagaccatttttcctccactgaactagggtggtgcatttttgtaagttaggtaactgtatgtgtgtgtgtctgtttctgggctgtctattctagtctatttgttgatgcttgtgtcaaacagtacactatcttaattattgtacatttatagttgtaactgtagtccagctttgttcttcttcaagtcaagatttccatataaatattagaaacagtttctcaatttctacaaaatcctgatgaggtttctactgggaccacattgagtctatcaatcaacttatgcagaactggcaacttactactgaatctctaatcaatgttcatcatgtatcgcttcatttaactaggatttctttaacttaattgctatgttttgacatttttagtttaaaaaccttgtatatcttgttttggtggttttagtgattttaataatatattttaaatattttttcttttctattgttgtacacagaaatacagttaagttttgtgtgtagtcttacgatgtttagtaacctcaataagtttatttcttaaatctagtaatttgtagattcctctggattttgtatatgcatagtcatgtaagctgaaaatatggcaatacttgcttcttcccaattgctttaccttttttcttaccttattgcactggttagcaaccccaatacagagaccaccagatcaggtatagactcctgaaagacaatataatgaagtgctccagtcaggcctatctaaactggattcacagctctgtcacttaattgctacatgatctagagccagttactttgtgtttcagccatgtatttgcagctgagagcctttaaagtgtgtagtaaagtatcaggatactatattttaggtcttaatacacacagttatgccgctagatacatgctttttaatgagataatgtgatattatacataacacatatcgatttttaaaaattaaatcaaccttgctttgatggaataaactccatttagtcac

SEQ ID NO: 734113 - DNA, 797 bp, Homo sapiens
aaaatatttaagggcctaccacatcagtgaagattttaaggctcagtgttgtaccttgaacaacctatcattaaaaaagaggtgcaaaactgtgcccaaaattcatgaccccagaagcttaaattttggaggcagcatttacttcacttgacaacgatatattcagttgctttataggctgactcacagataccagtttagagtggtatctagagcaaaaataaataataaataaatatgctctgcagcaagtttaaactttgatttaagctgtcctttattttggccatatcacctggcaggtcctatggaattacagaggtcatggtaggttaattatgctgagcatcgtctctagtaagtcccagggagagagatgctgggtagaccagtaggcttctgaaacaaagccatgccctctatagcagagaactttattatttatttatttatttatggctctttaaagatctagaagaccatcaactttatttgaatcatatgtcaaacacacacacacacacacacacacacacacacacacccctacaaaacaatctgagaaatctgaacattgactggatatttgacagccttaggaatgattattaaagatgtgatcatagaattgtgattacatttttattcaacaggtttttggggaacaggtggtgtttggtgatgttaataagttatttattggtgatttctgagattttaatgcttccatcacccgagcagtgtacccgtacccaatgcatagtcttttatccctcaccccatttcccacactttct

SEQ ID NO: 734114 - DNA, 808 bp, Homo sapiens; identical to SEQ ID NO: 33589

SEQ ID NO: 734115 - DNA, 906 bp, Homo sapiens
aatgttgctttatataataggtctgtttctcttaagtgtgcaaaataaatttttgtaaattgagctatacttaagatattgttaaagaaccatgaagtggctctttgtgtaatttgctgtgtaaaaatcttaatctgatttcttataagtttttctgcattttaactgcaacctgttcatcataatctaatagatagtggtttaagagcatagaatctgtagtcagactgcctgggttcaaatccaggctcttccatttagctaccagctttatgcttggttgtagatcctgttaagtaggaataatagtagttactttaaaaggttattgagaaaatctagagagttaatgcataaaaagtgtttagaatcatgcatggccccttacaggtatttcttacatgtttggggctatcattacctagcatgggatttgtttaggacattgtgctagataatagagatccaaggagggtctgtagccaggttgctgcccacaagaggcttgtgggaacatagtttggttaaatcttacaaggacattggaagccttactctttttaagtggggatcatcccacacgccttaaatgctgccttgtccggttatcctcttgcaccaggagtgaggaaggagtgaattgggtggtggggtaaagatggccaccttggttcacacccccttcctctgctatatctttgcagtatgacttctctttggaaaagaaaaccattgagtgggctgaagagattaagaaaatcgaagaagccgagcgggaagcagagtgcaaaattgcggaagcagaagctaaagtgaattctaagagtgccagagggcgatagcaaaatgagcttctccaagactcacagtacagccacaatgccacctcctattaaccccatccac

SEQ ID NO: 734116 - DNA, 574 bp, Homo sapiens; identical to SEQ ID NO: 728859

SEQ ID NO: 734117 - DNA, 433 bp, Homo sapiens
ggtcggtccacagcttcctcaagccaagctccccaggcccaggtcaggcctcacggtggcctctccaggatgagctcctgccctccgatggcatctccaggccccaaatggtctccggtcggtgggctcctccacgccaaggttgggcctcccggcgaccgcccaggccaagttgtcctgaagtcgggctctcccggctgcatctccaggccggactctggcccgactccaggtcccaacaacgtctttggactcagctcctgcccagctcccagcggccctggtaggcccacaacttccctaagccaagctccccaggcccagctcaggcctcgcggtggcctctccaggctcagctcctgggccctccgatgacatcttgcaggccccaaatggcttccggtcggtggggttcctctaggcccagcttggg

SEQ ID NO: 734118 - DNA, 1556 bp, Homo sapiens
ctttcaatagaaatgtcttcttgccttaggaaaataaagggctaggaaaggtcactgcgttgataaaaaccaatagacgacagggacaaaagtgagatcagataggaggagaacaaccagactgaagactcaacataagctgttattggtaagtgactcaaaggggagttttgaaaattaccaggatgtttaatagtcaggtctcaaagactgagtatgttgtatgggctaaaggaagcctaaagaatcatttcgttgtatggaagagatgaatgaacctggacagtagggataagtaagacaggagcctaatcttttggagatgaaagctcctgcttctgcaaaaatcccttctgaagtgtggaaacgcatctaggaccagggttctcaacacctagaccatgacttctaggtcactgatgccatggtaacaaaaccaagtaaatctaagctcatttgagaattttagatcctcttatgttaacaatgtgactttgaaaaataaaagcagaccatgggaatgagtccagatgggcagctttgcaggagtgtagacatgtggtattctgttgaagaaagagagggtcgttgagggagagttgaatgtcttgcaaaggcagagttccacacaatggatttagggtttctcagtgagtcctttctaaatgcttgttatatcctggtcataatgcatatgggttcactgagtcctctggtcactttccactggggatttttatctgagctcccgagtcagagctgggcatagactctggttcttcatgaggagtgctgtatttgctctgtaacctgggagacatttgttccctagtcgtgcagcacatggtattgtgtttcctgacctaggcaagtgcccatgctcagtacagaaccataagttggtagcagcttctcctttctggccaaatgatgggccctgtccctctgatgagtgcatttcatgttgtgtttccaattttcatcagcaatgttcgtcattccctggtcctttgaaagactgtgtagcccgcggttatggagccgggatgaatctgatgatcatcatcttctccaataacagatgccatttttaacttcaatatgctgtctggacatagtgagaactaatggcaataaacgtccagctgcatggtgcacctcttttttataggggtgccctgctgtctttgtaaaccctcctctggcctctgagcatctattataattgtgtagaaagtacatctctatattgtaaataagagtgtcgagtgttgcgtgtcatgcctcatttgaaaaggtcttttttatgtctctttctattgaaatatagatatcgaatatataaatatatatacataaaatatatataaatatatattatgtaaaacagggacattctattattgattgtaaaaattataaacaaaatgcctgccaagataatggtcttgtatgtcttcattctctgcgtaatttttgtttttgtttttatgatttgttgtttcccaaaatgagttagaaataaaaatgcccaatattgagattaattggaattt

SEQ ID NO: 734119 - DNA, 562 bp, Homo sapiens; identical to SEQ ID NO: 382548

SEQ ID NO: 734120 - DNA, 735 bp, Homo sapiens; identical to SEQ ID NO: 382549

SEQ ID NO: 734121 - DNA, 464 bp, Homo sapiens; identical to SEQ ID NO: 382550

SEQ ID NO: 734122 - DNA, 395 bp, Homo sapiens
tgagatgaacccggtacctcagatggaaatgctgaaatcacccgtcttctgcgtcgctcaggctgggagctgtagaccggagctgttcctattcggccatcttgtctcctccccccagcccacaacagcctatgaagaataactagaggtcttcatatcagaggcagaaggtactgcaagcttactttccaacgtggctgcatcgtttcacattcccaccagcagtatgaggtttccaatttctctgcatcctcatcaaaacttgttattatctgtcttttttattttagacgttctagaaggtgtggagtggtatctcattgtggtattgatttgcatttccttaaggactaatgcttttgaacattttttcatgtgcttattggccatttgtg

SEQ ID NO: 734123 - DNA, 464 bp, Homo sapiens; identical to SEQ ID NO: 382551

SEQ ID NO: 734124 - DNA, 368 bp, Homo sapiens
tgagatgaacccggtacctcagatggaaatgctgaaatcacccgtcttctgcgtcgctcaggctgggagctgtagaccggagctgttcctattcggccatcttgtctcctccccccaggtgatggccacagtggcagaacctaggaagccaagaagaaaccagagaatggagacacatggcagcaatggcaagtcatcagacccaggatttcccaaagaacactggtccaggaagatgctctgtgaaaaagtgttccctggtcggagaaatttgtgaaacactttgcataatacttaaaagaatgtatggcacatcaaaggtaatatgcaataaaagaattcatttttttaaaaccaagaatatgcac

SEQ ID NO: 734125 - DNA, 845 bp, Homo sapiens; identical to SEQ ID NO: 382553

SEQ ID NO: 734126 - DNA, 679 bp, Homo sapiens
gtttgtttttcctctctgtcatacctcaagaggaacacaaagagtgatggcctgtcactctgatgcctctctctactcaaatggcagaaaccaaccaggtacatcccagccttcttgcacatagaaacactacacagcacttcagctgtatgtttgggggccattttaaacagcaaaatcatcaacaggaagcagaaaattgtaaaaattgtggcactaaatagaccatgtaaaggacacatgtttgcaataagaaagctgaaacaagaagggggagtgtcaccttatttgatccagctagaaactcaggtgctggtattccagcaacactcaggcggctgctccaggaggctgcagaggggtcctttttagccgtcaacaaaactggctatggtcacgcccattgggaaactcattgctgccttcaaggtgatggccacagtggcagaacctaggaagccaagaagaaaccagagaatggagacacatggcagcaatggcaagtcatcagacccaggatttcccaaagaacactggtccaggaagatgctctgtgaaaaagtgttccctggtcggagaaatttgtgaaacactttgcataatacttaaaagaatgtatggcacatcaaaggtaatatgcaataaaagaattcatttttttaaaaccaagaatatgcac

SEQ ID NO: 734127 - DNA, 722 bp, Homo sapiens
aaaatcccaagcagaaaattcagtcattcaagagaaaagtcattaaagaaaaaggaaaaaatagagaacagaaaagcagacatttagtttttccttaggcgtgacaaagcttaacaaacagtcagttctgcagaaatgctcccagttttcctggtgtcccaagccctcgctctgtttggagactaccacagcctctgtacttctcagctttgtgggtctgggaggcacttttgcttcggaattggggtgaaggctttctaggtcctgattaacagaatctgaactgctcccacctgtcttccctgcagtcctccacccagcagccagggggaattgctttaaaactccaagcagatcatgtcgtctcttggttaaactcttcagtggcttccatgcgaacttctcacctgggttctctgtgctttggtggggcctacctctgagcccagagcttacactccctcctctcaacacactccactcttggttccttgaatgaactaagttcatcccctccttagggcttccagaacattctgtcccatatcttcacatggtttcttcttaccattcaggtctcacctcaaaaatcacttcttccagctgggcgtggtggctcacacctataatcccagcactttgggaggctgaggcaggaagatcgcttgaggccaggagttggagaccaatctggtcaacatagtgagagcccacctctacaa

SEQ ID NO: 734128 - DNA, 967 bp, Homo sapiens
gaaagaaggaaagaaagaaagaaaagaaaagaaataacaagatatagtgagtcagtagattcacttcacaattgtggtactaaataactaaatataagctatctacatataatagtaagaaaaagtttgaagaaaattatataacactttaaaatcaatcataatagactatttatgtagttataggtccctagcaagtttctggataggaagattgagtactattaaacacaatgtgtcttcttcaattatttgatagagtaactggtgggataattacaatgaaaaatctgctacttttacaaaaactttaaaataaattcaaatttatctaggaattaatagtagacatttggttcagaaaaaagaagatcagggagtgaaaaatgtagctgtcaggtaagtggggtagcatgcacagaattttatcataagttgtaatattcataacattattagcagatgcatttacaaaacaaagaaattcaaaagtagactttagtatgtataacatttaatgtgtaacaatttcagtattgtacattcttagaggaaacacctaattatggaataaatagcattagccaactaatcagaaataaatgactaacaattcaactttatatcctgtattagtcagggttctctaaagcaagagaaataatagtatatatgtgtatataaaagtgagtttattaggagaattgactcacacggtcacaggatgaagttccacactaggccatttgcaagctgaggagccaggaagccagtccaagtcccaaaaccccaaaagtagggaagctgaccatatagccttcagtctgtggccaaaagcctgagagcccctgacaaatcactggtgtgagtccaagagttcaaaagctaaggaacctggaagtcggatgtttgagggcagaaagtatccagcatgggagaaagatgaaggctgaaagactcagcaagt

SEQ ID NO: 734129 - DNA, 718 bp, Homo sapiens
cttgagactgagtcttgctctgtcacccaggctggagtgcagtggcgtgatctcggctcactgcaagctccgcctgggcaacagagcaagactccgtctcaaaaataagaaataaaaataaaataaaaattactcttccaagttgttgataaacatccttttctttattcttcttcaagatttattttcttggccttcccaagctgctttcgcagactttctgcctggctctttcaaatccacagcagcccctctctttatatgcccaccttcctttcttaaacacgcacacattctccaagcagtgcctgacagccttctttgcatcaaggagcacttacaaatgatccagagaccgaggagaatactgtctaggcacacctgctggagactcctccccgaaactctccaacatccctcttgccagatacaatcaacatgtgaagataatgaagaccaagaaaaaagcctcctagggcataggatacagctgatcctcctccctacattcagcgattggcctgctctgctctcgctcctccgacagcttcacctgctcctcttcatgttcctgtgcctgggtccagggctcatcctgttgtggtcgtggtgggcggcttcagccctttaggagcttcccttgggctctctcctcagggacagcttaaggagcaccagtgtgggagttcaccctttcagttcaaatgcagatcagtcc

SEQ ID NO: 734130 - DNA, 1061 bp, Homo sapiens
  misc_feature (34)..(34): n is a, c, g, or t
  misc_feature (54)..(54): n is a, c, g, or t
  misc_feature (56)..(56): n is a, c, g, or t
  misc_feature (62)..(62): n is a, c, g, or t
  misc_feature (164)..(164): n is a, c, g, or t
ggctgcaggatttttcacgagaaaaaacaaagcncttcaggtcaggagaatgtntnaatgtncattgccatcgaggttctgctatttttgagaagctgaagcaactccaaggacacagttcacagaaatttggttctcagccccaaaatactgattgaattggngacaattacaaggactctctggccaaaaacccttgaagaggccccgtgaaggaggcagtgaggagcttttgattgctgacctgtgtcgtaccaccccagaatgtgcactgggggctgtgccagatgcctgggggggaccctcattccccttgctttttttggcttcctggctaacatcctgttattttttcctggaggaaaagtgatagatgacaacgaccacctttcccaagagatctggtttttcggaggaatattaggaagcggtgtcttgatgatcttccctgcgctggtgttcttgggcctgaagaacaatgactgctgtgggtgctgcggcaacgagggctgtgggaagcgatttgcgatgttcacctccacgatatttgctgtggttggattcttgggagctggatactcgtttatcatctcagccatttcaatcaacaagggtcctaaatgcctcatggccaatagtacatggggctaccccttccacgacggggattatctcaatgatgaggccttatggaacaagtgccgagagcctctcaatgtggttccctggaatctgaccctcttctccatcctgctggtcgtaggaggaatccagatggttctctgcgccatccaggtggtcaatggcctcctggggaccctctgtggggactgccagtgttgtggctgctgtggggggagatggacccgtttaaacctccgagatgagctgctcagactttacagcatgacgactacaatttcttttctaaacttctcttttctgggattataaatcccaatcggttcctagctgaaaaagttaaaaaggccggttttcccttctttcaaccagtttggttgagtaaatttgtttttttaaaataaaaattgttggcgttt

SEQ ID NO: 734131 - DNA, 1007 bp, Homo sapiens
  misc_feature (34)..(34): n is a, c, g, or t
  misc_feature (54)..(54): n is a, c, g, or t
  misc_feature (56)..(56): n is a, c, g, or t
  misc_feature (62)..(62): n is a, c, g, or t
  misc_feature (164)..(164): n is a, c, g, or t
ggctgcaggatttttcacgagaaaaaacaaagcncttcaggtcaggagaatgtntnaatgtncattgccatcgaggttctgctatttttgagaagctgaagcaactccaaggacacagttcacagaaatttggttctcagccccaaaatactgattgaattggngacaattacaaggactctctggccaaaaacccttgaagaggccccgtgaaggaggcagtgaggagcttttgattgctgacctgtgtcgtaccaccccagaatgtgcactgggggctgtgccagatgcctgggggggaccctcattccccttgctttttttggcttcctggctaacatcctgttattttttcctggaggaatattaggaagcggtgtcttgatgatcttccctgcgctggtgttcttgggcctgaagaacaatgactgctgtgggtgctgcggcaacgagggctgtgggaagcgatttgcgatgttcacctccacgatatttgctgtggttggattcttgggagctggatactcgtttatcatctcagccatttcaatcaacaagggtcctaaatgcctcatggccaatagtacatggggctaccccttccacgacggggattatctcaatgatgaggccttatggaacaagtgccgagagcctctcaatgtggttccctggaatctgaccctcttctccatcctgctggtcgtaggaggaatccagatggttctctgcgccatccaggtggtcaatggcctcctggggaccctctgtggggactgccagtgttgtggctgctgtggggggagatggacccgtttaaacctccgagatgagctgctcagactttacagcatgacgactacaatttcttttctaaacttctcttttctgggattataaatcccaatcggttcctagctgaaaaagttaaaaaggccggttttcccttctttcaaccagtttggttgagtaaatttgtttttttaaaataaaaattgttggcgttt

SEQ ID NO: 734132 - DNA, 650 bp, Homo sapiens
cggaaagccatgtgaggacacagtgagaaggtgatgtctacaaaccaggaagaaaggcctcaagagaaaccaaccctcccctggcgccttgatcttgcatttccagcctccagaactatgttcacctccacgatatttgctgtggttggattcttgggagctggatactcgtttatcatctcagccatttcaatcaacaagggtcctaaatgcctcatggccaatagtacatggggctaccccttccacgacggggattatctcaatgatgaggccttatggaacaagtgccgagagcctctcaatgtggttccctggaatctgaccctcttctccatcctgctggtcgtaggaggaatccagatggttctctgcgccatccaggtggtcaatggcctcctggggaccctctgtggggactgccagtgttgtggctgctgtggggggagatggacccgtttaaacctccgagatgagctgctcagactttacagcatgacgactacaatttcttttctaaacttctcttttctgggattataaatcccaatcggttcctagctgaaaaagttaaaaaggccggttttcccttctttcaaccagtttggttgagtaaatttgtttttttaaaataaaaattgttggcgttt

SEQ ID NO: 734133 - DNA, 2826 bp, Homo sapiens; identical to SEQ ID NO: 48717

SEQ ID NO: 734134 - DNA, 513 bp, Homo sapiens
  misc_feature (418)..(418): n is a, c, g, or t
  misc_feature (463)..(463): n is a, c, g, or t
tctgttgcccaggctggagtacagtggcatgatctcggctcactacaacctctgtctcctgggttcaagcaattctcctgtctcagcctcccaagtagctgggactacaagacaggcatgcaccaccatgcccggctaatttttgtatttttagtagagacgggatttcattatattggccaggctagtctcgaactcctgaccttgtgatcctcctgcctcggcctcccaaagtgttgggattacaggcatgagccaccgtgcccagcaggctcattttttaactttgcaatattttaacttgacagaccatcgtttgatgtccattttaccaccgtctacattagttgaggtcctcaatatatcttctttatgaacctaagtctctttgatgtcaaagtattaaatatcattggtnatgcctgccagctacttggaaggctgaggtgggaggatcacttancccaggatttgaagccagactgggcaatgtagcaagtccccatgtcttaa

SEQ ID NO: 734135 - DNA, 549 bp, Homo sapiens
tgtagttacacaggtctgaattcaaaatccagctctgccacttggctgctgtgtgaacttaagcaagtcgggcaatgtttctgatgtttttttttcctcctccacaaagaataattaatatataacaatagggtctcagctagttgttttaaaaatggttagagagatgtgtggaatgaagtaagtgtgcagtaagtgttaactacaaatattattatcttagacatacagatttccatgattcatgaatggtgaagcatcttagaagacatccattccaggccaggcatgggggtgcgcacctatagtcccagttgctcagtagaatgaggcaggagaattgcttgagcctaggagtttgaggctagtatgggcaatatggtgagaccctatctcaagaaaaaagcaaaactttttttaaagtttaaaaagagagacatctgttccactactctcatcttagaggccagaaaactgaggctcagataatttcagagactttcacagatcccccaaccatttggtggcaaagccaggaatagaactctg

SEQ ID NO: 734136 - DNA, 705 bp, Homo sapiens
atcagaaggaaagaagaaatgatgaacccagatttccattacaggatcctgggaagcagagtgtctggatggaacctgagctgggtctctgactcacttctgactttagggtgaagatggagggaatctgataaagacatcttataaattcaacagacacaaaagaatttgatctcccataagcaactgtgaaattacaataacagatcctgggaagttctacaattctaattcaggtttacaagttttcttctcatctattcagtagatattttgtcgagtacctgtgctaggttcagctgtgcccccaaaacatgtacattcctaacttttattacctgtgaatgtgatctcatttgcaaatagggtctttgtacatgtaactgagttaagatgaggtcatactggattagggcagaccctaatccaatgaccgatgtccttatatgaagagggaaattagacacagagacacacagaggaaagacagctatgtgaagatggtatcagagaatagagtgatactgccacaagtcaaaggatgtcaagaattgctggcaaccaccaaatgctagaagagtccagaaaggattttctcttagagcctttgaaggaagtatggccctgttcttcttgattttggacttgtatcctccagaactgtgagataataaactcctgttgttttaggccactcagtttatg

SEQ ID NO: 734137 - DNA, 1605 bp, Homo sapiens
ttaattcatatttttgtgggtaaaatgttattacccttaatacaaagcaaagtttcagctggacttcgtttttacttaatcttcaatggaacattattgaagttacagtacaaaaattctctgaatgaacataataataagttgtaaaatatatatatctttataaagatatattattggatctttcacaaaaagtcatacaagtggggaaaaaagaaaaatatcagagtattgggatttgtccttgaatcttctcttttagctttctttcagttaaacctgtgtccacatgtttgtttctggattgaagccagaatcaacattgtccctatttctaatcaaataatggagaaataattacaaattcccaatgcagttacaggatcctgggaagcagagtgtctggatggaacctgagctgggtctctgactcacttctgactttagttttttcaagggggaacatggcaaaggtgttcagtttcatccttgttaccaccgctctgacaatgggcagggaaatttcggcgctcgaggactgtgcccaggagcagatgcggctcagagcccaggtgcgcctgcttgagacccgggtcaaacagcaacaggtcaagatcaagcagcttttgcaggagaatgaagtccagttccttgataaaggagatgagaatactgtcattgatcttggaagcaagaggcagtatgcagattgttcagagattttcaatgatgggtataagctcagtggattttacaaaatcaaacctctccagagcccagcagaattttctgtttattgtgacatgtccgatggaggaggatggactgtaattcagagacgatctgatggcagtgaaaactttaacagaggatggaaagactatgaaaatggctttggaaattttgtccaaaaacatggtgaatattggctgggcaataaaaatcttcacttcttgaccactcaagaagactacactttaaaaatcgaccttgcagattttgaaaaaaatagccgttatgcacaatataagaatttcaaagttggagatgaaaagaatttctacgagttgaatattggggaatattctggaacagctggagattcccttgcggggaattttcatcctgaggtgcagtggtgggctagtcaccaaagaatgaaattcagcacgtgggacagagatcatgacaactatgaagggaactgcgcagaagaagatcagtctggctggtggtttaacaggtgtcactctgcaaacctgaatggtgtatactacagcggcccctacacggctaaaacagacaatgggattgtctggtacacctggcatgggtggtggtattctctgaaatctgtggttatgaaaattaggccaaatgattttattccaaatgtaatttaattgctgctgttgggctttcgtttctgcaattcagctttgtttaaagtgatttgaaaaatactcattctgaacatatccatgcgcaatcatgataactgttgtgagtagtgcttttcattcttctcacttgcctttgttacttaatgtgctttcagtacagcagatatgcaatattcaccaaataaatgtagactgtgttaat

SEQ ID NO: 734138 - DNA, 619 bp, Homo sapiens
  misc_feature (31)..(31): n is a, c, g, or t
  misc_feature (39)..(39): n is a, c, g, or t
  misc_feature (41)..(41): n is a, c, g, or t
  misc_feature (43)..(43): n is a, c, g, or t
  misc_feature (47)..(48): n is a, c, g, or t
  misc_feature (51)..(51): n is a, c, g, or t
  misc_feature (53)..(53): n is a, c, g, or t
  misc_feature (56)..(56): n is a, c, g, or t
  misc_feature (65)..(65): n is a, c, g, or t
ggaattcgcgccgggggagagagtgagcgtnatgcacantntnagannttnanagntggagatgnaaagaatttctacgagttgaatattggggaatattctggaacagctggagattcccttgcggggaattttcatcctgaggtgcagtggtgggctagtcaccaaagaatgaaattcagcacgtgggacagagatcatgacaactatgaagggaactgcgcagaagaagatcagtctggctggtggtttaacaggtgtcactctgcaaacctgaatggtgtatactacagcggcccctacacggctaaaacagacaatgggattgtctggtacacctggcatgggtggtggtattctctgaaatctgtggttatgaaaattaggccaaatgattttattccaaatgtaatttaattgctgctgttgggctttcgtttctgcaattcagctttgtttaaagtgatttgaaaaatactcattctgaacatatccatgcgcaatcatgataactgttgtgagtagtgcttttcattcttctcacttgcctttgttacttaatgtgctttcagtacagcagatatgcaatattcaccaaataaatgtagactgtgttaat

SEQ ID NO: 734139 - DNA, 1356 bp, Homo sapiens
ttacaggatcctgggaagcagagtgtctggatggaacctgagctgggtctctgactcacttctgactttagggtgaagatggagggaatctgataaagacatcttataaattcaacagacacaaaagaatttgatctcccataagcaactgtgaaattacaataacagatcctgggaagttctacaattctaattcagttttttcaagggggaacatggcaaaggtgttcagtttcatccttgttaccaccgctctgacaatgggcagggaaatttcggcgctcgaggactgtgcccaggagcagatgcggctcagagcccaggtgcgcctgcttgagacccgggtcaaacagcaacaggtcaagatcaagcagcttttgcaggagaatgaagtccagttccttgataaaggagatgagaatactgtcattgatcttggaagcaagaggcagtatgcagattgttcagagattttcaatgatgggtataagctcagtggattttacaaaatcaaacctctccagagcccagcagaattttctgtttattgtgacatgtccgatggaggaggatggactgtaattcagagacgatctgatggcagtgaaaactttaacagaggatggaaagactatgaaaatggctttggaaattttgtccaaaaacatggtgaatattggctgggcaataaaaatcttcacttcttgaccactcaagaagactacactttaaaaatcgaccttgcagattttgaaaaaaatagccgttatgcacaatataagaatttcaaagttggagatgaaaagaatttctacgagttgaatattggggaatattctggaacagctggagattcccttgcggggaattttcatcctgaggtgcagtggtgggctagtcaccaaagaatgaaattcagcacgtgggacagagatcatgacaactatgaagggaactgcgcagaagaagatcagtctggctggtggtttaacaggtgtcactctgcaaacctgaatggtgtatactacagcggcccctacacggctaaaacagacaatgggattgtctggtacacctggcatgggtggtggtattctctgaaatctgtggttatgaaaattaggccaaatgattttattccaaatgtaatttaattgctgctgttgggctttcgtttctgcaattcagctttgtttaaagtgatttgaaaaatactcattctgaacatatccatgcgcaatcatgataactgttgtgagtagtgcttttcattcttctcacttgcctttgttacttaatgtgctttcagtacagcagatatgcaatattcaccaaataaatgtagactgtgttaat

SEQ ID NO: 734140 - DNA, 894 bp, Homo sapiens
  misc_feature (842)..(842): n is a, c, g, or t
  misc_feature (844)..(844): n is a, c, g, or t
  misc_feature (851)..(851): n is a, c, g, or t
  misc_feature (856)..(856): n is a, c, g, or t
  misc_feature (869)..(869): n is a, c, g, or t
ttacaggatcctgggaagcagagtgtctggatggaacctgagctgggtctctgactcacttctgactttagggtgaagatggagggaatctgataaagacatcttataaattcaacagacacaaaagaatttgatctcccataagcaactgtgaaattacaataacagatcctgggaagttctacaattctaattcagttttttcaagggggaacatggcaaaggtgttcagtttcatccttgttaccaccgctctgacaatgggcagggaaatttcggcgctcgaggactgtgcccaggagcagatgcggctcagagcccaggtgcgcctgcttgagacccgggtcaaacagcaacaggtcaagatcaagcagcttttgcaggagaatgaagtccagttccttgataaaggagatgagaatactgtcattgatcttggaagcaagaggcagtatgcagattgttcagagattttcaatgatgggtataagctcagtggattttacaaaatcaaacctctccagagcccagcagaattttctgtttattgtgacatgtccgatggaggaggatggactgtaattcagagacgatctgatggcagtgaaaactttaacagaggatggaaagactatgaaaatggctttggaaattttgtccaaaaacatggtgaatattggctgggcaataaaaatcttcacttcttgaccactcaagaagactacactttaaaaatcgaccttgcagattttgaaaaaaatagccgttatgcacaatataagaatttcaaagttggagatgaaaaggaattctacgagtgaatatggggatatctgggacancngggaatncctgnggggaattcatcngaggggaaggtggctgtccccagag

SEQ ID NO: 734141 - DNA, 1041 bp, Homo sapiens
gcaagttatttaatgtctctgcatttttgacatgcttgtaataatgctaatttatttcacagttttttcaagggggaacatggcaaaggtgttcagtttcatccttgttaccaccgctctgacaatgggcagggaaatttcggcgctcgaggactgtgcccaggagcagatgcggctcagagcccaggtgcgcctgcttgagacccgggtcaaacagcaacaggtcaagatcaagcagcttttgcaggagaatgaagtccagttccttgataaaggagatgagaatactgtcattgatcttggaagcaagaggcagtatgcagattgttcagagattttcaatgatgggtataagctcagtggattttacaaaatcaaacctctccagagcccagcagaattttctgtttattgtgacatgtccgatggaggaggatggactgtaattcagagacgatctgatggcagtgaaaactttaacagaggatggaaagactatgaaaatggctttggaaattttgtccaaaaacatggtgaatattggctgggcaataaaaatcttcacttcttgaccactcaagaagactacactttaaaaatcgaccttgcagattttgaaaaaaatagccgttatgcacaatataagaatttcaaagttggagatgaaaagaatttctacgagttgaatattggggaatattctggaacagctggagattcccttgcggggaattttcatcctgaggtgcagtggtgggctagtcaccaaagaatgaaattcagcacgtgggacagagatcatgacaactatgaagggaactgcgcagaagaagatcagtctggctggtggtttaacaggtttgatgtcttatgagcatagttgtaatggagttgatgatatctcactgatagacattaattatcaatataatatgtatggtaatgttagtctttatttataatattagtattattaagtaatcattctcattagaattcttcagcaatgaagtcgttttgaggatttgttcattgtgtaca

SEQ ID NO: 734142 - DNA, 1220 bp, Homo sapiens
gcaagttatttaatgtctctgcatttttgacatgcttgtaataatgctaatttatttcacagttttttcaagggggaacatggcaaaggtgttcagtttcatccttgttaccaccgctctgacaatgggcagggaaatttcggcgctcgaggactgtgcccaggagcagatgcggctcagagcccaggtgcgcctgcttgagacccgggtcaaacagcaacaggtcaagatcaagcagcttttgcaggagaatgaagtccagttccttgataaaggagatgagaatactgtcattgatcttggaagcaagaggcagtatgcagattgttcagagattttcaatgatgggtataagctcagtggattttacaaaatcaaacctctccagagcccagcagaattttctgtttattgtgacatgtccgatggaggaggatggactgtaattcagagacgatctgatggcagtgaaaactttaacagaggatggaaagactatgaaaatggctttggaaattttgtccaaaaacatggtgaatattggctgggcaataaaaatcttcacttcttgaccactcaagaagactacactttaaaaatcgaccttgcagattttgaaaaaaatagccgttatgcacaatataagaatttcaaagttggagatgaaaagaatttctacgagttgaatattggggaatattctggaacagctggagattcccttgcggggaattttcatcctgaggtgcagtggtgggctagtcaccaaagaatgaaattcagcacgtgggacagagatcatgacaactatgaagggaactgcgcagaagaagatcagtctggctggtggtttaacaggtgtcactctgcaaacctgaatggtgtatactacagcggcccctacacggctaaaacagacaatgggattgtctggtacacctggcatgggtggtggtattctctgaaatctgtggttatgaaaattaggccaaatgattttattccaaatgtaatttaattgctgctgttgggctttcgtttctgcaattcagctttgtttaaagtgatttgaaaaatactcattctgaacatatccatgcgcaatcatgataactgttgtgagtagtgcttttcattcttctcacttgcctttgttacttaatgtgctttcagtacagcagatatgcaatattcaccaaataaatgtagactgtgttaat

SEQ ID NO: 734143 - DNA, 1426 bp, Homo sapiens
ttaattcatatttttgtgggtaaaatgttattacccttaatacaaagcaaagtttcagctggacttcgtttttacttaatcttcaatggaacattattgaagttacagtacaaaaattctctgaatgaacataataataagttgtaaaatatatatatctttataaagatatattattggatctttcacaaaaagtcatacaagtggggaaaaaagaaaaatatcagagtattgggatttgtccttgaatcttctcttttagctttctttcagttaaacctgtgtccacatgtttgtttctggattgaagccagaatcaacattgtccctatttctaatcaaataatggagaaataattacaaattcccaatgcagttacaggatcctgggaagcagagtgtctggatggaacctgagctgggtctctgactcacttctgactttagttttttcaagggggaacatggcaaaggtgttcagtttcatccttgttaccaccgctctgacaatgggcagggaaatttcggcgctcgaggactgtgcccaggagcagatgcggctcagagcccaggtgcgcctgcttgagacccgggtcaaacagcaacaggtcaagatcaagcagcttttgcaggagaatgaagtccagttccttgataaaggagatgagaatactgtcattgatcttggaagcaagaggcagtatgcagattgttcagagattttcaatgatgggtataagctcagtggattttacaaaatcaaacctctccagagcccagcagaattttctgtttattgtgacatgtccgatggaggaggatggactgtaattcagagacgatctgatggcagtgaaaactttaacagaggatggaaagactatgaaaatggctttggaaattttgtccaaaaacatggtgaatattggctgggcaataaaaatcttcacttcttgaccactcaagaagactacactttaaaaatcgaccttgcagattttgaaaaaaatagccgttatgcacaatataagaatttcaaagttggagatgaaaagaatttctacgagttgaatattggggaatattctggaacagctggagattcccttgcggggaattttcatcctgaggtgcagtggtgggctagtcaccaaagaatgaaattcagcacgtgggacagagatcatgacaactatgaagggaactgcgcagaagaagatcagtctggctggtggtttaacaggtttgatgtcttatgagcatagttgtaatggagttgatgatatctcactgatagacattaattatcaatataatatgtatggtaatgttagtctttatttataatattagtattattaagtaatcattctcattagaattcttcagcaatgaagtcgttttgaggatttgttcattgtgtaca

SEQ ID NO: 734144 - DNA, 1177 bp, Homo sapiens
ttacaggatcctgggaagcagagtgtctggatggaacctgagctgggtctctgactcacttctgactttagggtgaagatggagggaatctgataaagacatcttataaattcaacagacacaaaagaatttgatctcccataagcaactgtgaaattacaataacagatcctgggaagttctacaattctaattcagttttttcaagggggaacatggcaaaggtgttcagtttcatccttgttaccaccgctctgacaatgggcagggaaatttcggcgctcgaggactgtgcccaggagcagatgcggctcagagcccaggtgcgcctgcttgagacccgggtcaaacagcaacaggtcaagatcaagcagcttttgcaggagaatgaagtccagttccttgataaaggagatgagaatactgtcattgatcttggaagcaagaggcagtatgcagattgttcagagattttcaatgatgggtataagctcagtggattttacaaaatcaaacctctccagagcccagcagaattttctgtttattgtgacatgtccgatggaggaggatggactgtaattcagagacgatctgatggcagtgaaaactttaacagaggatggaaagactatgaaaatggctttggaaattttgtccaaaaacatggtgaatattggctgggcaataaaaatcttcacttcttgaccactcaagaagactacactttaaaaatcgaccttgcagattttgaaaaaaatagccgttatgcacaatataagaatttcaaagttggagatgaaaagaatttctacgagttgaatattggggaatattctggaacagctggagattcccttgcggggaattttcatcctgaggtgcagtggtgggctagtcaccaaagaatgaaattcagcacgtgggacagagatcatgacaactatgaagggaactgcgcagaagaagatcagtctggctggtggtttaacaggtttgatgtcttatgagcatagttgtaatggagttgatgatatctcactgatagacattaattatcaatataatatgtatggtaatgttagtctttatttataatattagtattattaagtaatcattctcattagaattcttcagcaatgaagtcgttttgaggatttgttcattgtgtaca

SEQ ID NO: 734145 - DNA, 1277 bp, Homo sapiens
ttcaaaaacctcatttattatggagatttacatgccaacagtacaattaacttctataaaccacattactgtttagaaaacacataagcaatgtcatatagagattgagagcacagtccttgaactgaatttgaatcccacctccgcttacccactgggcatcaagactgagccctttcctaccgcatggaattgttatgaggatcaaaggagacaactataaagctcctagcatagcgattccaattattttatattatttgatcttttgagtccaggagttttcgcataagccataatttccaattcttcaaatagtaggcattattagaacttttcaagccactttctctttggaataatattctgaaatgggaagcgctcgaggactgtgcccaggagcagatgcggctcagagcccaggtgcgcctgcttgagacccgggtcaaacagcaacaggtcaagatcaagcagcttttgcaggagaatgaagtccagttccttgataaaggagatgagaatactgtcattgatcttggaagcaagaggcagtatgcagattgttcagagattttcaatgatgggtataagctcagtggattttacaaaatcaaacctctccagagcccagcagaattttctgtttattgtgacatgtccgatggaggaggatggactgtaattcagagacgatctgatggcagtgaaaactttaacagaggatggaaagactatgaaaatggctttggaaattttgtccaaaaacatggtgaatattggctgggcaataaaaatcttcacttcttgaccactcaagaagactacactttaaaaatcgaccttgcagattttgaaaaaaatagccgttatgcacaatataagaatttcaaagttggagatgaaaagaatttctacgagttgaatattggggaatattctggaacagctggagattcccttgcggggaattttcatcctgaggtgcagtggtgggctagtcaccaaagaatgaaattcagcacgtgggacagagatcatgacaactatgaagggaactgcgcagaagaagatcagtctggctggtggtttaacaggtttgatgtcttatgagcatagttgtaatggagttgatgatatctcactgatagacattaattatcaatataatatgtatggtaatgttagtctttatttataatattagtattattaagtaatcattctcattagaattcttcagcaatgaagtcgttttgaggatttgttcattgtgtaca

SEQ ID NO: 734146 - DNA, 1456 bp, Homo sapiens
ttcaaaaacctcatttattatggagatttacatgccaacagtacaattaacttctataaaccacattactgtttagaaaacacataagcaatgtcatatagagattgagagcacagtccttgaactgaatttgaatcccacctccgcttacccactgggcatcaagactgagccctttcctaccgcatggaattgttatgaggatcaaaggagacaactataaagctcctagcatagcgattccaattattttatattatttgatcttttgagtccaggagttttcgcataagccataatttccaattcttcaaatagtaggcattattagaacttttcaagccactttctctttggaataatattctgaaatgggaagcgctcgaggactgtgcccaggagcagatgcggctcagagcccaggtgcgcctgcttgagacccgggtcaaacagcaacaggtcaagatcaagcagcttttgcaggagaatgaagtccagttccttgataaaggagatgagaatactgtcattgatcttggaagcaagaggcagtatgcagattgttcagagattttcaatgatgggtataagctcagtggattttacaaaatcaaacctctccagagcccagcagaattttctgtttattgtgacatgtccgatggaggaggatggactgtaattcagagacgatctgatggcagtgaaaactttaacagaggatggaaagactatgaaaatggctttggaaattttgtccaaaaacatggtgaatattggctgggcaataaaaatcttcacttcttgaccactcaagaagactacactttaaaaatcgaccttgcagattttgaaaaaaatagccgttatgcacaatataagaatttcaaagttggagatgaaaagaatttctacgagttgaatattggggaatattctggaacagctggagattcccttgcggggaattttcatcctgaggtgcagtggtgggctagtcaccaaagaatgaaattcagcacgtgggacagagatcatgacaactatgaagggaactgcgcagaagaagatcagtctggctggtggtttaacaggtgtcactctgcaaacctgaatggtgtatactacagcggcccctacacggctaaaacagacaatgggattgtctggtacacctggcatgggtggtggtattctctgaaatctgtggttatgaaaattaggccaaatgattttattccaaatgtaatttaattgctgctgttgggctttcgtttctgcaattcagctttgtttaaagtgatttgaaaaatactcattctgaacatatccatgcgcaatcatgataactgttgtgagtagtgcttttcattcttctcacttgcctttgttacttaatgtgctttcagtacagcagatatgcaatattcaccaaataaatgtagactgtgttaat

SEQ ID NO: 734147 - DNA, 1041 bp, Homo sapiens
acaagatgcaattttaaaacgctgatttctataccatgtgttatctgtctccagtgatactgagtagtctcattcagaggctccctaaggcggggggagaaaaagacacataatgaatgttacattaccttgttttaaaaacagattgttcagagattttcaatgatgggtataagctcagtggattttacaaaatcaaacctctccagagcccagcagaattttctgtttattgtgacatgtccgatggaggaggatggactgtaattcagagacgatctgatggcagtgaaaactttaacagaggatggaaagactatgaaaatggctttggaaattttgtccaaaaacatggtgaatattggctgggcaataaaaatcttcacttcttgaccactcaagaagactacactttaaaaatcgaccttgcagattttgaaaaaaatagccgttatgcacaatataagaatttcaaagttggagatgaaaagaatttctacgagttgaatattggggaatattctggaacagctggagattcccttgcggggaattttcatcctgaggtgcagtggtgggctagtcaccaaagaatgaaattcagcacgtgggacagagatcatgacaactatgaagggaactgcgcagaagaagatcagtctggctggtggtttaacaggtgtcactctgcaaacctgaatggtgtatactacagcggcccctacacggctaaaacagacaatgggattgtctggtacacctggcatgggtggtggtattctctgaaatctgtggttatgaaaattaggccaaatgattttattccaaatgtaatttaattgctgctgttgggctttcgtttctgcaattcagctttgtttaaagtgatttgaaaaatactcattctgaacatatccatgcgcaatcatgataactgttgtgagtagtgcttttcattcttctcacttgcctttgttacttaatgtgctttcagtacagcagatatgcaatattcaccaaataaatgtagactgtgttaat

SEQ ID NO: 734148 - DNA, 1201 bp, Homo sapiens
gcaagttatttaatgtctctgcatttttgacatgcttgtaataatgctaatttatttcacaggtatgatagtaaccaaaactcaggtaacaaccattagcttttgcaagaagtcaggttgactagcaaggagtctgcttctgctacttggagaagagatttagaattatgtatcttttgttacagatatacagatatacaaatatacagatatacaaataagttttttcaagggggaacatggcaaaggtgttcagtttcatccttgttaccaccgctctgacaatgggcagggaaatttcggcgctcgaggactgtgcccaggagcagatgcggctcagagcccaggtgcgcctgcttgagacccgggtcaaacagcaacaggtcaagatcaagcagcttttgcaggagaatgaagtccagttccttgataaaggagatgagaatactgtcattgatcttggaagcaagaggcagtatgcagattgttcagagattttcaatgatgggtataagctcagtggattttacaaaatcaaacctctccagagcccagcagaattttctgtttattgtgacatgtccgatggaggaggatggactgtaattcagagacgatctgatggcagtgaaaactttaacagaggatggaaagactatgaaaatggctttggaaattttgtccaaaaacatggtgaatattggctgggcaataaaaatcttcacttcttgaccactcaagaagactacactttaaaaatcgaccttgcagattttgaaaaaaatagccgttatgcacaatataagaatttcaaagttggagatgaaaagaatttctacgagttgaatattggggaatattctggaacagctggagattcccttgcggggaattttcatcctgaggtgcagtggtgggctagtcaccaaagaatgaaattcagcacgtgggacagagatcatgacaactatgaagggaactgcgcagaagaagatcagtctggctggtggtttaacaggtttgatgtcttatgagcatagttgtaatggagttgatgatatctcactgatagacattaattatcaatataatatgtatggtaatgttagtctttatttataatattagtattattaagtaatcattctcattagaattcttcagcaatgaagtcgttttgaggatttgttcattgtgtaca

SEQ ID NO: 734149 - DNA, 1380 bp, Homo sapiens
gcaagttatttaatgtctctgcatttttgacatgcttgtaataatgctaatttatttcacaggtatgatagtaaccaaaactcaggtaacaaccattagcttttgcaagaagtcaggttgactagcaaggagtctgcttctgctacttggagaagagatttagaattatgtatcttttgttacagatatacagatatacaaatatacagatatacaaataagttttttcaagggggaacatggcaaaggtgttcagtttcatccttgttaccaccgctctgacaatgggcagggaaatttcggcgctcgaggactgtgcccaggagcagatgcggctcagagcccaggtgcgcctgcttgagacccgggtcaaacagcaacaggtcaagatcaagcagcttttgcaggagaatgaagtccagttccttgataaaggagatgagaatactgtcattgatcttggaagcaagaggcagtatgcagattgttcagagattttcaatgatgggtataagctcagtggattttacaaaatcaaacctctccagagcccagcagaattttctgtttattgtgacatgtccgatggaggaggatggactgtaattcagagacgatctgatggcagtgaaaactttaacagaggatggaaagactatgaaaatggctttggaaattttgtccaaaaacatggtgaatattggctgggcaataaaaatcttcacttcttgaccactcaagaagactacactttaaaaatcgaccttgcagattttgaaaaaaatagccgttatgcacaatataagaatttcaaagttggagatgaaaagaatttctacgagttgaatattggggaatattctggaacagctggagattcccttgcggggaattttcatcctgaggtgcagtggtgggctagtcaccaaagaatgaaattcagcacgtgggacagagatcatgacaactatgaagggaactgcgcagaagaagatcagtctggctggtggtttaacaggtgtcactctgcaaacctgaatggtgtatactacagcggcccctacacggctaaaacagacaatgggattgtctggtacacctggcatgggtggtggtattctctgaaatctgtggttatgaaaattaggccaaatgattttattccaaatgtaatttaattgctgctgttgggctttcgtttctgcaattcagctttgtttaaagtgatttgaaaaatactcattctgaacatatccatgcgcaatcatgataactgttgtgagtagtgcttttcattcttctcacttgcctttgttacttaatgtgctttcagtacagcagatatgcaatattcaccaaataaatgtagactgtgttaat

SEQ ID NO: 734150 - DNA, 1264 bp, Homo sapiens
gtatgatagtaaccaaaactcaggtaacaaccattagcttttgcaagaagtcaggttgactagcaaggagtctgcttctgctacttggagaagagatttagaattatgtatcttttgttacagatatacagatatacaaatatacagatatacaaataagttttttcaagggggaacatggcaaaggtgttcagtttcatccttgttaccaccgctctgacaatgggcagggaaatttcggcgctcgaggactgtgcccaggagcagatgcggctcagagcccaggtgcgcctgcttgagacccgggtcaaacagcaacaggtcaagatcaagcagcttttgcaggagaatgaagtccagttccttgataaaggagatgagaatactgtcattgatcttggaagcaagaggcagtatgcagattgttcagagattttcaatgatgggtataagctcagtggattttacgatggaggaggatggactgtaattcagagacgatctgatggcagtgaaaactttaacagaggatggaaagactatgaaaatggctttggaaattttgtccaaaaacatggtgaatattggctgggcaataaaaatcttcacttcttgaccactcaagaagactacactttaaaaatcgaccttgcagattttgaaaaaaatagccgttatgcacaatataagaatttcaaagttggagatgaaaagaatttctacgagttgaatattggggaatattctggaacagctggagattcccttgcggggaattttcatcctgaggtgcagtggtgggctagtcaccaaagaatgaaattcagcacgtgggacagagatcatgacaactatgaagggaactgcgcagaagaagatcagtctggctggtggtttaacaggtgtcactctgcaaacctgaatggtgtatactacagcggcccctacacggctaaaacagacaatgggattgtctggtacacctggcatgggtggtggtattctctgaaatctgtggttatgaaaattaggccaaatgattttattccaaatgtaatttaattgctgctgttgggctttcgtttctgcaattcagctttgtttaaagtgatttgaaaaatactcattctgaacatatccatgcgcaatcatgataactgttgtgagtagtgcttttcattcttctcacttgcctttgttacttaatgtgctttcagtacagcagatatgcaatattcaccaaataaatgtagactgtgttaat

SEQ ID NO: 734151 - DNA, 1266 bp, Homo sapiens
gtatgatagtaaccaaaactcaggtaacaaccattagcttttgcaagaagtcaggttgactagcaaggagtctgcttctgctacttggagaagagatttagaattatgtatcttttgttacagatatacagatatacaaatatacagatatacaaataagggtgaagatggagggaatctgataaagacatcttataaattcaacagacacaaaagaatttgatctcccataagcaactgtgaaattacaataacagatcctgggaagttctacaattctaattcagttttttcaagggggaacatggcaaaggtgttcagtttcatccttgttaccaccgctctgacaatgggcagggaaatttcggcgctcgaggactgtgcccaggagcagatgcggctcagagcccaggtgcgcctgcttgagacccgggtcaaacagcaacaggtcaagatcaagcagcttttgcaggagaatgaagtccagttccttgataaaggagatgagaatactgtcattgatcttggaagcaagaggcagtatgcagattgttcagagattttcaatgatgggtataagctcagtggattttacaaaatcaaacctctccagagcccagcagaattttctgtttattgtgacatgtccgatggaggaggatggactgtaattcagagacgatctgatggcagtgaaaactttaacagaggatggaaagactatgaaaatggctttggaaattttgtccaaaaacatggtgaatattggctgggcaataaaaatcttcacttcttgaccactcaagaagactacactttaaaaatcgaccttgcagattttgaaaaaaatagccgttatgcacaatataagaatttcaaagttggagatgaaaagaatttctacgagttgaatattggggaatattctggaacagctggagattcccttgcggggaattttcatcctgaggtgcagtggtgggctagtcaccaaagaatgaaattcagcacgtgggacagagatcatgacaactatgaagggaactgcgcagaagaagatcagtctggctggtggtttaacaggtttgatgtcttatgagcatagttgtaatggagttgatgatatctcactgatagacattaattatcaatataatatgtatggtaatgttagtctttatttataatattagtattattaagtaatcattctcattagaattcttcagcaatgaagtcgttttgaggatttgttcattgtgtaca

SEQ ID NO: 734152 - DNA, 1445 bp, Homo sapiens
gtatgatagtaaccaaaactcaggtaacaaccattagcttttgcaagaagtcaggttgactagcaaggagtctgcttctgctacttggagaagagatttagaattatgtatcttttgttacagatatacagatatacaaatatacagatatacaaataagggtgaagatggagggaatctgataaagacatcttataaattcaacagacacaaaagaatttgatctcccataagcaactgtgaaattacaataacagatcctgggaagttctacaattctaattcagttttttcaagggggaacatggcaaaggtgttcagtttcatccttgttaccaccgctctgacaatgggcagggaaatttcggcgctcgaggactgtgcccaggagcagatgcggctcagagcccaggtgcgcctgcttgagacccgggtcaaacagcaacaggtcaagatcaagcagcttttgcaggagaatgaagtccagttccttgataaaggagatgagaatactgtcattgatcttggaagcaagaggcagtatgcagattgttcagagattttcaatgatgggtataagctcagtggattttacaaaatcaaacctctccagagcccagcagaattttctgtttattgtgacatgtccgatggaggaggatggactgtaattcagagacgatctgatggcagtgaaaactttaacagaggatggaaagactatgaaaatggctttggaaattttgtccaaaaacatggtgaatattggctgggcaataaaaatcttcacttcttgaccactcaagaagactacactttaaaaatcgaccttgcagattttgaaaaaaatagccgttatgcacaatataagaatttcaaagttggagatgaaaagaatttctacgagttgaatattggggaatattctggaacagctggagattcccttgcggggaattttcatcctgaggtgcagtggtgggctagtcaccaaagaatgaaattcagcacgtgggacagagatcatgacaactatgaagggaactgcgcagaagaagatcagtctggctggtggtttaacaggtgtcactctgcaaacctgaatggtgtatactacagcggcccctacacggctaaaacagacaatgggattgtctggtacacctggcatgggtggtggtattctctgaaatctgtggttatgaaaattaggccaaatgattttattccaaatgtaatttaattgctgctgttgggctttcgtttctgcaattcagctttgtttaaagtgatttgaaaaatactcattctgaacatatccatgcgcaatcatgataactgttgtgagtagtgcttttcattcttctcacttgcctttgttacttaatgtgctttcagtacagcagatatgcaatattcaccaaataaatgtagactgtgttaat

SEQ ID NO: 734153 - DNA, 1288 bp, Homo sapiens
gtatgatagtaaccaaaactcaggtaacaaccattagcttttgcaagaagtcaggttgactagcaaggagtctgcttctgctacttggagaagagatttagaattatgtatcttttgttacagatatacagatatacaaatatacagatatacaaataagttatttttgttgttgctggaagggtgaagatggagggaatctgataaagacatcttataaattcaacagacacaaaagaatttgatctcccataagcaactgtgaaattacaataacagatcctgggaagttctacaattctaattcagttttttcaagggggaacatggcaaaggtgttcagtttcatccttgttaccaccgctctgacaatgggcagggaaatttcggcgctcgaggactgtgcccaggagcagatgcggctcagagcccaggtgcgcctgcttgagacccgggtcaaacagcaacaggtcaagatcaagcagcttttgcaggagaatgaagtccagttccttgataaaggagatgagaatactgtcattgatcttggaagcaagaggcagtatgcagattgttcagagattttcaatgatgggtataagctcagtggattttacaaaatcaaacctctccagagcccagcagaattttctgtttattgtgacatgtccgatggaggaggatggactgtaattcagagacgatctgatggcagtgaaaactttaacagaggatggaaagactatgaaaatggctttggaaattttgtccaaaaacatggtgaatattggctgggcaataaaaatcttcacttcttgaccactcaagaagactacactttaaaaatcgaccttgcagattttgaaaaaaatagccgttatgcacaatataagaatttcaaagttggagatgaaaagaatttctacgagttgaatattggggaatattctggaacagctggagattcccttgcggggaattttcatcctgaggtgcagtggtgggctagtcaccaaagaatgaaattcagcacgtgggacagagatcatgacaactatgaagggaactgcgcagaagaagatcagtctggctggtggtttaacaggtttgatgtcttatgagcatagttgtaatggagttgatgatatctcactgatagacattaattatcaatataatatgtatggtaatgttagtctttatttataatattagtattattaagtaatcattctcattagaattcttcagcaatgaagtcgttttgaggatttgttcattgtgtaca

SEQ ID NO: 734154 - DNA, 1467 bp, Homo sapiens
gtatgatagtaaccaaaactcaggtaacaaccattagcttttgcaagaagtcaggttgactagcaaggagtctgcttctgctacttggagaagagatttagaattatgtatcttttgttacagatatacagatatacaaatatacagatatacaaataagttatttttgttgttgctggaagggtgaagatggagggaatctgataaagacatcttataaattcaacagacacaaaagaatttgatctcccataagcaactgtgaaattacaataacagatcctgggaagttctacaattctaattcagttttttcaagggggaacatggcaaaggtgttcagtttcatccttgttaccaccgctctgacaatgggcagggaaatttcggcgctcgaggactgtgcccaggagcagatgcggctcagagcccaggtgcgcctgcttgagacccgggtcaaacagcaacaggtcaagatcaagcagcttttgcaggagaatgaagtccagttccttgataaaggagatgagaatactgtcattgatcttggaagcaagaggcagtatgcagattgttcagagattttcaatgatgggtataagctcagtggattttacaaaatcaaacctctccagagcccagcagaattttctgtttattgtgacatgtccgatggaggaggatggactgtaattcagagacgatctgatggcagtgaaaactttaacagaggatggaaagactatgaaaatggctttggaaattttgtccaaaaacatggtgaatattggctgggcaataaaaatcttcacttcttgaccactcaagaagactacactttaaaaatcgaccttgcagattttgaaaaaaatagccgttatgcacaatataagaatttcaaagttggagatgaaaagaatttctacgagttgaatattggggaatattctggaacagctggagattcccttgcggggaattttcatcctgaggtgcagtggtgggctagtcaccaaagaatgaaattcagcacgtgggacagagatcatgacaactatgaagggaactgcgcagaagaagatcagtctggctggtggtttaacaggtgtcactctgcaaacctgaatggtgtatactacagcggcccctacacggctaaaacagacaatgggattgtctggtacacctggcatgggtggtggtattctctgaaatctgtggttatgaaaattaggccaaatgattttattccaaatgtaatttaattgctgctgttgggctttcgtttctgcaattcagctttgtttaaagtgatttgaaaaatactcattctgaacatatccatgcgcaatcatgataactgttgtgagtagtgcttttcattcttctcacttgcctttgttacttaatgtgctttcagtacagcagatatgcaatattcaccaaataaatgtagactgtgttaat

SEQ ID NO: 734155 - DNA, 1413 bp, Homo sapiens
gtatgatagtaaccaaaactcaggtaacaaccattagcttttgcaagaagtcaggttgactagcaaggagtctgcttctgctacttggagaagagatttagaattatgtatcttttgttacagatatacagatatacaaatatacagatatacaaataagttatttttgttgttgctggaagggtgaagatggagggaatctgataaagacatcttataaattcaacagacacaaaagaatttgatctcccataagcaactgtgaaattacaataacagatcctgggaagttctacaattctaattcagttttttcaagggggaacatggcaaaggtgttcagtttcatccttgttaccaccgctctgacaatgggcagggaaatttcggcgctcgaggactgtgcccaggagcagatgcggctcagagcccaggtgcgcctgcttgagacccgggtcaaacagcaacaggtcaagatcaagcagcttttgcaggagaatgaagtccagttccttgataaaggagatgagaatactgtcattgatcttggaagcaagaggcagtatgcagattgttcagagattttcaatgatgggtataagctcagtggattttacgatggaggaggatggactgtaattcagagacgatctgatggcagtgaaaactttaacagaggatggaaagactatgaaaatggctttggaaattttgtccaaaaacatggtgaatattggctgggcaataaaaatcttcacttcttgaccactcaagaagactacactttaaaaatcgaccttgcagattttgaaaaaaatagccgttatgcacaatataagaatttcaaagttggagatgaaaagaatttctacgagttgaatattggggaatattctggaacagctggagattcccttgcggggaattttcatcctgaggtgcagtggtgggctagtcaccaaagaatgaaattcagcacgtgggacagagatcatgacaactatgaagggaactgcgcagaagaagatcagtctggctggtggtttaacaggtgtcactctgcaaacctgaatggtgtatactacagcggcccctacacggctaaaacagacaatgggattgtctggtacacctggcatgggtggtggtattctctgaaatctgtggttatgaaaattaggccaaatgattttattccaaatgtaatttaattgctgctgttgggctttcgtttctgcaattcagctttgtttaaagtgatttgaaaaatactcattctgaacatatccatgcgcaatcatgataactgttgtgagtagtgcttttcattcttctcacttgcctttgttacttaatgtgctttcagtacagcagatatgcaatattcaccaaataaatgtagactgtgttaat

SEQ ID NO: 734156 - DNA, 572 bp, Homo sapiens
acgggtagctccaggaacaaacccttagctaacagtttaccctgccctgggggctgcagctgcgaccacatcccagggtcgggtttaaagatgaactgcaacaacaggaacgtgagcagcttggctgatttgaagcccaagctctctaacgtgcaggagcttttcctacgagataacaagatccacagcatccgaaaatcgcactttgtggattacaagaacctcattctgttggatctgggcaacaataacatcgctactgtagagaacaacactttcaagaaccttttggacctcaggtggctatacatggatagcaattacctggacacgctgtcccgggagaaattcgcggggctgcaaaacctagagtacctgaacgtggagtacaacgctatccagctcatcctcccgggcactttcaatgccatgcccaaactgaggatcctcattctcaacaacaacctgctgaggtccctgcctgtggacgtgttcgctggggtctcgctctctaaactcagcctgcacaacaattacttcatgtacctcccggtggcaggggtgctggacca

SEQ ID NO: 734157 - DNA, 1062 bp, Homo sapiens
tgccaatgtagtgttccagacagttttatcatccacattgctgacctggaagatgcatcattgtctatgatatctgcaatggaaatgatcactaggcaatttcagccttgcaaatctaactgtggcgtgtggaaagaagaggaaccagaaaagaatgtttgtgaagttctggcttgaatctcgtgccgggagtgtgaagaaggtccttgcttccccttcaccttctgccatgattctaagtttcctgacgcctcccagccgtgcttcctgttaagcctgtgaaactcctttggaatgagtacacatccaggagtgaagaagacaagctcaactgccattctctgagcagttcaaggcatactgagttgcgggagttgtgtggtggtccactctgactgcaagcacccctttcttgaaccgaacagagtcaagtggaatcaaaggacattacctgttgattcttgggcaaggcccagaatttggtggacatacttaaagaagaaaggaatcttcagctaaagtgtctacgatcaattcagatttggagggcatggatcttctgacagtaggggccattctaggattttttggttgaagagatgaacttcaacttggttccagatgggtggtccagctattctgctgacaacatttttcagggcaaggcttttgctactggaatgatttaaggaagatccctcagtgtttcagagtaaagatatttctaaagaagtacctgtgtcattgcccatcttgaagattgacttttatggattgctcaaatactgatatcagctcaatgtcaatatatactcctacatataaaatccatcttctaatcataatcactaggtaagatgctagtgcaagttgaagttcttaaaggagatgacctgaacagccttcttagtgtaccagggagaccagattgagtttaaactatgtttaccctgcactcagacacgcctaggtgtgtctgggagattagtagatggtgttcaacaaggatctatttaaacaagggagacattaatttggattcctttggttgtaaatttccaa

SEQ ID NO: 734158 - DNA, 606 bp, Homo sapiens; identical to SEQ ID NO: 370459

SEQ ID NO: 734159 - DNA, 526 bp, Homo sapiens; identical to SEQ ID NO: 728860

SEQ ID NO: 734160 - DNA, 743 bp, Homo sapiens
ctgctccttcttttggattattcccttaggaatatctccaaagagggattacaaggtcaaagagcatgaagtattttatagctcttgttttatattgccagattgctttctagaaagatccaatctttgggttggaaggaccttaaaggtcatctagtttagcctccccaccccctctgaatgcttgaatcccctcgacaatttatgatgccaccagcaatgtataagcatttctgtttaccaatagctctgccagtattgggttttgccatttttatttatttttgctagtttaataggtatgtatagttgttcttgaagagttgttttatttcattaattgctagcaaggctgagcacttttccatgtgatgatttactagttgtatttccttgtgtgtaaaatgttcattcatttcttatgaccacttgttaagaggaactgatctcatatatttgtatcagaactgtatttttatgttatattgtatagtttgctctcctgcccctctccttaaaactgaatggtgccaataatttgatactaatgactacaaaaaaaggtaatgcctcatttactagtattgttgtaaaatgaggaatgtatgtgaatattcagataaccgaggattaaccctttaagtgctgaatctttaaaattttaatatatttttttttgagggaaatctttctaaaatgtattacgcacttccctgccttagtaaacagagtatactggagag

SEQ ID NO: 734161 - DNA, 827 bp, Homo sapiens; identical to SEQ ID NO: 728861

SEQ ID NO: 734162 - DNA, 681 bp, Homo sapiens
aaggagctgagcagatattctaagagtttcacggggataaggaataacatggaagcttaagacccaataagaagcagacaaaatatcccagcatttcagttggaaccctggatgggattcatttcaggagtaatagggaaccagaaacaaaggacggtcatgaagattcaagcccactgagattagactagctgatctgcctctaccctaactttcaaccagaaagaaaataaacccgctagcagtaacaccccatcctagagtctggaattatctctgaaaattttcacatacccatatccctgatttcaataaaaaattatcagtcatattaagaagcaaaataaatgatcaaaagccaagaggaaaaaaatcaagtaaaagaaacgagccaacaggagacaggacacgggtgcacgcctgtaatcccagcaccacaaggtgggtggatcacttgaggtcaagagtttgagatctgcccggccaaaatggtgaaaccccatctctactaaaaatacaaaaattagccgggcatagtggtgggtgcctgtaatcccagctacttgggaagttgaggcatgagaattgcttcaacccgggaggcggaggttccagtgagctgaggttggcctctgcactccagcttggctgacagagcaagactctgtcaaaaaaagaaaa

SEQ ID NO: 734163 - DNA, 1058 bp, Homo sapiens
agctactcaggagactgaggcagaagaatcacttgaaccccgggaggtggaggttgtagtgagccaagatcgtgccactgcactccagcctgggcgacaaagtgaaactccgttctcaaaaaaaaacaacaaaacaaaaagtaacaagaaaaaagaaactatattccaaaaatccaaatttcattggcagtttgttctgggagcttcagacacatagaaggtgtcagttaaccagttcttacctaagaggtactgctaagagcctagtccctaagcaaagggagcttcagagaaacacagaaggtgccagttaaccagttcttacctaagaggtactgctaagagcctagtccctaagcaaaggacattcctcgtagctctgtcctgtctcctcatctccaaaatactttaccttctactttgaaatgcccactattatattcaaaagccctagttacttccagggaaaattatctattgagcaatgaatttcggtagcttcaattggattccaactcttgagcaagttttcatctcccttgcctgaatggccctggggaggactatttaaattgggggcgagtggatgaggatgctaaacctagaggtctcccaattaccaaaggcacctgggcaccagggactaaagtttgtctcaggaatttactgagatatgaggctgagataaaatcattttttggtacataaggtatcttgaacaaagcagatcagtttaacacaaaatcaacaatcgtaatttccctttttaaatttccaaatctatgtagcaatatcctttcctttaattcattcatcatctctattcactttttgtattctgtaaatcatttgaacttttataagaattatattttccccttgaggtcacaaaaaagaaagtattagaaattttataaccaatttttaaaaaattatattttaaggttaaatacaaccttctaaaggtttgtcatctgttgatcctaaattataattataaatttatatattcctgttgaatataatgcatgtgtgttacatattacgagggatccttg

SEQ ID NO: 734164 - DNA, 1050 bp, Homo sapiens; identical to SEQ ID NO: 20972

SEQ ID NO: 734165 - DNA, 1407 bp, Homo sapiens
  misc_feature (643)..(643): n is a, c, g, or t
cagtgaactgcctgctagatgccaggcaagtttaaaggaaaggtcaatgagaaataaagtgctcaagggcagattcaaggaaaacatggggagcattgcagagcaaccaggtcttaaaagagaagttaaggagaacagcaagaagcaagcacacaggagcaggcagaggcacactggttgagaaagtaggatgcccagcagcctggtctgattaaatcagaaattccctctgtaggaggacaagcaaagcatattatcataggctgggcagaattccaaaggtcatttcatccaacactcctcagacgctgaaactcaaggtttcgaaggcaaaagtggaagtgtagacaattgctacagaattgaagcccaacattctgtcctttgcctttcataatttgagacaaaattaaaaccatctgaaatatctcccttggctgcttttttcaaactttaatttccctgcaagtatatgataattgagtttctttagagcacaaggctggatatattggaccttaatgtgcacaagttcatcctagaaattgtctttagagtaccaagtctttcctccccaagagttccaaaactaattcaatatttagaatgctcccctggacctcccagttccagtggctgaatntcagggctcaggcattagaggattctttttgttctttggccctcttggggactaaatgccatgtatgtcaccatgtcagtgactacagccttggtttcatcccctgatgacccacaaccatcatctcccttatgctgaacatctctctgaatcttggaattttcagatgactctaactttgccaaattagaatcatgcctgattctttttttgtttgattgtttgctttatgtttgtttactttgctcagtgccaagcacaggatttagcataagaaaagttccactagaggttgtttattcaagtaagtaattattatagccatccgtatatgaatgctttacaaaattttggctgatggtcctcgcaggtctgttttattagtcaatttataaactcaagtttatgtcttcaacttgaccatctcctttgacttccagattcgcctcttcccacaaaactgactctccacttggacatctaacaggcatcttaaatttaatgcatccactttggggggctgaggtgggcagatcacgagatcaggagatcaagaccatcctggctggcacggtgaaaccccgtctctgctgaaaatacaaaaaattggccaggcgtggtggcaggcgcctgtggtcccggctactcgggaggctgaggcaggaaaatggcatgaacccaggaggcgtagcttgcagtgagctgagatcgtgccactgcactccagcctgggcgacagagcaagactccttctcaaaaagaaa

SEQ ID NO: 734166 - DNA, 1311 bp, Homo sapiens; identical to SEQ ID NO: 728863

SEQ ID NO: 734167 - DNA, 493 bp, Homo sapiens
agaaatggagcaaagcaactatacctcatgggtcagaaaatgattttcatgagttaataaaaaattgtatcttctaaaatttttcaaataacacaaaactagactttcttgcttagggtaaaaggatggattctgataagaaccatctttttgtttcctaatatttaaacatcctcttttgtccctcatgggaattaacaaagaattcttgagtctgtctggtagataaaaacgtcaacagtgaaaacacagtttcaagaaaagtatttctttcttgatggggtgactttcacccatggaagagcatgctctatgaagttgtctatttcacaaatatgataattttatattaaagataattttaaatataaaatatattttaaaatatttaaatatgaaatgctcttagcatattactctacattaataaaggttccaaaacatattctttccaacatttatatttttctttctcagatgtttctgggtactc

SEQ ID NO: 734168 - DNA, 1003 bp, Homo sapiens
tttgataacaatctaaataagctgcagttgaagaagctgaaaaatgaaggcctgaatgtgcccctggtgtgtaagacaaatgtatctaggctctagagcaggctcccattctccaccgatacacatcatgtgccagttttgcccagatgattctaaattactctgtagtacttgcttgttctgagggtgggacctaggttctttccagtcgtggatttgtatgactgaatgtgtttcaaatgggtggtggggtgctagagctgtttagagagggcctgttggctgctcctggcttacccacttagactgcctccgtttcatacccaaagcggaggccgtcagcaccaggattgagacttcctgtgggcaccaaacaggaagagaccagcaacttcgcattacccgccattttcatctttgccagtcccttcagtcttggctaggctaccgagagccaccatacaaggttcatctctagagaatttttgcttcttagctatactttaaatattttggtcatcaaagacaagtaatgtgtctcagatgagaggcttgaatttgatggccagatataacctctgaggcttttaacattttcattttaagagtaagcaagacacatgaaattaaacctacaaggaggtatttgtggctggtgccaaagcattctgacactttggggtgtcattttaatcaaagaaatcaccccgccacctcaccgggattctccataacttccctctgcagaactaattatgttgattttgttcaagttcaagatgttagctaaaagaactatgggtggtgttttttttcccacttcccacaaacctcaacatgtgccagtcaccctaaaatgctttcacatgggttaaaaacaaggcacaattttggaatcctacagcagggatgaaaggcccctagccgtgaaaacagtgctttggggagcagttgtcagtctaagtgatgctattccaagagaaggatatgctgagggaaaatg

SEQ ID NO: 734169 - DNA, 2492 bp, Homo sapiens
  misc_feature (427)..(427): n is a, c, g, or t
gttttccctgctgaaaacccaacaccagacggaaatgccaagtgcccaccccagaccccaaaccctaaggttggaccccaactcggaaccaggagtggagcgtggaaggtggggacagtgctcagggcccagtccagttggcactgacagcttccagtgtccccgctccatttccactagttcccctgggacaagcggcccctcactgggtgtcattcctacccaatgagttgatggaaaagtgggattcgtgccccacccaccatcatgcaagaaaaacaagcaaaacgaaacccagactgtagtttgccatcagggcaaaccactttctcaacatttttttgtggggggatgaacagtaaaccttgtggggccactgtggaaacttaaccgtgggtctcaaaccttgatgagcctcatctgtaanatgggttcaagaaagtcatctccccagagacggcggaaacggtccacctagggaacagagtggggcatcttttcgcagccgagcccagaacccatcacctaaagagttctggatgattcgttttgattttttttttttttaaatcaccatcgctgtcgtcatcagagtctcgcctagggcctggcacagagtagacgctcagttagaagctgtctggccttttcaccttctcccgggtcagcacacacagatttgggagtatttacctgcacagaacgcaccttcaggaactgccaaccagaagcaaaatccaaagctgctctctgcgatcccttcacttttaactctcagtctgcactttttttttttaactgagcatctattatgtgctaggcactgttccagtgctcggggacgcagctgtgaatgaacagaaacgggggatggaggacaggggagaaacccccttcacgggccttagatggcagggggtagggaaggagagacagaaaataaacagaaatatctgtccccagctgccagaggaggaggaaatgggcttggtgatggtgacattaagttctttgaaagctgggtttgttggcctctgaactctggcctttgtgggatctgttcttttggaaaagatgggagcccctgtgttcctagatcccagcctggccgggtggagtagggtggggaggtggtgtccacctgtgtggccccgttctcactccctaacgcccgtcccttctcccccaggtgaggggccttcccatcccaggagggttttctgcttccaaccgatccaggacttacccataaattccaaccgttctttggacaccagccctttcctcccctcttctccccttgccctgcccctctactggaggccacctggagtggcgaggggcctttggggtctgtcctggggcaggggcgggggtgggggaggctcctgaatcgtgggcagaagtgttcacacgccccccctgctttgggaaacgctctcgcttcttccccacaaaacttggtgacttccccaaactaaatcacaccttttcctatatatatatatatgcatatatatatagatctatagacagtatatatatattttgagtacggatcatgggaccaaacttttccgacttccttccatccgagtagagtgaccctgggccggtcactcagcgggggacacaggaagggctgaggttggcgggaccccgcgcaacacataccaggtgccccacccccacccccaccacctcctggctggcacatcccaccaggaacccgccaacacaacatacctccaggacttttggcaccccccaccaccaattctccagggccgttgggctctgccagcttcagtgtccctggtcccagctgcagcctccagaccccacctcgccccttcgtcccagagccctgccctccgggatggatataggtacaacagagacgctctggcctgcctcagcccttctctgctcccctgcccgagtcatagccttactcatgtgaccaatagcccttagctttccgtcggagggggggggcggacagggttggggggagcccccctgcccctcaccaccccctcccaaggccaggcagccattgtcccctgccttcgaatcaccagcctcgaatttaaggtcttgtaaccaggattgccaagcgtagcggaagaccctacccggaccggccaagcacccctttaactggagacgaacttgataatgaccttcatacctctacagagatttttttttttttccggtctttctgagcaggtacaaagaagaaaagagaagaaaaagatggggggaaaaaatcaaaccacaatggatttttgtttcctagttgggagtggggtggggtggggtgtctttgtgagggtgcctctgtacagctgcccaatccgcgacacccacgtcaaagcacagcatcaagttcgtttggacatccggcaaggcctcttaccaaatgaggcgccagataacttaataagctcaaaagaaaaaaacatttaaaaagaaagaaaaaaaaa

SEQ ID NO: 734170 - DNA, 569 bp, Homo sapiens
actggatttggggtatatgggaactctttattttcataatagaatttcatactactattggaaagacagtttattcctgtaagagataattcatgcaattatcataatagtatttcataacactattatgaaaatagtagagttctataaatcaaaaactattttaaaataaaaaaaaatttttaatgtttatgtccctaacaggtggagagaaggtgaaaaagaccaagaaaccctcaaggtttcaggttctagtaatgacgagaactctgctcaggaacggaaggctggctctgtaccgcacagctctaccccatcaacaggaggccaaagactcaccatgcctctggtctgttccactgaccttccttttctacttgctgcttatccacaaaagcagaacatttcattcactagtcaagcccttgtctccgactcttgagttatcagatgggctgttgttgagccaacttttattggaagatgctacagatgaaaagacaagaccttcactaagggtcccttccaaaggtaaaagtgaaaagattcaaaataactcaaagggttta

SEQ ID NO: 734171 - DNA, 904 bp, Homo sapiens
tgttccttagcacaggtggtgtggatttaatttcttctcctggggtgacctacttgtatctagaggggagaaatattgtaatgaaatgctcgttacttacaaaccacaccaaattccaggtgtactgtaccaaatgcatggaaatgagtagaatgtgctctcccagacctgctagccaaggtgaaaatgcttccctgaaattactcatttgcaaatgcctttgaagtcattagataatacacttggcctcaaaggcaccaggcagccaaattttacgttggagctgtgtgtacccaaccgtggaatttgcctcccaaactatagcaaaactgataatgcatatcggttttaaaaagcgaattttcaccttgaatctttctcctataagaccactgggaacagaacgctaatgtatcctggcctccctccaattctgccattatagattcaccttcttaacccataatacatataattccttcttcctagtgcctgccttattgaggccatgcacacatgtgaccactcatccagcatatttgctgggagaactgaggtaccatgacttggtgctgcagttgattagcctagaaatcttaagaccattccaagagcacgattttatggccctctgattcatgctatggatatgtaacatgatttctgatctgtgggagctgccagataggcctgtcccaaataaagatcgtcacaaatctttactgaatgatattattgggaagtgcacaattatggcaccctgtaaccacctccagaactttccatggtaggcatgggcccaccccattcccttaccctgaattggttcaatactgtatctggacataacaggttacttccaaccataatctgcatcgtggatagacataaggaaaaacagctt

SEQ ID NO: 734172 - DNA, 530 bp, Homo sapiens
  misc_feature (365)..(365): n is a, c, g, or t
cgcccattgggacataacggcagtgcggcgcgacagcaagagaatgggctggaaccggatctgtttccagacgcagaatgagtggctctgtgtgaccataggcagatgctgactctggaagactccgtgccactcctttctagtgccaaacaccatccaaccacaggactgacgtggaagccccaaacaactgagaatgagtggcatgagccccctaaaagcaggcgagagaacgagcaatcaagttctccactgtgtacagacttttcctccccccaatccaaggtcaaagtgatgtgtcttttagaggctttggggacactttttagtaagtatgagcagacaaatgcaatgaatatgctatngaaaaaacccttcttgaactgaggagagggctttatcactatatccagctaaggatttgtatttgaatcatctgtaaagtcgcactcttacaacaagcttctgggttttaaatacctccgtacagcaagtaaacgttccccgctttctgttctcagtgtcctcgg

SEQ ID NO: 734173 - DNA, 1784 bp, Homo sapiens
  misc_feature (857)..(858): n is a, c, g, or t
  misc_feature (876)..(876): n is a, c, g, or t
  misc_feature (1020)..(1020): n is a, c, g, or t
  misc_feature (1099)..(1099): n is a, c, g, or t
aaaggaatatggaaccagtatgaattaaaatttgtgttttcttcaacattccataacatcactaagaaataaaaaattataaaagctacatggttaaaaagtaccatgctggccaagcgtggtggctcatgactgtggtcccagcactttgggaggctgaggtgggaggaaggctggagcccgggagtttgaggttgcagtgagctgtgatcacaattgcactacagcctggacgacagagtgagaccctgtctcaacaaaaagtacaattgtttgaaagaatgtatacatgttttttactttttagtgaaatatattgtttttaaacattccttggtagagagaatttttttgttggataaaagggaggtatttttgttaaggatatctgggcaccctaaaaatttcatactttatgtccactcattaccgtatgggagaaaagttgctaccattaaagtatgtggtttgtaggagctcctaaaataaaactcttcagttttccaccctgaagtcagcttttggtcataccagattatgtacatatgtagtgggttcatgccatacttttagaaggccagcagagggagcactactcaatgtacagtgtttactgtactgctgagaagactagtattttctatggctcagtacaaaatgaaaacaaaattaaatttcacaactcctcaaaacaaaaccaaaacaaaatttttcattttattcgtgggttcaggtttcagacatgctatttattagtgactgagcagattattttatttctgtgtacttttttgcctatatatgaagactactcaattaccctattttagagggttggtttgtttgtttgttttgcnncagggtctcactttgtcntccaggctggagtgcagtggcatgattgcagcttgctgcagcctcaacgtcccgggttcgacggattctcccacctcagcctcccgagtagttcggactacaggtgtgcgccaccacacccagctaatttttgtatgttttgtngaaatgtggtttcactatgttgcccaggctggtcttgaacccctgggctcaagtagtcctcctgctttgtcctcccaangggctggaattacagatgtgagccaccataccccgttagagttgtgtttttagatttttaagttattatggatacatcctagttgcacatatttttgaggtagatgtgatattttgatacaagcatataatatgtaatgatcaaatcagggtaattggagtatccattgcctaaagcatttatcatttctttgtgttgggaacattccaattccactgtcataattgttttgaaatatatagtaaatgattgttaactataattgccctatagagttacgttgtcagtctacttagtggcctagcaaagaggaagaaacatagtaatttacgcaaattccaggtggaaaatagagaaagtttagagaactaaattagtgtaaaacttaaaagtatttctgactataaattctaccattaaaaacaaaaaagcacccgtgaacccacaaggataaaataatgtgtttgtccctgcccttccttgcatatcctgggtgaggctggttgatggtacattgttgtagaataattgcggaattttatttacctggaagtttgctgagaaaacaatgtctgaggtggtgtaagtttttggaaagcaaacatttgacagagttctcataattgattttcattttccaccctttattctgttaaagttctgaaatattgcataaggccatctg

SEQ ID NO: 734174 - DNA, 1700 bp, Homo sapiens
ccccgttccccctccgcctctccctcctgacctacccgagtgctttcctgagtggctccacgtggcctcctgtttctagggatgggcacttctccttgctgccaccatgtgaagaaggacatgtttgcatcccttcctgccatgattcctcaactggctcactgccttctttatcccagcctccattgcagtgaggttgggggccatatgactagtgctgcccaatggactgtgaacagaaatgacagcatcactcgcatggagactcctccatctctgtcttccctgttgtgacagtctcagagcctacgttctttcaatggctgggctacaagatggtgacaggctgcccaacctgacacagcaagaaggcggccatctgcaaaccagaaagagagccctcaccaggaaccggatctgctggcaccttgatcttggacttcctatcctttagagctgtgagaaatgtcgcccccaggtcaatgggatatttgttacagcaccaggtactgcctgagaactctacctttagggagcctgcgtgctgggtcactggggagacaatgaaggtgcttgacacccagtttgaatattgtgttcactgcaaagctgactgctgttgaaggatagccagtgagaggtcatggcaagccatcagaagaagcagaagtcatgagcatgctgaagctatgaggccaagacaaaatgtcacattgccacaagaagagggacaaacaggcaacaggcagagcccatgggaatcagtaatctcctgctgacactgagcccttgggactaactcagatccagtactactctcttgggacatgttctgactccagctcctgtccttggggtccactgagatccctgtagccttgtaataagcccacattatcatatttcccctgccggctccaccctagagcatttccaacaatttccagtgcttttccccttctcataccactgggcctttgcacgtgctcgtgcctccccaacttgccctgccttctccttcacccagacaactcctactaaatctctcagactcctcagctgtgtcccttcctaggggaggactctcttccctccagtgagcccggtggtcctccctgggatcccctgctccttgtcttccctgccgtccttactgccatccttgttctctactcagaaggaggcagaggctggcctgcccccaatcccctgtagactgaccagatgaattgacctgggctgggcagggcaggcgtgtttgaccagttgtctgggcaccccaggcctcagtccaagttgacacataaagttcaaccgcccccgggcccctttgttgtaatttgtgtatgaataaaacacagcatcccactccaggtatctgagggtccctggaggcaggttttgtgatccctttttacagatgaggatgcggaggtccagttgtcactcacccagatcacactctcatctgctgatgggaggagtatttgatgggatgtgtgagcccggccgtctcccttgggacacatcagctcattaaatttgccagcccctgcctgaaaaagtatttaatttgccttttacaatgcacccattgcaagttaattaactggcaattgaaagttataggtggcattagaatttattaataacattgggaataaatctccctggaattcaattaactgaaaaaaaaaaaa

SEQ ID NO: 734175 - DNA, 458 bp, Homo sapiens
ggctctcgatggcgccagtgtcctggatcacccccggcctgaaaacaacagcagtgtgccgaggtgtgctgcggggtgtgacttttctgctgaggcgggagggcgaccatgagtttctggaggtgcctgaggcccaggaggatgtggaggccacctttccagtccatcagcctggcaactacagctgcagctaccggaccgatggggaaggcgccctctctgagcccagcgctactgtgaccattgaggagctcgctgcaccaccaccgcctgtgctgatgcaccatggagagtcctcccaggtcctgcaccctggcaacaaggtgaccctcacctgcgtggctcccctgagtggagtggacttccagctacggcgcggggagaaagagctgctggtacccaggagcagcaccagcccagatcgcatcttctttcacctgaacgcggtggccctgggg

SEQ ID NO: 734176 - DNA, 1005 bp, Homo sapiens; identical to SEQ ID NO: 309365

SEQ ID NO: 734177 - DNA, 862 bp, Homo sapiens
gaataagccactgaggtcagtcctattattatccccatcttatagatgaagaaaatgaggcaccaggaagtcaaataacttgtcaaaggtcacaagactaggaaatacacaagtagaaatgtttacaattaaggcccaggctgggtttgccctcagttctgctatgcctcgcattatgccccaggaaactttttcccttgtgaaagccaagcttaaaaaaagaaaagccacatttgtaacgtgctctgttcccctgcctatggtgaggatcttcaaacagttatacatggacccagtccccctgccttctccttaatttcttaagtcatttgaaacagatggctgtcatggaaatagaatccagacatgttggtcagagttaaagatcaactaattccatcaaaaatagctcggcatgaaagggaactattcctctggcttagtccatggatgaagactttcaattgctataaagtggttcctttattagacaatgttaccagggaaacaacaggggtttgtttgacttctggggcccacaagtcaacaagagagccccatctaccaaggagcatgtccctgactacccctcagccagcagcaagacatggaccccagtcagggcaggagcagggtttcggcggcgcccagcacaagacattgcccctagagtctcagcccctaccctcgagtaatagatctgcctacctgagactgttgtttgcccaagagctgggtctcagcctgatgggaaccatataaaaaggttcactgacatactgcccacatgttgttctctttcattagatcttagcttccttgtctgctcttcattcttgcagtattcattcaacaaacatta

SEQ ID NO: 734178 - DNA, 806 bp, Homo sapiens
gaataagccactgaggtcagtcctattattatccccatcttatagatgaagaaaatgaggcaccaggaagtcaaataacttgtcaaaggtcacaagactaggaaatacacaagtagaaatgtttacaattaaggcccaggctgggtttgccctcagttctgctatgcctcgcattatgccccaggaaactttttcccttgtgaaagccaagcttaaaaaaagaaaagccacatttgtaacgtgctctgttcccctgcctatggtgaggatcttcaaacagttatacatggacccagtccccctgccttctccttaatttcttaagtcatttgaaacagatggctgtcatggaaatagaatccagacatgttggtcagagttaaagatcaactaattccatcatttcaattgctataaagtggttcctttattagacaatgttaccagggaaacaacaggggtttgtttgacttctggggcccacaagtcaacaagagagccccatctaccaaggagcatgtccctgactacccctcagccagcagcaagacatggaccccagtcagggcaggagcagggtttcggcggcgcccagcacaagacattgcccctagagtctcagcccctaccctcgagtaatagatctgcctacctgagactgttgtttgcccaagagctgggtctcagcctgatgggaaccatataaaaaggttcactgacatactgcccacatgttgttctctttcattagatcttagcttccttgtctgctcttcattcttgcagtattcattcaacaaacatta

SEQ ID NO: 734179 - DNA, 792 bp, Homo sapiens
ttttttttctttttagagatcaggtcttgccatgttgcccaggctgaacgtgaactcctgggctcaagtgattctactgcctcagcttcctgagtagctgggactgtaggtgcatgctaacatttgctttgtgtttttattgttcttattgttaattcaattctgaactttttgccagttatcgaattctcctcttaagattttcagacacaataggtgttttgtaacttttttttttttttgagaaatctctcccagagccttagcatatactccaatttgggaataggctgccatctatggccttgtgtacaggctggcttcacctcaaatcaagggattctcttcggctccctcctgtgttgtatctcttgtttgcaatatcccaccttgtcttctttttaagtttactccctcattttggcagagaaagtccctcagctgctttgtcaggaagagtgtgggagaggtacaaatttttgagactttgtatatacaaaaacttcattctactcttacactagatagtttgcctagagagacagaattctaggccattttcattcaacattctggaggcattattgaattgtcttctggacgctaatgtggctattgagaagtttgaagccactctacttaattctttgtgtgtgactgtttctcctgttctctggaagtttatagaatcttgtttttgttttcagtgctctaaaatgtcacaatgatataacttgctgaaagtctgctttcatccactatgttgtacttaatggacactttccttttgta

SEQ ID NO: 734180 - DNA, 684 bp, Homo sapiens
acaaagactagttagtctattaaaactgtgaatgtgtgtagcaattctgcttgtgaagggaaatacactatttaacatgaaattatactcctgacacaatatgctatatatacaaagacctcataactagtaaattttcaacatgtgagttcagtgactagtaagaatgaataaaaatgaagctcctttagttaatctacgcaagggaacatctatttatagttactaattaaaggactctgtaaagcaggaaaaccatgcatgggtaagtgggtagggcagcaaactgttctgtggatttgggcctcatgacggtttaaaattgccttgcaatttgatctcaccagtggctgacatttgactatagtccatttgccagccaaggtaagtccctacccattgctctctgcagctggccccaagctcctgctggacaggaatgccttaaaggggacccacactgggaggcagttcagaaagagggaaaggcggaggaggtgtaagtaggacaaagaaaagtcaaactacagaggaatcataaagaaaataatagaataaattgagaacccaaggggatgggaaaaaatagcaagcaaggagagtgagaaagaagaaaaggtaatagtgtaagtagaaaaaactgttagtggaaggcaggttaaatttggaaggaaaaatagaaca

SEQ ID NO: 734181 - DNA, 725 bp, Homo sapiens
aaatatattggctcagtaacagaaaaaaaaaatagcccttgattaaaggtttgatctatcccacgtaagaaagattaaaagcaaagctagaaaagatcagatttgtttctaaataacttatctgcgtcctaaaacaaaactaaaaaatttttttaaatacagtaatgtattaaaacatactgaaactcaatacatacagagaaacgaagataagaataagaagtccaagtgcagcggctcatacctgtaatccaagcacttggggaggccaaggcaggggatcacttgaggccacgaatttggggaccagcgtgggcaacacagcagaaccctgtcctttacaaaaaaaaaataaataatttttttcccctttttggtagagacagggttttactgtgttttttcggggggaagaaaaactgatgtctggaactggcagggaacctgaagagtttatgtggtttaccattgtgtctgtgccttggactctttttagcaagtaaaatctaattgagtttaattgaatgtgttcccaaataaaaggcagagattttcagattgggcagagaaagtaaaaccaacatcaaaaaattaatcttcagtcccagcttactcgggaggctaaggtgggaggatcacttgagcccagaagttcaaggttacagtgagctataattgcaccactgcactgtagcttgggtgacagagcaagaccccatctctaa

SEQ ID NO: 734182 - DNA, 842 bp, Homo sapiens
  misc_feature (4)..(4): n is a, c, g, or t
  misc_feature (23)..(23): n is a, c, g, or t
  misc_feature (719)..(719): n is a, c, g, or t
  misc_feature (726)..(727): n is a, c, g, or t
ggtnttcagccctgttgagagtnggagtcggtgtcgatggtcacagctcagtaactcatcgtcaccagcgagtaccacagagcagacacaactgcacttctctgtagagcctccagtcgatactgagagccactggggcgtctgacacccaagggtgcagacattcactccaagtccagagaccgcgccctttctaaggccctgtctcacagtcgccccgtgctcattgtgccggatgtttccacagccacagagacggtgcgtgaaggtgaggtgcagcctagtgcatatgactgacagaaacgtgaagccacagtggacgcctggatgagacacagatcaccttccaaatctgagtgtggccttgggaccaaccaggcagccagggagaaggcagagaccagagggaacccaggtgccctcaatcccagcctcctctatcccagcctcccaatcccagcctccccaatcccagcctcctaatcccagcctcctccatcccaggacccccactcccagcctcccgatcccagcttctctgatcccagcctcccctaaaacccagactctatgaatcccagcctctgaggtgggaactgttagtaaccccactccatggacaagaaagctggggcctggcgaggctaacagactatcctgatggtgtgagggagggatcggcctctgagggctgcttccacccattttcaccagtgggntgcaggnntccaggggccacttttccttgcagtctatgctcattccaagccatcctgcagctccagaagctccggagccgacagcactgacgagaagcgatggagcctgcaatgcagggtgag

SEQ ID NO: 734183 - DNA, 776 bp, Homo sapiens
gtactttatgttgtatcttttagcctaacctttaaatattggattcctaaggtcccttttatcattctgtattctcccttaagaaggtttttatcctctctcattcactgggttatctatttggtgtcacccccaggtaatatctagctcacactttcttcctgagttcaatacctcaaagtatgtttgtatacatgacttacctcatgtgggtgcttcataggtactggaaactcacatttgaaatagaagttatcttcctctcctctaaaatgtcttttaacactgcttctgacttccctgacctcagtatataacattgccattcatctgcctggtccctcaagtgaaaaaacacaaaaaccatcgtatgctcttcctttccctttgttcccctcccctcacatattataagcccctagttcctgctattattaatgtcattaagttctcctaaattcagccatgacccttcccttctgtctcttagctcaaggcttcttccggaacctcatagctgattgtcttcttttgggcattgcttttctcaagtcattttgtacactgcaactagagtgaactttttataaaaggcagcctgatcatctgtcctacttgaaagccccagtagcttcccatttgctcttgggatgaagtcctagtgaagggttatatgctcatctttagttcctctaaacagcttccctgaccctctgcatcttctctgatagatttggtgtgcctttttataagctcctttgtgcttcattacgtac

SEQ ID NO: 734184 - DNA, 2582 bp, Homo sapiens
tgccctctcccgatgtcagttaccaggctttgctaataaaacgtctctcccggctcttccagagagccagccgcagagtctctgccgtctccccgtgcgctcaagcacaagcccccaactaaaagccttgtctggaaaatctgcttggtgccataacagattatctggtgagccaggtaggagcacaaggagtaatttccctccctgcaggggaggcttgtgagcctgcgagccggagggaggccccactgattcagcgctgccaccgcgactggcgagttttcctctagtctcgcgactggacactggtcagtagaacctggacctgctgtaaggctgaagaagaaaaagaaaccatccaagctggcactcggttttggggagttctcttcactgctcacgccggccctcttgtgtgacctgtactgttgtgctgtgtggggctgggagccaactctcttttcgtcgcctgacacctgtgcttgcaccctgcccctggtcctttaataagacaagcagacacaggggctacagtcatgggcaatgccccaggcatcttccaagactcacacctgggatgtatcatttctaaatggaaggaatccaaatcagatggtttaaagaaaaagaaactccagcctgggaaacataggaagactccacctctacaaaaaacaggaaaaatgagccgggtgtgggggtgccttcctggggtctcagctactcagaaggctaaagtgaggatcgcttaagtccaggaggttgaggctgcagtgagttgtggtaataccatagcactccaacctgggcaatggagtgagaccctgcctcaaaatcaaattttttttttaattaaaaaaaaagaaactgattttcctctgtaatacaacctgccctagtacacattagatcaagaaaaatggccatgggcagaagtggatcttctagttttaacactatcttaccgcccgacctattctgtgaatggacagagaaatggggagagatacctagctacaagcttttatgaagttatgctaggacccagagctactggattcttgtcaggtgtgtgtggcccctatttccaggttcctcctgaaggaacctgaagaagcggacctccacagcctcaggccccgagcactccctccctaccctaagcaggcctcctggggaggggagcccctgtgctgtccccaacagcgctccaatcggactccaaacaggcaccctcttttgcttccccactggcccagggctgttttcccctcagagaaatggatggaaacgggggagtgacaaggatccaagttcctttttttggtggtggatctaggactatgtaaaaaacactttggtagattttcagaggatcctggtaagtttagagatgaatttgttaaactaaatcttgccttttcattgacgtggcaggatgttatggtcactttgcagtactgatgaaaagcaacacatatttggaaaggctaaggaatatgccaatagccaggtggtcactaaagaccaatatgcagtcatctgtttagggggagatgcggtcccaggcatagtctccacgtgagtgagactatggagaaaacctagaaaaagctagaatgagccactttgtcacctgcctgactgaaggaagaaggaaatgtatagtaaaacctgtacactatgacagggtcaagaaaattacccagagaaagaaggagatcccagtagtcttcctcaatcgagtccctgaggcccttgggaaatgcacccatgcagacccagaggcagcagaggggaagcatcgcgtgccatgcattttatccttcagtcagctccggacattagaaggaaattacagaaaatttggaggccagaccccagaccctgctgttgactttggcagaggcggcttttaaggttttcaataacggacaggacacagatggcaggtaagaagaggagactgaccaagacagcacagcttctggctgccctaattcatccaccatcttcagggtgaccctaggattctcaggagaccaactaatcgaagacagccaaccttggatggagccaatgtgcctactgcaggatggagggtgtcactggaagagaggctgccctgacctccttaaaacaggacagccggcaggcaaccctggccagccgccactcctcaccaagctttcagatgagattgatacacaccgcctgacagcaccctggctctgactgcagcacactccatcgtcatcacaccacggagcctcaggtcacccttgatgtggcagttctaggaactggccttaggaaatctaactatgaaaccaaggttatggagtatcccacctcaggaaggaacactgaacaactgattgacagtcttcttgccgccagccagaccaccaagtggcccattaaccaagagaaccagcgcaaccagatacgctgacccgcatctcctacctctcatgtgctttgcccagcccagcctgcataccttactcatgatgtcaattcccaagtttcgctaataaaaacatctctgcaagcctcttcagggagccaacaagacagtc

SEQ ID NO: 734185 - DNA, 7971 bp, Homo sapiens
tgccctctcccgatgtcagttaccaggctttgctaataaaacgtctctcccggctcttccagagagccagccgcagagtctctgccgtctccccgtgcgctcaagcacaagcccccaactaaaagccttgtctggaaaatctgcttggtgccataacagattatctggtgagccaggtaggagcacaaggagtaatttccctccctgcaggggaggcttgtgagcctgcgagccggagggaggccccactgattcagcgctgccaccgcgactggcgagttttcctctagtctcgcgactggacactggtcagtagaacctggacctgctgtaaggctgaagaagaaaaagaaaccatccaagctggcactcggttttggggagttctcttcactgctcacgccggccctcttgtgtgacctgtactgttgtgctgtgtggggctgggagccaactctcttttcgtcgcctgacacctgtgcttgcaccctgcccctggtcctttaataagacaagcagacacaggggctacagtcatgggcaatgccccaggcatcttccaagactcacacctgggatgtatcatttctaaatggaaggaatccaaatcagatggtttaaagaaaaagaaactccagcctgggaaacataggaagactccacctctacaaaaaacaggaaaaatgagccgggtgtgggggtgccttcctggggtctcagctactcagaaggctaaagtgaggatcgcttaagtccaggaggttgaggctgcagtgagttgtggtaataccatagcactccaacctgggcaatggagtgagaccctgcctcaaaatcaaattttttttttaattaaaaaaaaagaaactgattttcctctgtaatacaacctgccctagtacacattagatcaagaaaaatggccatgggcagaagtggatcttctagttttaacactatcttaccgcccgacctattctgtgaatggacagagaaatggggagagatacctagctacaagcttttatgaagttatgctaggacccagagctactggattcttgtcaggtgtgtgtggcccctatttccaggttcctcctgaaggaacctgaagaagcggacctccacagcctcaggccccgagcactccctccctaccctaagcaggcctcctggggaggggagcccctgtgctgtccccaacagcgctccaatcggactccaaacaggcaccctcttttgcttccccactggcccagggctgttttcccctcagagaaatggatggaaacgggggagtgacaaggatccaagttcctttttttggtggtggatctaggactatgtaaaaaacactttggtagattttcagaggatcctggtaagtttagagatgaatttgttaaactaaatcttgccttttcattgacgtggcaggatgttatggtcactttgcagtactgatgaaaagcaacacatatttggaaaggctaaggaatatgccaatagccaggtggtcactaaagaccaatatgcagtcatctgtttagggggagatgcggtcccaggcatagtctccacgtgagtgagactatggagaaaacctagaaaaagctagaatgagccactttgtcacctgcctgactgaaggaagaaggaaatgtatagtaaaacctgtacactatgacagggtcaagaaaattacccagagaaagaaggagatcccagtagtcttcctcaatcgagtccctgaggcccttgggaaatgcacccatgcagacccagaggcagcagaggggaagcatcgcgtgccatgcattttatccttcagtcagctccggacattagaaggaaattacagaaaatttggaggccagaccccagaccctgctgttgactttggcagaggcggcttttaaggttttcaataacggacaggacacagatggcaggtaagaagaggagactgaccaagacagcacagcttctggctgccctaattcatccaccatcttcagggtgaccctaggattctcaggagaccaactaatcgaagacagccaaccttggatggagccaatgtgcctactgcaggatggagggtgtcactggaagagaggctgccctgacctccttaaaacaggacagccggcaggcaaccctggccagccgccactcctcaccaagctttcagatgagattgatacacaccgcctgacagcaccctggctctgactgcagcacactccatcgtcatcacaccacggagcctcaggtcacccttgatgtggcaggtaggaaaacagttcctcgtggacagcagagctgcctgctcggtcctgacccagcctatttgcctcctctccaattgcaattgcagggtaatgggaatagacaggtgtcctaaggtaagaaaatttactttccctcttgcttgtgaggccatgtctaggcttttttctcctcatttctgtatgccccccggaatgtcctactccattgctgggtagagacttattaagcaaaatgggagccaccatctccctggaagaggacagactgcaggtagaggcagagccagaacagggaatccacctgctagcactcttaaatggacaggaacttgagacccaaaacatacccaaagaaagcaaggatcacatcaccccttccctatcggacacttcagtcctaggacaggctaataaagttccgccagtaaagacagacctgaagcctgggatgggctatccatggaggaaatcatacctcctaaaacctgtggcactgaatggggttcagccattactccacaaattcctatagcaagggctaaaccctgccagtccccaggcaacacctcggtcctccctgttaaaaagcctaatggagaatatcagtttgtgtaggacttgaagggggttaatgaggcagtcattcccatccacccaacactggtcccaagcttgtctgtgctcagatacctggagatgctcagtttttcactctactacacttcaaggatgctttcttttgtgtagccctctccacccagaatccctgtatctttttgctttgaatggagaaatctctgatacccagaaagccacatagtacacatggactgtgcttccccagggcttctgggaaggcccccacctttttgggaatgcagggagctaagcctacagaatgggacttttattacaatatgtggatgacttgttcattgtcagccaaacatggcaggattcagattttaatatcattaaaaccttgaatttcctggctgagcggtgatacaaggtcagccccatccaaggcccagatttctttacagaagttccgatatctggggttcattctgaccccaggagcccgaacactagttgtggactggaaaaagcaatcacttcattgctggtcccacaaacaaaaaggcagccccagggtttcttgggaatggtgggcttctgtagtatttggattccaaattatggcctgacggctaaacccctatgtgagacccaaaagggggaagaaagagagcccttgtactgggagaagaaatgtcaactatcttttgaacctctaaaaactgagctgggtcaagcccttgtccttggactccctgagaaaaaccacttaccttgtatgttcgtgagagactaggaatagctttgggagtcttaactcaaaggttaggacctgttcagaagccagtggctcatttttcgaaacagacaaatccagttgcacagaagcggcctggctgctggagggcagtggcagccactgccctgctgtttagtgaagcatctaagctgacacagggacaatatacagaagctatgactccccaccaggttcagactgggttagaagtcaagggacaccattggctcactgcagggaggctgaccaactaccaagctctcttattagacaccctggatattactttaagggtatgtcagactttgaacacagcaacctcactcccaaccacagatgatgaggactcacagcatcaatgcacagggcccacaaaacagactccagcaggcctagcttgtgagataagcctcttgagaatgcaaagacggaatgatatcctgatggcagtagctttgtggagggagacccaaaaggcaggacatgcagtagtaagcctgaaggagactacagaaactaaagcccttcctccccaaaatggcacaaaaagcagcactagaggccttaacagagcctcacaactgggagaaagggagggagtaaatttatacaccaactcaaagtataggtttctcctgctgtgtgcccatgcagccatatggaaggaaaagggaatgttaacagttaaaaattccccaggcaaacgtaaggatccaatccaacttctcctggaagcggcacaacttccctgccaggtggcagtcattcactgcaaaggccaccagagggactggtccctcatcagccaaggaaatagggccacaaaacaggcaacctggttataggaatccagcaatgtgttggccttaatgacagaccctaccaaccttcctaatcacctacaatactcacaacaagagcaagaggaagctaaggggcaggggtaccaggaaaacagtgctggatggttcacagatggtgacaagttttattccaggaactgaccagttgaaagttactaagcatctccatgatgccactcattaatggagagatgttttatggaattctgtccataaaatattcaccagaaagaaactaagaaaaagtgtaaaacaagtaacctttgtcagtgaattgtgttcccgaaataatccccacacccatccaattcccccttcttgacttaaactggttcaacacaggggaacttatctgggagaagactggcaggttgttttaacccaaatgactccaaatctagggtacaaatatctcctggtgtttgtggatacttttactggacgggtcaagggtttccctacctgtacagaaaaagcagtagaagtctgtaaaccttcactaaaggaagtaatttctcaatttggactccccaagtcccctcagagtggtaacaggctctccttcatgggtaagattactcagagcctctccacaaccttaggaatagattatgaactggcaccccaatcatcagggaaagttaagatgaaccatacacttgagacgactctagccaaactctttcaggagatgcacgagtcctgggttaagatgctcccagtcttctcagggtccgcagggccccttcgtgcagcctaagacttagttcttctcagatgatctaccagaggcctttcctcaccactgacctcctgttaggtgaagaattacataaaaaattacagtatcgatttaggacagattcaaaaggtgacttcagaatatggaaacaaaatcctgccagtccccactaaggatgggaaaacccctttacaagttaatccaggggaccaagtcctcctaaaggcttgaagggcaggctccccggaggaccaccccttgcttaaatgggagggcccttactgggtgatcctgaccactccaactgcagccaactcacaaggaatcactagctgggtacacctctcccgatcagaaatgctttctcctaaatgtttccagactcgcccagatggcccattttactcctgaaaacctgtggaagacctcaaattcaggagagccaattcatcatcggagaagtaatgtggttagagatcttgagtccaatacttttccttgtattactaattggtttactattattctgttgctttgctcagcctcctccctcaggtaaagacttcgtttgtccctgctgggtataaagatgctactctttactttgttcctactcctccccatcagggcacagggtaggctaggcctactaaaatgagaaacaaactctcttgacaacctttccggcattatagcttcaggtaataatttgtccaactgctgggtgtgctaccatcatccccaggctcagaggggctgcctcttgcactccctaaaagctcaactaccaacttcacaaaagaggtatggaaacctaaaataacctctgcacctcttatggtggacctaagtgtctccctttcctttgaatgtataaacctcattgggctgctaaatgctttggtcaccaaaaagggtggaaaaaagagaagttggactgcctactttgaaatcccaccgggttttctcttagcagtaaagaaaaaccctaatcaaacttgggctcaggaaggctatcttttcccccatgccaaaacagtcatacctctctccacagcttagctgctcacctgaactcctctcgccttgtgtaagtttgtgcacccatggggtattctgttcctttgtggacacccagactgccatctgatcaacagctacccttcagccaatttcacctttctgttacttgcactagcgtgcccttgtgtggataatgtacaacgcaataaggaatgcatgttaggtactttaagtcccagtagaataacagttcataatatcacacatgtggtgaaatctaaaaaggcaatagggctaattttggcaggagttggaatagccccttgggatggctttgcatactgtcagacagctttgagaaactttcaaacccttgaaacactggcaactagtacaggcagagccataaaaggacatcaagcctccctgcactccctagccaatgctgtcttggataacagatttgccctggaatatcttctggctgaacaagggcgggtatgcacagtaataaaccacatctgttgttcttacattaacagttcaggattggctaaactgcaagttcaaaagatttaccaagaccaggcacaatggttcatgcctgtaatcccagcactttgggaggccaaggtgggtgggtcgtttgagcctaagagtttgagaccagcctgggcaacatggctaaaccccatctctacaaaattacaaaaaaagaaaaaaaaattaggtggccttggtggcatgtgcctttattcccagctactcaggaggctgaggtgggaggattgcctgagcccagaaggttgaggctgcagtaagccatgatggcaccactgcactcctacctggatgacagagtgagaccctgtctccaaaagaaaataaaagtaaagattcaccaagaggctacctggctacataatcgtaatgactctactgctcaaaccatctggggctccatcagtggatacctacaaagtatgacatggtttttacctttcttcggaccctaagtggtcatttaattgctattacttttggcgtattgtgtttttaaccttttggtaaagtttgtgtctttcaggtttcaatagctccaagtcaagctaatgatggcccaagaattccaacccataacatcccaggagcaccccagtccctacaggtctttaggacagccagtgagagatttccccaccccctaaagttaggcagggacgacatccctgttcagcaggaagtcgcttcagaagatgagatcttcagccctttctccttaagaatagagggtgaaatctctcagggggaaatagagatagaacagaaatggaatggggttgcttcttcataatacttaaccatgccttctacttaaagttctaggaactggccttaggaaatctaactatgaaaccaaggttatggagtatcccacctcaggaaggaacactgaacaactgattgacagtcttcttgccgccagccagaccaccaagtggcccattaaccaagagaaccagcgcaaccagatacgctgacccgcatctcctacctctcatgtgctttgcccagcccagcctgcataccttactcatgatgtcaattcccaagtttcgctaataaaaacatctctgcaagcctcttcagggagccaacaagacagtc

SEQ ID NO: 734186 - DNA, 511 bp, Homo sapiens
tttcctgctactttcctgcttggtgtcttgcctttgaggtgatgttttcctcagacccctctgtgtccttcttgcttcctgggggacctttgtggaactagaaaatagctgtttactagcctggagcaaggagcctgagtggtgagccggctgcataaggaaggcacagcagctcatgcttccctaatgcttcactaaacatgcaagacacaaaaggacccagagggctccagcaagggtctggggaccgaacgtctaagcttggaaactggctggacttgtatgggtaaaaccaagagtttttgtcttagctctcccgcctcacagctttgaactgggggtggctcttggtctgcatttcacatgcacggcacctggagaagtgctgctagccctggcacctctgtggggttctggccctggcggagactttgccggccacggcttctccaataggttgctggtggcatctccagcaattggtggtcattgagttggagaagaagaaaag

SEQ ID NO: 734187 - DNA, 642 bp, Homo sapiens
ggcacgagggattgaaagcactctgcagataagttactctgtatttcttttttttttttcactttattttttatttttatagacacagggtctcattgtgttgcccgggctggtctcgaactcccaggctcaagtgatcctcccacctcagcctcccaaagtgctgggataacaagtgtaagtcaccacacccagcctctgatttcttttctaaggggatgacctatttctgtttataatccaaaatttatcagccttggccctactgatattttgtactgcgtaattggagggaatgtcctgtggcagtgtagggtgtttgggcagtatctctgggccctccccactacatggccaatagcaccctcccagaccaaatgtcctctgggggacaaaattgccccttgttaagaaccactgttttaatctatgtgtaacacaaatttcaaaacactttggtgagtacatagcatggattatgattttttaaaaactttgtttctttttaagctgattctattctagtcatggtcatattttttaaatctgtagcttttttcctactgaagagacttttaaaaaacaagaatatgaaagtcttctgtgtccaccatcaggccaaactataatgctttaagagaa

SEQ ID NO: 734188 - DNA, 536 bp, Homo sapiens
  misc_feature (1)..(1): n is a, c, g, or t
  misc_feature (21)..(21): n is a, c, g, or t
  misc_feature (32)..(32): n is a, c, g, or t
  misc_feature (533)..(533): n is a, c, g, or t
nttcggcacagcgggaggcgnaggttgcagtnagccgagatcaagccactgactccagcctggcaacaaagcaagactctgtctcaaagaaagaaggaaagaaagagagaggagagggagagagaaagaggaaggaaaggaaggaaggaaggaaggaaggaagcaagcatcccatcactgagacttaataattatcaacccatggttttttgaatttcacgcacatcctcactcacttccccaccccacttcacatcaagctttggtaaatctcagacatcacagtgtttttttctttgtttgtttgtattttgagatgggagtctcacttctgtcatgcggggagtgttagtgggctcagtctcgggcttcactggcaagctttcgcctcccaggagaatcacttgatcccgggaggcggaggttgcagtgagccgagatcaagccactgcactccagcctgggcaacaaagcaagctctgtctcaaagaaagaaggaaagaaagagagaggagagggagagagaaagaggntgg

SEQ ID NO: 734189 - DNA, 371 bp, Homo sapiens
  misc_feature (1)..(1): n is a, c, g, or t
  misc_feature (21)..(21): n is a, c, g, or t
  misc_feature (32)..(32): n is a, c, g, or t
nttcggcacagcgggaggcgnaggttgcagtnagccgagatcaagccactgactccagcctggcaacaaagcaagactctgtctcaaagaaagaaggaaagaaagagagaggagagggagagagaaagaggaaggaaaggaaggaaggaaggaaggaaggaagcaagcatcccatcactgagacttaataattatcaacccatggttttttgaatttcacgcacatcctcactcacttccccaccatgcctgacctggtatggtattttgttaaacagaacctcaggccagacagatcttctgtgcatggatgtagtctatattggaagtaccgtcgaggctgaaggcatcgtggctgtgacgcccgacac

SEQ ID NO: 734190 - DNA, 723 bp, Homo sapiens
tggatccagtgtatgctgcttgggtgatgggtgcgccaaaatctcagaaaccaccactaaagaacttattcatgtaaccaaggaccacctgttaccccaaaagctattgaaattttttaaaaaagaaaattggaatagtatactttcatttcctctctcccagccagatacttctgggatttgtaggattatagttttctttacatttaggaaagttttgggccattctttttttatttttctgtctctctttttccctctttgggggacttattcctccttgaagttttctcataggttcactgatgtctcaaatttatgaatcttctctttgggtgatgtctaatctgtgttcacttcccatccattttagctttcattcctgacactgtaatttgaatctctacaagtgtagtttgctttaaagaaaaatcttccggccgggcgcggtggctcaagcctgtaatcccagcactttgggaggccgaggtgggcggatcacgaggtcaggagatggagaccatcctggctaacacggtgaaacaccatctctactaaaaatacaaaaaaaattagccgggcgcggtggcaggcgcctgtagtcccagctattcgggagcctgaggcaggagaatggcgtgaacccgggaggcggagcttgcagtgagccgagatcaagccactgcactccagcctgggcgacacagcgaagactccgtctca

SEQ ID NO: 734191 - DNA, 942 bp, Homo sapiens
tatatcattattttgaatggaggcatggtcatttggaaagtgacaaaatcataagaatcgactgcattagaagcccactttatttttttcattattttttgtcgaaacattctctatatttaatttcaattttataacagattacaggaagatgcttaagaaacaagtacaacatttgtttcagtatgtctttaaatgaaagacttttaagtatgtaagcaactatataataaaaggtttccaaacgcagcctgtaagaaatcaggcaaattttactataagcaataaaccattccgagctttccagacagtgtaccagtagctgtaccagtgggcaataacctttaaccaaacaaaaacaaacaaacaaacaaacaaaagcactttgcaatttgttgctgcaaaatggggagaaaaaaagagtatataaacttgatggaatcacaactgtcaatataatttaagggaaaataaagtcgataaggttgatggtgtctattgtttggaaagtcgaattcggctatttgcttggggctctagagaccacaccactgaataaacaaaactctgcagagtctagctatccgccaacagggggtgccgtccaaattcatggcaaataaagggcatttggtgctcaccattcacaacaggcgggcatttatgtggatgaagtacaatttcttcagcaagctcagcaaaaactcttaaggggcaaatatgaactctgcattttaagaaaaatagaaaacggaaacacaaaatcctaaaaagtatatgaaggctctgcattagcacactggcatcaaaccacacatccacagcacatcctaattctatgggaaacaatccttgcttatcggaggtgcatatctaaattcaatagcttaccaatatattcttgggagtaggccaaaaggaaacagaaaacccacattaaaa

SEQ ID NO: 734192 - DNA, 919 bp, Homo sapiens
tgtataaagaatgctttaagttgtcttctccgactgccccttattcacttaaagacagactcatatgactggggcagtgacttgtagagcttctggtcctttgcaaataccatgctgtcctgtcttaaaagagctgactaaattaaaaaaaaatccacctcaaaaagaagtgaatggctgttatgatcacctcagaagtatctcagggcaaatatacacacacaccccttcatctgacacctgtggcttttaaaaagaaagccagataacggatagccatttaatcagtttgtatccacacaagcacttctccgatttccctcatgcattaggtaatgacactctcccctgagattgatatgtatattataattaataactagcgcagcgtgttctccaaaggggcagctgcaggaggaataccacagcctctgctgtgacccgcagacctcagtgggagggacatgggacatggtggctcgcactgtgttgaccagcagcccctgttcattgcatggctgggtctggttcctacctagtgggtcaaggctgatatattaaagttctgatgttttgtctcaaaaagaccaatatgacctagttggagtacgtatatataaatgtgtatgtgtatgtagcattctatattcacaagcctttaagtgatttttctaggaattaataagaagtaaaggccaggcacagtggctgcacttgtaatcctagtgctttgggaggctgaggcaggaggattgcttggggtcaggagtttaagaccagcctgggtagcatagctagactctatcgctacaaaaaaatgaaaatatttagctggccgtggtggcacatgcctttagtcccagttacgtcactccatacactccagcctgggtgacagagtaagaccctgtttctttaa

SEQ ID NO: 734193 - DNA, 1802 bp, Homo sapiens; identical to SEQ ID NO: 48087

SEQ ID NO: 734194 - DNA, 5538 bp, Homo sapiens; identical to SEQ ID NO: 54853

SEQ ID NO: 734195 - DNA, 745 bp, Homo sapiens
tcatgcagaaaagtcagtactgagcctggaggatccttgagctcttcatcttaaccttctccttgaagtgccaaaattgctggccagcccctcagagcaggagcagccatccttgtcctgacagtccacccagggcagcagtgagcctccctgtgtgggatgggaccaaggcttctgtctgattcccaaccctatccagccccctctctccagcccttcccacctgtttgcctctacccgcgtcagagttctgacagtctaactctctcccacactactgctctggaccttgacgcagcaaagcagtcacagtcgtcaacccactggaggacacatagcctggagcccaggtgaggcttgcagactcagtagcttggagctatcagatgggccatcctgcattactgcaagccctgcccagaggctgagtgaaggccatcaggctgaaccgagccacagctctgaaagaatgccgcagctcagtggctcccagctttgccgcacctcacaatcacctggggagctttgaaaattcccactgcctgggctgcacaccctaccagtgaaatcagaatatctcagggtgggagtcaggcagcagtcgttttggttttgttttttcttttaaagaacccaggtgatgtaatcccagcactttgggaggctgaggcaggcggatcacaaggtcagcagttcgagaccagcctggccaatatggcgaaaccccgtctctactaaaaaataa

SEQ ID NO: 734196 - DNA, 557 bp, Homo sapiens
tggactacaggagagaaaaaaaagaagggagggatacagaagggattcatatagtgagaagaccatgctctctccaagccagctttccagaattcccttcaatgtgccttgggagtctcacctccttccttgccatagtcccggcagcctccatggtgccgaggtagaagtaggtcctcaggtccctttaactgaattgagtcatggctcaccaccactaccaccagcaaacgccctctcttcttgctgccgcagcacctagggatttcctattccttctcctcaccagctaatcacaatctacctatagcctcagtagggggtctctatgcctgatgcctccattcacacctctggagctcctctcctgccctcttctgctgtggtacattggcctctcctgctcctgtccatcttcacaactgtcatttgcccatccctaaatccatcatccttgcccaaaagattcccactgcccagggaaggagtcaggaagaacaggaagaactgtaagaagatacatagagcatgtttggaggcctaaagaaataaagtta

SEQ ID NO: 734197 - DNA, 435 bp, Homo sapiens
  misc_feature (12)..(12): n is a, c, g, or t
  misc_feature (420)..(420): n is a, c, g, or t
ccggaaaatatnccatatttccgagtaggaaagttggttttaaccggaagtgtaagaggaaagattatggcccttaaatggatttttttttccccttaatgtattagggcaaaatccctcaatgatgatacctgctctcaaagaatataaaattgatgagaaaaactttgtggtggttatggtgaccaaagtaagtttcaacctcattctgtatatctttatgcatgtaggtctttttaaaaatgatgatcacaagtccacacaatggacacagtttatacacatccatagtggtgtacacttaactactatgaaaggtttttaagaatttaccttaagtgaaacataaagttattaatgttttacattaattacacattaaactataatatagttttaataaaattttatgtaaattanaacaaaagaaaaaaa

SEQ ID NO: 734198 - DNA, 1311 bp, Homo sapiens
gaggccgcagaccctgcccagcagccagcacctggcacaggccctgcagccgagctgtacagtggcaccatgcaggtcaccctgaagaccctccagccgcagaccttgacctgcaagatagacattgaccccgaggagacagtgaaagcactgaaagagaagacggaatctgaaaaggggaaagttgcctctctggtagcaggtcaaacattaatttatgcaggcaaaatccctcaatgatgatacctgctctcaaagaatataaaattgatgagaaaaactttgtggtggttatggtgaccgaacccaaagcagtgtccacaccagcactagctacaactcagcagtcagctcctgccagcactacagcagttacttcctccacaacaacaactgtggctcaggctccaacccctgtccctgctttggctccccctttcacacctgcattcatcactccagtatcagtgacagtgtcctctgaacctgcaactgctagtgcaactaaacaagagaaacctgcagaaaagccagcagagacaccagtggctactagcctgacatcaactcatagtacatcaggagattcttcttggtcaaacctttttgaagatgcaacgagtgcacttgtgatgggtcagtcttacgataatatggtaactgagatcatgtcaatgggctatgaacgagagcaagtaattgcagccccaagagccagttccaacaaccctgacagggcagtggagtaccttttaatgggaatccctggagataaagtcaggttgtggttgacccccaccaagcagctagtactggggctcctcagtcttcaacagtggctgcagctgcagcaactacgacagcaacaactacagcaacctggcttcccaagagtggcttgcaaaaactacctttacatttttactgaattcactcttcaacaagttctagaatggcatctacgcctgccaattcacaaaaactgcttttgtaagaccatcaacaaccttcatggtaccaatttcaaagatccattttctgaccttatctttattgaccatctaacggcatctagtgatatctttaatgaaataagacccaattctctaaaattggctgatgcaaagaatctccaaatgggagagaggcggttgtgcctgtaaacttctctccattcccaagatgcatatttatttcctttgggagacttcccagtaaccatatgccacacagaagcccctgttccttctcttctctaacttctagttcagatgtggtggacttatctctcagtactcttaattcagatgt

SEQ ID NO: 734199 - DNA, 456 bp, Homo sapiens
ccagaaactggaagctctccttgcatttttattggttttgctttatttgaagtttgtttttgtccattttacttcatggcttttatcagtgtatctggtgtgtcatttattgctctttatcttgatttttttaactttttaaaaatttgcaaaatctatgaaagtataaatcagtataataaaactccttggatgggcacagtggtttatgcttgtaaccccagcactttgggaggtcgaggcaggaggatctcttgagcccaggagtttgagaccagcctgggcaacgtgctgaaaccccatctctacaaaaaatacaaaaattacctgggtgtggtggtgtgcacctgtacccgagctacccgggaggctgaggtggagaatcacctgagcctggggaggtagaggctgcagtgagccatgatcacaccactgcactgcagcctaggcaacaga

SEQ ID NO: 734200 - DNA, 715 bp, Homo sapiens
gcagcaaaggatgaagaagggcaaaatgatgaaaggtgaggtggaaagaggttatgagatggtaaagaaaagttaacttctggcacttgattgccacttccgtcaggctggtcctgcctctctcccttgccttctgattgtttcatttcctgtttatttgatcatatctgaattagttcactggttagcctcttccttagttcccacttccttaccaaagccctaattatatttcctcttgtttgccttttctctcctactcttctctaacatctgcagccacactctccattcactccatgctgacaaggcagtggcaaacacttttctctgctgccagccactccactgttgactggattgctgccagccccaggcaaacctgtgaagttgtttcatactctgcttctctttgagtgcctccttctctccttcctcttcctttctgggctccagtctttctcttcacttgtgcttgtcagaacctccctgtgatactgcctccaggcatttcccccatgttggctcaccgcactattatctttgcttatcaacttgcattcagctggctggcatgtttcaaaaccacactgccctcccaggcctgtgtgccttttgagaaagaccagtgctggatgagcctctagtaatgacaacattttagttgttagtggtataatacggaagagatattttgcacaggctgctttggaga

SEQ ID NO: 734201 - DNA, 425 bp, Homo sapiens
  misc_feature (6)..(6): n is a, c, g, or t
  misc_feature (76)..(76): n is a, c, g, or t
atcccnatttccgagtagaaaggtggtttaacctgaagggtaagagaaagattatggcccctaaatgatttttttntcctcctaatggtattagggcaaaatccctcaatgatggatacctgctcctcaaagaatataaaattgatgagaaaaactttgtggtggttatggtgacccaaagtaagtttcaacctcattctgtatatctttatgcatgtaggtctttttaaaaatgatgatcacaagtccacacaatggacacagtttatacacatccatagtggtgtacacttaactactatgaaaggtttttaagaatttaccttaagtgaaacataaagttattaatgttttacattaattacacattaaactataatatagttttaataaaattttatgtaaattaaaacaaaagaaaaaaa

SEQ ID NO: 734202 - DNA, 2150 bp, Homo sapiens
catcctggagaagatatactgtgttcactattgaaatgaaaccataaagctagagttaggaagattgaagaaatgaaaaaggagctcacatgattttgtctcaggagaggctcttccaggattctttggagatatggtagattccatagctggagcagggaaaggacaggatgagcctgtgggtgtagaaaggaagggagtgcttgaaagatgatgaggagatgtcagcaggtcacagaaaccctctgaaggaggctccaactggccaggctggggacaatttgggccccaaaataatgacagtaacaaattgtaactcattgaatgaaataggaatccatacattggtaattatataaataagggaataaaaccatgatgcaaaaagggatgtttatgtcatcacgcaaaatatgttcacagaaaatatgtactaattaaaagagggaaaagagtaactttacagtggatgaagcctggcaatcatcactttaagcaagtggtcagagttaatattatcagtaatggtcaaatcaaaaccatatgcaagaagactctaaaatgcaagaagactcctgaagtacttcttaccaaagatgtagaacttaaattcagtcataacaatacatgagacaaacccaagttagagcacagtctgcaaaataactggcctgtaatcttcaaatgcatcaagatcatgaaagacaaggaaagagtgaagagctgctccagttggaagagacttaaaactaaatgcaatgtatgatcctagattggatctttttgctctaaggacattaatgggccagttagtgatatttgaaggggatccgagggttccattgtagtaatatatcagtgttaatttttaaatttttattaggttgggattattttggaaaataccattattcatagcgaatacaaagtagaatatttggggatgataatgcatgattacaacaaatgtttcaggagaaatatgatctttgtagtggtcttgcaacttttctgtaagtctgaaattgtttatgcataaaaggttaaaaaaaggttaaattttgtttttataactaataatggattagggtcatgtgaaagtactttagaggaaatgagacttttgagaacatcatccctgaagacgttgaaacactgagttacctcatggataatttaatagggtatgcagctgatttttctaccttaatttcttgtttgcagtatctacccatacttagaattgtctggtgttaaaatatgcccactgggactttcatgaaattcttttgattttctagaaaattcagtttcaaaggattttttaaatagatattttaagtttggtgtcaacttagataaaatctgtttggagtcccagtgtaagttttagtaatgtgtccaatctgtttattgaaatagtataactttagaatactttctttggagagatgaagattggtatgttatagttcaattcaaagttgttctttctattatgatctattttataattcataaaatctatcttatgattgtcatcataagtgcaatttgttttttgccccattctacctcagaaactaagtatctgggcatcaataacaattggtagtagtgtttgctgctaagccaagtttcaccagtacagtgtggaattattttattgttttttctgtgaacattgtatctgctgttactaggttattgtgaggtattgggccttcatagaaattgcctggaacccttgttcactaaagcctgttacactttttattctctgtgcgtgtaatcagagacttattgatactgacacattcaaggggcattattgatcatttagattgctctaagacctaaggagtcttggccggatgcggtgcctcacgcctgtaatcccagcactatgggaggccgaggcgggtggatcacctgaggtcaggagttcgagatcagcctggccaacatggtgaaaccccgtctctactaaaaatgcgaaaattagctgggcatggtggcgggcgcctgtgattccagctactcgggaggctgagacaggagaatcgcctgaacccgggaggcagaggttgcagtgagccaagactgtgccattgcattccggcctgggtaacagagcgagactccatctc

SEQ ID NO: 734203 - DNA, 422 bp, Homo sapiens
cgtttccagaatcacttagcttctttggctggatgaagcactagccatctcttgctttgacagggctttcctaacttcacaattgttgccattcacagtatgatatttctgaatgacagtcttatccacggagttgtggtcgtcaaaggttacaaaggcaaagccccttttcttgccactgcctcggtcagtcatgatttcaatcacttcagtttttcagaactgtttaaaataatctcttaggtgatgttctttagtgtcttctttaatgccaccaacaaatatctttttcacagttaagtgggcacctggtctttaagaatcttctgttgagacagctctctttggttccacaagtcttctgttcaccttgtgtgggccttgcatttcatgggctgcatcctccacctccacagtggcat

SEQ ID NO: 734204 - DNA, 753 bp, Homo sapiens; identical to SEQ ID NO: 54126

SEQ ID NO: 734205 - DNA, 329 bp, Homo sapiens
ctaatgttaaatgggtgtcttagtccattcaaactgctataaaaatataccttagattggataattcatgaacaaaatttatttatcttggctgggaagttcaagatcaaggccccagcagattcagtgtctggagagggcccaccctgctccacagatggtgccttgttgctgtgctctcacatggaagaaggggcaaggcaattcctttcaacctcttttataaggccactaatcccatttatgaaggcaaagatctcaaaacttaatcattttccaatgtgctgcccccctcttaatactcaccaataaattctaataaactgtcc

SEQ ID NO: 734206 - DNA, 2823 bp, Homo sapiens
agtggagtcaaattaggagagagtgcaatgtgatgtcactgaagaagctcaagcaaatgagaagttgcttacatgcagagaatgaattgtatgtggatgggggttgggggaagcgagggaagagtagagcaggggaagcagtgaagaggcttccaggaattgggggcgggaggctttcagctccaacacacctgcatcgcctcgtctggctgtatgcacgaccctatgaattacagaactgtccagatccacccccatttcagaatgggtacatgatcaactcggattacagcgtggggcaatcagtatctttcgagtgttatcctgggtacattctaataggccatcctgtcctcacttgtcagcatgggatcaacagaaactggaactacccttttccaagatgtgatgttgctgatgccatggtcagctgtctgtcttcctggtccggcttggaccagtgtctcccaggcagacagaacggcaccatctactcccctggctttcctgatgagtatccgatcctgaaggactgcatttggctcatcacggtgcctccagggcacggagtttacatcaacttcaccctgttacagacggaagctgtcaacgattacattgctgtttgggacggtcccgatcagaactcaccccagctgggagttttcagtggcaacacagccctcgaaacggcgtatagctccaccaaccaagtcctgctcaagttccacagcgacttttcaaatggaggcttctttgtcctcaatttccacggagattttgtgaagtaccagtgccaccccgggtacaccttggtggggaccgacattctgacttgcaagctcagttccccagttgccagtttgagggttcctcccccaacatgtgaagcacaatgccccagcaaatgaagtccggactggatcatcgggagtcattcctcagtccagggtatccgggtaattattttaactcccagacttgctcttggagtattaaagtggaaccaaactacaacattaccatctttgtggacacatttcaaagtgaaaagcagtttgatgcactggaagtgtttgatggtaagtttctttaatctttgtagagcagtgacctcggcatcattgataaaaacactattacaatgttttagtaacataaagactggaatatattcttgagttaacttatgttttcccaaagcaaacaaaaaataaactagtttggggttatgcattctcaagagatcaagcagtctgtaaaacattaccatatgattgttgtactgtattagtccattttcatgctgctgataaagacagacccaagactaggaagaaaaagagatttaatggatttacagttccagatggctggggagacctcacaatcatggaggaaggcaaggaggagcaagtcacattttacatggatgacggcaggcatgagagacagagagagagaaagagtgggtgcacgcacatgagagagaacttgtgcagggaaaaatcccatttttaaaaccatcagatcttgtgggacttactatcaggagaacagcatgggaaagacccacccacatgattcaattacctcccaccagatttgtcccacgataggtgggaattgtgggatttacaattcaagaagagatttgggaggggacacagccaaaccataggattgttaacattgtcacttttcaaacagttagaatgcttaggaatacaccctgaaagtgtaccaaattttctttaaccattatttgatttttttaacacagtgatttagagaagatgatctcaataactctttctctctctcctatatgtaatatcaattcacaagatattttaggaaacttaggcctagaggtatttttgtcatctaaataattattttactggaaatatgtaaaaatcatggctcacagagatttctagatgataaatgctacaggagtttttcaagtgtgattctttgaaatagtgaaatatggttaactgaacacgtgcaatactgttttcaacaatagtcttatgatttttttgcaatttcaatgaaaattttaacagtgatatgattaaaagtaatatgtggttgaatcgtcaatttgaaatggaaggaatgttaatatttctctttgtgtgaaaccgtcatagcccagaaaattagaccagttacaattatggctgtacataataacagggttttcacatattttgaaagatttgtcattgagttcagataaattacaatcaattcagtgaaaaaaataaattattctaatggatttgatgtgtgtttgtattcactttactgagttgatgagtcaaattgcttgtatggatagacatcactgaatcaattaatgtattttcaaaaatgaattaataaattggaaattaaactcacatttttgtatatagaagcagaggactggagagcaatattttcattttcagagcatggctttttaaatgtgtatattaaaacaaacatacattatttacaactttttctttagtctgtagagtagagagaagtaactcattacgcaagtataaaaatggggtttctcttgttgaggaagaagagaggttcttctgggcaaagtcctctgctagtagtcttaagtgggaatcatactgaacaatcaaattttacaagcaggagtaatcagttatatctccgctggtccactgaccatgccaccagtaagaaaggattcaagattcgctatgcaggactaaacgcaaatgttggcatgaaacctttatcatactgccagctaagaacaggagcccaacaaaaaaggaactc

SEQ ID NO: 734207 - DNA, 283 bp, Homo sapiens
tgctttttcctttcattgacttgtttatacagggatagaaactatcctattgcagttggaatcattttattaaagcaaacttttgctggtacttttctctccagcacaatgccccagcaaatgaagtccggactggatcatcgggagtcattcctcagtccagggtatccgggtaattattttaactcccagacttgctcttggagtattaaagtggaaccaaactacaacattaccatctttgtggacacatttcaaagtgaaaagcagtttgatgcactgg

SEQ ID NO: 734208 - DNA, 1087 bp, Homo sapiens
gtagggggtgagttgcaggggctgggacagagcaccagcatcctgcatcattagcagcacgtgggaaccctagtgtatgggtgcaaggccacttgcctcagttttccaggcgttcccaggggcctccatttctcatcttgaaaaaagcagcaaggctttggtaccagagggtcttggtgtaagtgcaaatctgcttcagatatatattagctgtggatttggggctggttacaaggcttatctgagcctcactcttttcttgggagataagggaaaatagtccttgcctgatgggctgcagtgaggattcaattaggcaatgtcccttagagctctggggagctgtgaaaccggtgatgccaggctgatgtctatgaaatgcactgggagtgaggaaagggtcacagatctccgcctgggtgttggaatatccagggaccgtgggaggctcccgggggccccatgctagtgttctccaccaaagacagaggagacaggtgatgtgcatgggagagctttgccttcctctctcacggaaccacaggctgtcagagccttgctccgcagcttcagtttgacaacctcagagaaccataatgatataggagttaaaaagaaattactcgggcagatagtgagggtatggaagtccttggtaagattttccttttaatgaaaagcagcccctaaatccttttctaacaaaaagcagctgtcagcagttgtgtccattggaatgtactacctaagactaagcatgttcaaaatggcggctccgtcttctctttttgcccagctatgagtgcagtaaggagaagacaagatggccaagtggaaagtccatttgcataatcagatttgggtggggtggccagcctttctcgtgcactacgtaaacgtcacacctggtcaaaccaatctgtgagccctatgtaaatcagacaccacctcctcaagcctgcctataaaatacgctgtggtccaccacttttcccttttcagatgcctctgtctcacgagagagagagctgctctcctctctcctttcttctgcctattaaacattctgttccttaacccacccaca

SEQ ID NO: 734209 - DNA, 534 bp, Homo sapiens
aaatgtctatacatgttgaatgaaagtgcaatatttcttccctgaatagttttgatctgtggttgcttgaagtcactgacctgtacactttaaaggagtgaattgtaggcatgtgaattatatctcaataaagctgttccaaaaaaactttcaaaggtgctctccctctaaagactaagtacccccagggggctccttctgttaatgcccactcacctgggtacctctggttcaggaattcatcttctaaagaccatggctcttctcctttctccaacttggagatcaccttgggtttagtaatgcaatatcctgtaaacaaaataattgacatggaccagattcacaggcttttggatttccaaagggaaaaaaagatatggcagcaaagcattaactgagggtgttcatttgaaatttttaatgggaaagtaatgacatgttgcttttgtttctgtaaaggtttcaactacttcaaaccttttaatccaaagccctttaatctctataaagggtccatgtgttttgatactt

SEQ ID NO: 734210 - DNA, 1081 bp, Homo sapiens
ggatatccaagagggagaatgaaacttcctgggcttatctggattcttctgggctatagatctcaaatagagacctgttggttgctagggtagtccagacaccccttagatgtcttcataatagtcctatctaccttcaaaaaccatctctatatatggcagactatattaacagctgctgaacaaatcagctctggaggtgattccacatcccctggcattatgctctaatgctgctcatcggagaacagacagccaggataaagtggcaccttctggagtacactggagggggcagcccaagttagaggccagcattgctgacattctggaatatttgcatctaaaaatgtttactcgttgccatgctgcagtccgcacaagctgtgaggcagaaaacttgactttgaaggcagccttgaagagtgagttcatgagctcatggtttttctccttgtatggactgctcgctccaagggcaggcagagctcatgaatgcctcttatcttcctaagcggagttttaggtgacacaggatgaagcagaagagatctacccatctcatctgctctgcacccagcttctaagtggacaaagccaagcccaggcatgagctctggcaaagcaagaccccagattctcccatttttgcctgtggaaaggagggtccctttacaggcttttttttcctttttttcccccaaaatctcttaaaatgaggaatctcttagcagactttggagttccccattctgccacattctgaccatgagacgcggcttgcagtgggggtgaacgcacataaaaagggaccactgacgtcctgctctactctctgctttctatttatttattttgggggtgggttggggagtcagaagaacctggaggacggaggaaaccaggggcaatgtttacaagactggtggacaagtgtaaatatggaataagaacaaacagttctaattaattccttcttctgcagtatggaaacctattacgatgcccttgagtcaagcactgagatacgttacccaattagggaaataaatttgttaataaaattgctgaggtcaccagt

SEQ ID NO: 734211 - DNA, 433 bp, Homo sapiens
  misc_feature (376)..(376): n is a, c, g, or t
tgagttaacggtatttcaagccaaaccccagtatatgatgcagaacaaggacccaaagtgaggctgaaaggtgaacttgcaagtacaggcttatcatttcatggaatgtgattatttagctattttaaagcagttgcttatcctactacaggttacttattgtatggcaaaaatgaaaacacagatctctgtggatccaaaaacattttggaagctatgttaagacatcatttacgttggttttcacgtaagtgctgggctttgaagcattttttatttttttaagacacaggatctcactgcgtacactggcgtaccctggtgtgattatagctcactgcaacctccaactcctgggactaagcaagtctcgccnagtcagcctgtagctgagctaccacgtctggcctgaagcatttctagttctagtttg

SEQ ID NO: 734212 - DNA, 351 bp, Homo sapiens
aatgttgctttatataataggtctgtttctcttaagtgtgcaaaataaatttttgtaaattgagctatacttaagatattgttaaagaaccatgaagtggctctttgtgtaatttgctgtgtaaaaatcttaatctgatttcttataagtttttctgcattttaactgcaacctgttcatcataatctaatagatagtggtttaagagcatagaatctgtagtcagactgcctgggttcaaatccaggctcttccatttagctaccagctttatgcttggttgtagatcctgttaaggtaggaataatagtagttactttaaaaggttattgagaaaatctagagagttaa

SEQ ID NO: 734213 - DNA, 345 bp, Homo sapiens
acgcaggatgagccggaccgaattcgacagtgtgcaaaataaatttttgtaaattgagctatacttaagatattgttaaagaaccatgaagtggctctttgtgtaatttgctgtgtaaaaatcttaatctgatttcttataagtttttctgcattttaactgcaacctgttcatcataatctaatagatagtggtttaagagcatagaatctgtagtcagactgcctgggttcaaatccaggctcttccatttagctaccagctttatgcttggttgtagatcctgttaaggtaggaataatagtagttactttaaaaggttattgagaaaatctagagagttaa

SEQ ID NO: 734214 - DNA, 416 bp, Homo sapiens
ggaacatgcacgctggtttgcagatcccttgcagtgactctacagctcccaggaatctgaggttcacaaggtgaaacctaccaggccaaacaatttaaaattggttttgttttgaaaatccagtaagtatgatggcaatgtcttgcagaaattcctcttttagtattccagtctgtgggctctggcagaagtaatagtctgctgcaaacagatcactcttttttgtttgcaaagtcttcgtaccagctgaatcacagcttgcttttcacttttcgtaacaccttgcaacatcgcaaaatatttgctggagtttgtgaagggcggctgcagaattagtaaactgaaaggaggccttcctttactcccacccctcccttccagctatgtgtacaataatgaccaatctgtttgggctt

SEQ ID NO: 734215 - DNA, 898 bp, Homo sapiens
tgagaactagaaactgtgtcaagggcgactaagccctgctgtgctgtgagaaagttaaacttatttgcaaactttatggcctattttggccttaatctccatgtccagcatctggggaacaatgttttcctgttgcagactctctttggtgcagtcatcctcctggccaactgtgttgcaccttgggcactgaaatacatgaaccgtcgagcaagccagatgcttctcatgttcctactggcaatctgccttctggccatcatatttgtgccacaagaaatgcagacgctgcgtgaggttttggcaacactgggcttaggagcgtctgctcttgccaatacccttgcttttgcccatggaaatgaaagcaaaatgataaatcacaaattgcctgtgtggatttttaacagatattcttgtattgctgtttccactcaaagggcaagagctatggggatcaatgcaacctttgctaatatagcaggagccctggctcccctcatgatgatcctaagtgtgtattctccacccctgccctggatcatctatggagtcttccccttcatctctggctttgctttcctcctccttcctgaaaccaggaacaagcctctgtttgacaccatccaggatgagaaaaatgagagaaaagaccccagagaaccaaagcaagaggatccgagagtggaagtgacgcagttttaaggaattccaggagctgactgccgatcaatgagccagatgaagggaacaatcaggactattcctagacactagcaaaatctagaaaataaataacaaggctgggtgcggtggctcacgcctgtaatcccagcaccttgggaggctgaggcgggcagatcatgaggtcagaagataaagaccaccctggccaaca

SEQ ID NO: 734216 - DNA, 849 bp, Homo sapiens
agcaaaatgataaatcacaaattgcctgtgtggatttttaacagatattcttgtattgctgtttccactcaaagggcaagagctatggggatcaatgcaacctttgctaatatagcaggagccctggctcccctcatgatgatcctaagtgtgtattctccacccctgccctggatcatctatggagtcttccccttcatctctggctttgctttcctcctccttcctgaaaccaggaacaagcctctgtttgacaccatccaggatgagaaaaatgagtgagtaaatagcccggttgcccctcagaggatctgtgtgctataggtctgtgctgaggaaggcaaaataccatttagggccactgtcctctcaaaaggcttagacttaggattttcccatgtaatcagtgccttaggtctaggtacagccacatgccttcccacagtgacctcagacaccctctggaggctctcccagatcacacagaccagctctgcccagcttgtcaaaggaggctttcatagtgaagaagccaaaattaggtctcctcttccctccctgccctagtgtgatatgcacactgttgaaggtattttacaaatatgcagagatccaaacaccagattttcatccctgggaaaccctcaaacaagtgggtacctgtaagctgtctgagattgccagtgcttacaggcctgactactaggccactgaagaatttgtggaagagtatgcagatgcaggggtatccaatcttttggcttccctggtctacagtggaataagaattgtcttgggccacacataaaatacactaacactaataatatctgatgagctaaaaaaaaa

SEQ ID NO: 734217 - DNA, 452 bp, Homo sapiens
ctaatgctatccctcccccagtgcccagccccccgacaggccccggtgtgtgatgttccccaccctgtgtccaagtgattccattgttcagttcccacatatgattgagaacatgtggtgtttggttctcgctgtcctttttataaagccccagtgtctcgattatttttgctttgcagcaagtcttaaaatcaggtacacagtgtgggtcttccagctttattcttttatagaattgtttgagtatttaaggttctttgaccttccataaaaatgttagaatcagcttgtccatatctccaaaaaactcttgccaacattttggttggaattgatattaaattttagatcagactggggagcattgactgtatatgtagcatcttagcaatataaagttgccaacacatgaacatattatgtctctccaactacttaggtctttgattaag

SEQ ID NO: 734218 - DNA, 1782 bp, Homo sapiens
attgtcatctgctgaatcaggctaagggtaggtcctggaagatactccttccaaaccttataatcagaggtgactgcacagttggcttacaagagcctcttttcaaagtaattggggatgcagtgcttagaactgggctggcattgtaatttttttaggaatctgctcccatttacaagacgttccatcataaaaatcaaatcataaaatcaaatccaagtatgttcatttggtatattcattttccacttcttactaggggtggtgggggaggagaagctggtacaggagaaatgtcttttatttcccctctataacaatggtataattccaaatcttatagaccatcacacagttctgttagttgattgttttccgtggattctaccctgccaggagacacaataaataactttttgaaacttcattcttcagtcctgggagtttttacaaataaaaggacacacatgttgagacaaattacatgcttgaaaatctgtcactaacatcaatttcatgttaaaaagtactaagcaactattacagtggcatttcttttgttgttggggaaaataatgtgaatagctatgctaattcagagataattttcaaatttcgtgactaaataaaaaagctaagagtagttcactaggtaatgtttgggagggagttgttggttttgttgatttattatatcttgactggtatgattgaaatgaattaaatgttagacgtgcttaacattttatatgctatatatcatcataatagcaaagtgcacagatcacattattgagtgcctttggattttaaaaataaagattgctattcagatgaataccatttcattattgcctgcactactctgtcaaattaaaaaatataatagctatctttattctcgttttaaagcatgataatcatcaaaatgttgaagtttatcacagttctacattaaaaataagtcatttttgtagatgagttatccaatacagcaaaggccatcaaagagaaagccaatactttcatggagagctcagagccttaatagatcccagcagcaatgcttcaaccattcccaactccatgttccttgctagatgctcctcaccccaaactcctgcaaatttcaagaatttctgtgtatgtgtgtgttaagggaggagttttaaagtatctctgtattcaacaagatacgtcagcttgtaagcagcagaaacctacttaaactagcttacatgagaaaataacattataaagacataggagtgtttctacaccaagagctggaggtattgtttggtttcatgaaggattaaaatctgtaattcaaaagtagactcaggcagctgcacatcaatctgtgtctttctctctggtactgtggactctatcctgtctgacttgctttgttcctgggcatcattcttgctctggaaaacacactttccctgctcatttttttattttaatgcttaggttcaatctgctcatttttccctacagcagaagacagcttactgtgttccagcaaacaacagagcctgaccagcctctctgaatatggggcccccttctcactcacaagtattcttaacctggggtccatgtggggtttgtgaatttggataggattttaaaattacattttcatttccactaatctctaaccgaaattcagtcttttcttcaactgtgaatgtaggcagcaagccacagtggaacttgccgaacctataaatttgtcactgtgattgatgttataatgttacacctagatct

SEQ ID NO: 734219 - DNA, 621 bp, Homo sapiens
ccaaagtgttccgggcggggaggggggcgagggaggtgagtatgaggagtggagtggagctggacccttacaaagggacagcgacaaacacctcatactcaaaacaaggggactttccgtgtcatttgcgccgtcgggccattgcaaatgtccgcgctgagatgcctaccttgtcactcgacgcagccgccaaagctcacccggagctgcgtcagtccccactgggttcctccaggccaaggaggtacgacctccgccgcagcatataaagtaaatgtccaggagatgggaagaaacccgccgatacagcacccgggtgcccaagcccccgagaactaggccgcgcgggtactacggggtgcgcgatcggccagaaagcccgggccaggacgggcccaggagcgagcaccgtcgggaacaagcgtcgggaacaagccgggattaagaggaagcgccggcgccaacggtctcccgcccgccgcggtccccccaggactcttcctgcgcttgcaagcgccacgccgcccacaggactgcgccagccggccggcgcctcaacagagcgcgccacggagcagcgcccctcgggagacatgacgcctgagccatcgaggcggccgc

SEQ ID NO: 734220 - DNA, 509 bp, Homo sapiens
cactggccttggccacccacttctcccagcctgtgtcttcctgatcctgggaaggcctggatgaccaagcttggtgaaattcctccctgtacacaccctattaactccttggctgtggtcccccagctacaccaccagcccaggtcctggctgccagctttcctcctctgcccggcctctagcgcagtcgctaactactctgctgggctccctgggtctctgcccaaggccccgcacacactggggcctagcatagttcctgcctatgccaggagctggctctgtgtttaagaaaaggaggactgaaggacaaacaaccaagagtggcccagtccccacccccacatctagctcagtctcaaatctgagtgggaccaagtgcaattcagggcctttttctccactcacctgcacccagaagcagagaaaagcaggcactgttcacttttcctttattcttaatggccttcctctgttgcaacctcaataaacagcacaatctcaaagct

SEQ ID NO: 734221 - DNA, 722 bp, Homo sapiens
tttttttggtctaatattagcaatgaaaagctcaagaagttcataaaatttgggttgtttttaataatagttatagcaatagtaaaaaatttctttttctacttactatattatgtaaggtgaaatacttgggattaaactgaaaaccctaatagattctagaatcaaacaaatgggggttcaagtcttggttctgatgcttactaaatctttgaccttgggtacattatgtaatctctctttgtttcctcatctgtaaaacagggataataataactatgtcatagggtttatgtgaggtttaaataataccctgtttataaagcccttgcttagtgcttagtagtgtttaataaatggtagtagttactttgacaaaaaagtatgagtcctaatttattgtgaaactaccaccaaaatcaattaacaatccacccaaattttgtaaaaggtgtttggaatgtctttctgtccccaaagcttgttgatcttgtacttttcaattaatttattattgtcctcttgagatttaacctgcaggccagtggtttctaaatgataaactgtggattggtgctggttagtgagaaagttttcactgggccttggtgaaatggaagagtaagcaggacaatgtaatgatatcataaagttaaccttaactcagagctcagcgcctgctctttttagcatgtgcgcacgcgtgtatgtgtgtgtgtgta

SEQ ID NO: 734222 - DNA, 614 bp, Homo sapiens; identical to SEQ ID NO: 197017

SEQ ID NO: 734223 - DNA, 2374 bp, Homo sapiens; identical to SEQ ID NO: 282292

SEQ ID NO: 734224 - DNA, 851 bp, Homo sapiens
gtgtgaagaaataagaagaatcagtgatactcctagacattggagctcagtgacaggaaacagtaatcatgttgtcgtctactgagaagggcaaggatgaaggaatgagcaggtttgggcaaagaactaagaattgagtttttgaatgtttgtttttagactctaagcagaatccaaatggagatgctcagtaaggagatggatatctaggtcgagagctcaggcaagaggctgagagtaagaacataaatccaggagtcaccagaatacgctaggtatttaaagctaagaaattagatgaggttctttttaaaatcttacttaataaaaagtacagaaatttttctaagtgctttacaaatattaactcaaccctcttaacaactctctgaggtaagaactattattactcttatattccatattaaagataaggaaactgagacacagattatctaagcaactaggcccaaaatcacactaccggtaagcagcaaacctgggactgaatccaagcagtgtggccccagtctgaattcttaacactaagctaaattgcttcctaatactctaagggaaaaaaaaaagtggaaggagagaagaggctccggaactgagccgcagggcactcaacttttagaagttgcaaaaaggggaagcaaaaaaatttaaaaggagctaagtagaaaatgagaaaaagtttggtgtcctgaaatcccatgaataaaatactgtatatcaaagaggaatgcttaagagatcaaaaaagaaatggactagaaagtgaccattggatttggcaaggtggaagtcactagagactttgaaacatacttgatgaaataagttat

SEQ ID NO: 734225 - DNA, 875 bp, Homo sapiens; identical to SEQ ID NO: 36037
  misc_feature (812)..(812): n is a, c, g, or t
  misc_feature (815)..(815): n is a, c, g, or t

SEQ ID NO: 734226 - DNA, 470 bp, Homo sapiens
gtgtgaagaaataagaagaatcagtgatactcctagacattggagctcagtgacaggaaacagtaatcatgttgtcgtctactgagaagggcaaggatgaaggaatgagcaggtttgggcaaagaactaagaattgagtttttgaatgtttgtttttagactctaagcagaatccaaatggagatgctcagtaaggagatggatatctaggtcgagagctcaggcaagaggctgagagtaagaacataaatccaggagtcaccagaatacgctagacaagaacactggaactcaaagaatttaacttgcctatgatttcaccgtgagctgagaagtggcagaggtaaggagtgaacttttttctactcttatataaacttccaagtttcagtgacatgctctaaggaagagtttaaaaagaaaaattcaacatccacctttcataattaaaatacacaaagacaagtaaa

SEQ ID NO: 734227 - DNA, 1192 bp, Homo sapiens
  misc_feature (721)..(721): n is a, c, g, or t
gctgtgggagccgtcagtggctgagctcgccaagcagccttggtctctgtctacgaagagcccgtggggcagcctcgagagccgcagccatgaacggcacagagggccccaatttttatgtgcccttctccaacgtcacaggcgtggtgcggagccccttcgagcagccgcagtactacctggcggaaccatggcagttctccatgctggcagcgtacatgttcctgctcatcgtgctgggcttccccatcaacttcctcacgctctacgtcaccgtacagcacaagaagctgcgcacacccctcaactacatcctgctcaacttggccgtggctgacctcttcatggtcttcggaggattcaccaccaccctctacacatcactccatggctacttcgtctttgggcccacaggctgtaatctcgagggcttctttgccacacttggaggtgaaatcgccctgtggtccctggtggtcctggccattgagcgctacgtggtggtctgcaagccgatgagcaacttccgcttcggggagaatcacgctatcatgggtgtggtcttcacctggatcatggcgttggcctgtgctgctcccccactcgttggctggtccaggtacatccctgagggcatgcaatgttcatgcgggattgactactacacactcaagcctgaggtcaacaacgaatcctttgtcatctacatgttcgtggtccncttcaccattcctatgatcgtcatcttcttctgctatgggccggtggtcttcacagtccaggggcggtgccagcagaggagtagccccctcagaagcggagaaggaagtccaccccgcatggttatcatcatggtcatcttcttcctgatctgtggttcctacgccagtggggcttctacattcttcaccaccaaggtcacttcggcccctcttctgactctggcagttctttgctaagagctcttccctcttttaccgctctctactattgttgaccagccgtcccgaccgttgtgcccccgtgtgcgggaatccggggagagaacccggccccgtcaaaggaacaccgggtccctatcgcgcatggtgataggtcttccccccccagcccagacggggagaaaccccttttgaataaaacccgggaagcacccacacccgggcctacgcgtagttaataaaaaagaagc

SEQ ID NO: 734228 - DNA, 1523 bp, Homo sapiens; identical to SEQ ID NO: 34952

SEQ ID NO: 734229 - DNA, 1577 bp, Homo sapiens; identical to SEQ ID NO: 34953

SEQ ID NO: 734230 - DNA, 691 bp, Homo sapiens; identical to SEQ ID NO: 34659

SEQ ID NO: 734231 - DNA, 557 bp, Homo sapiens
gccgcacatctgaatactgggtgccatgtgcccgaccctccctgcaggctgcgtcctgaggcttcccgaggcgggtctggcctccccagaaggtcggcagtcagcagagctgcgtccggatctgcttgtgctcacctgggtcatcctcctacctgttccaggccacaaataacatgaatggatgcagcggaaaatgctgtaaagggagtgggctccacgctcatcactcaccagaaaatactgcggggaggagtcccagggcttgagggagggggctccacgctcaccactgactcagaagataccgcaagggagcactctcgctgggaggagtcccaggtcttggcgacagtcctactcactgccatgacttacaacggggaggcatcagccaggggagaaggtgcggcggggccggggagaccagccgcagcgtggaaccctccccagcggagccacacgggacgctcgggctgcgagcacaggtgcgggatgctgacggggaagctgtgcgagactcagttcccagggcttttgcctaggctggcagtgcggcc

SEQ ID NO: 734232 - DNA, 906 bp, Homo sapiens
  misc_feature (6)..(6): n is a, c, g, or t
  misc_feature (223)..(223): n is a, c, g, or t
tgttgncaatatgcatttatttacttctttgacaagtttatttttgcgtatctactatgtacgatgcattgaagtccagggacaaacaaaacacagggactctgccctcctggagccgacatctggtgagggagagacgcagactctagacagatatttccaaatagcaggtaagtgctataaacaaagggaaacagggtaatgggatagagtgacagggggngggatgagttgctattttagatgaagtggtccaggagggcttccctgaggaggtggcatttggtctgagggctagagaatgagaaagcagctgtcacctgagagctggagaaagaacattccagggagagggagcatcaagacccaaagccctgaggcaaaaacaagcttgccatgttccaggaacagtgaaaggacatccattgacctaatctcaaagctgctgtcccaaagacaaagcaaaggggacccagctcccttgggtggctcctagatgctctgctgcctgaccaccagagggcagcagtgctccttctcttccaggctgagcagaaagtggatgctcatgaacgttttaggagctggggttttgtccttcagatgctcaaagcttgttcatgggcttggaggcatgtttagccctttgggatttgtaaggcagagaattccaatttcttaagcctagtaagaaatgagcaaaaacttcaatatatatgactcaggcaagaaatcagcatctgtggcaaatactagaatgaaatgcaagaaagctcactgcaaggaagtctccctccctgcagattccaaggcttggaatctttttcttctgggctccaggcagcacagacagggcctagcctgggagagggtggacaagatgtcctctcagggtcttcaatggcc

SEQ ID NO: 734233 - DNA, 10343 bp, Homo sapiens; identical to SEQ ID NO: 465004

SEQ ID NO: 734234 - DNA, 1275 bp, Homo sapiens
aacgtcccccacaagtcctcactgcccgagggatccgccctggcacggtgctgagaattcgcggcttggttcctcccaatgccagcaggttccatgtaaacctgctgtgcggggaggagcagggctccgatgccgcgctgcatttcaacccccggctggacacgtcggaggtggtcttcaacagcaaggagcaaggctcctggggccgcgaggagcgcgggccgggcgttcctttccagcgcgggcagcccttcgaggtgctcatcatcgcgtcagacgacggcttcaaggccgtggttggggacgcccagtaccaccacttccgccaccgcctgccgctggcgcgcgtgcgcctggtggaggtgggcggggacgtgcagctggactccgtgaggatcttctgagcagaagcccaggcggcccggggccttggctggcaaataaagcgttagcccgcagcgaaaaaaaaaaacaaaacaacaaaaaaagaaaaacaacaaaagaagaaacaaaaaagacaagaaacaacaaaaacaaaacataaataaaaaaaacaaacagaagggggggcggccgccataaattatcccccgaggggggccaccatattcgacggcaccgccagagtttatacaaacgagggacgcgcccacaagaaaggcacgcatataataaaacggagcagacgcggacgccagataacaacacggtagagcgggagacccacgcgcgtcacaacgagacaacagcaagagagacacgccccccacaacggggagggggcacaaacaaaaggagggagacgaaaccaacaccacaacgacgaagcaaaataaacccacccccgcagggggaagaacaacacaacaaacaacgagcggagcagaagtacagaacggtgggaacacccacaaaccacccgcgaatataatacgcagtcagagtaggagagaaaagacaccccaccgacacacgacgggagcctagtcataagacacgaaaacatctacacgcggggaggggaggtccagcttcatagcctacgaataacgccacgagcagacatcagaccagacagaaaacagccagctcacacgaagcacaaaagaaaacaacagagaaacaccaacggagcgacgaaaacgaaaagcacaaagaaaggacaaaaacgagaagagataaaaaaagagagagagaaaaaacgaaaaaacaaaaaagaacataaacaaaaaaagcaacagacaaaaaaacagaagaaccacacgcagacggacg

SEQ ID NO: 734235 - DNA, 458 bp, Homo sapiens
aacgtcccccacaagtcctcactgcccgagggatccgccctggcacggtgctgagaattcgcggcttggttcctcccaatgccagcaggttccatgtaaacctgctgtgcggggaggagcagggctccgatgccgcgctgcatttcaacccccggctggacacgtcggaggtggtcttcaacagcaaggagcaaggctcctggggccgcgaggagcgcgggccgggcgttcctttccagcgcgggcagcccttcgaggtgctcatcatcgcgtcagacgacggcttcaaggccgtggttggggacgcccagtaccaccacttccgccaccgcctgccgctggcgcgcgtgcgcctggtggaggtgggcggggacgtgcagctggactccgtgaggatcttctgagcagaagcccaggcggcccggggccttggctggcaaataaagcgttagcccgca

SEQ ID NO: 734236 - DNA, 618 bp, Homo sapiens
caggtattcatgccttctccatcatagaaaattttaacttagttttttagtgacactcatatattgtgtatttagtgacactcatatattactgtaagtattagtctctttctcactggactggaattattcaggagaagggacatggccttactcagtgtctgccacatcgtgagctcagtaaacaacaatacagggcaaagaccctgtgcttatagggtgttacagggtgttggggaatttttggttttttttttaagttttttcagcaaatcagtttattgaccagctcacaagtgttatttttttcaaaagttaacttctcttggtgttcactttaacttttggtgattcatacaagttttctaaaaagcacatgtctcttagatctttagtttcctctctatataaatgtcattccctgcccctacacaccagggacatgcacagacacatgcacacaacatatataagtcttactggatttttgtgaaattaacaatattcatgtagtgcatccaccttggtctctggcacatagtagccatctcaaatgcttgttagggagattcaggcatatacaagttaatattataaagtcaatatgtctaaaaaaaa

SEQ ID NO: 734237 - DNA, 1193 bp, Homo sapiens; identical to SEQ ID NO: 45325

SEQ ID NO: 734238 - DNA, 368 bp, Homo sapiens
gctgggtctcagggtgagagttacagaaggatatgaaataatcggggaagaggcaagttacagcgggtatcctgatgcagaccatccccagccagaaacacagccgcagaactgagcccaagctccagaccaaaaactgagcccaagctcagggtctgcatggcccagagctggcatctgtccgggggactggcccaggcaaagtgaccactgtcatccagtccaggagctgtgagctgcatggaaagaatgtgaatgaagacacaactctaaatgtggaaccatggacgctatgtgagccagtgtgctccctagccgtccagaaaaacaaggcccacttgtacattctgcaagagcataaataaagc

SEQ ID NO: 734239 - DNA, 521 bp, Homo sapiens
cttcaatccagaatgattgctaaagctattccagcacctagagtcaaataaaaatatcccgaggtgggaaggaaaacatttgtttagggaaacattaaaaacaggagagtgtgtgccttggagccagagcccagagccctgctgatgtcccggggcagaaatagcccgtttcatcatcggctctggacgaccgccgcccgcattcctcgattacagcgggtatcctgatgcagaccatccccagccagaaacacagccgcagaactgagcccaagctccagaccaaaaactgagcccaagctcagggtctgcatggcccagagctggcatctgtccgggggactggcccaggcaaagtgaccactgtcatccagtccaggagctgtgagctgcatggaaagaatgtgaatgaagacacaactctaaatgtggaaccatggacgctatgtgagccagtgtgctccctagccgtccagaaaaacaaggcccacttgtacattctgcaagagcataaataaagc

SEQ ID NO: 734240 - DNA, 639 bp, Homo sapiens
caatcccagctggcttaagaaggaaagaacacttgctggcgtctgaccaggagggcaggagtgttgccagggattcttctcatctctgggcattgcttccctgtgctgagttcatctcaggcagtcccctccaggggctgacaaggtgactcaccttggccttcatccctccagtttaacaaccccagaggacagcaggtagcttttcttcagtagttccagcaaacgtcccaaagctcacactggaccagtgagggtcacgtgcttatctctgaatcagttcctgaggctaagggcatggaatatgctgcttggccagcctggatcagatgctcagcccagggccagcgggggtagggatgtcagttcacctggacctcaggggctgacaagggggatactaaagtatgcattctcggccaggcgcggtggcacatgcctgtaatccctgcactttgggaggcccaggcaggcagatcacttgaggtcaggagtttgagaccagcctggccaacatggtgaaaccccatctctactaaaaatacaaaaattagccaggtgtggtggtgcacacttgtaatgccagctacttggaaggcttaggcaggagaattgcttgattccatctcaaaaaaaaaa

SEQ ID NO: 734241 - DNA, 925 bp, Homo sapiens; identical to SEQ ID NO: 51266

SEQ ID NO: 734242 - DNA, 806 bp, Homo sapiens
ccctattggcaggattttggagaaaaaaaaataaaagcgaatagatacctgtgaaagaaaaaataaatacattttaaaataattggaggatagaaggattacttttaaaagttctgttagtttgccagtacagagcaaaacagaaaatggacacatttttttgatcagcattctctgttctaaaaacttatttcaataagggaaagaatatgcaaagacatatatatagatatagacatacacccactccaaaagaatagtgatatctttctggtaaataatatccaaagtttggaaagaaatcaaatatccattgaaaggaaactaattttagggggataggattcacatttggaatgatctcatagttagtttactggatttctgttctggtcaacctaataattgtcttgaaagtgagatggctactgacattctagggtatggttagggagaatattctttatttttaaaaccctacaagattttttcattttttaaaataaaatgtcttatttgttaaatatgatggttatgtaggtttactcaaaagtgattttttccattgctctttattattttctgcatctctgtgttacagctgaaataatttttagtattttctttagtgcaggtctgctgaagataaattctctcagttcttgtttgtctaaaatatctttgggccaggcacgtttgttacgcctgtaatcccagcacttgggaggccgaggcaggaagatcacttggcccaagagtttgaggccagtctgggtaacatagggagacaacatctctacaaaaag

SEQ ID NO: 734243 - DNA, 459 bp, Homo sapiens
atcaggaaccagcagaaggagagcctgagctgtcacaatatctcacaatcccttgatctgatgggttggaatggctcttaaggttgtcccagtttagacagaggggatcaggtctttttacacccctcacattgatgagtccttgaatgcaagatgcagctctggatgggaaggggaataatcttgggccaggtggctcttttgggctgagggtgctgcccagatggtgactcatctggcagctgacattcaccaaaacgatcaagagctggaagagtgagtgtccagtcccaaacagggcacctagtgatgcaccagtgtaccatcacatgtgcatatataatattatttgcattcattatgaatgtctcgatttgttttgtaatagatctcccaggctcagattgagaaaaacataaaacaatttttattacaataccaaaattaactggctaatta

SEQ ID NO: 734244 - DNA, 2287 bp, Homo sapiens
  misc_feature (339)..(339): n is a, c, g, or t
aaaagcgctagggttgcaagtggcaccagagacgtgcccttgtcccggggtccatttgagggtgagcgtgttggtgccgagctgtttttttgttttgttttgttttgttttgtttttgagaccgaatctcgttctgtcgcccaggctggaatgcagtggtgtgatcttggctcactgcaacctccaccttccgggttcaagtgaatctcctgcctcagcctcctgagtagctgggattactggcacccaccaccacgaccagctaatttttgtatttttagtagagacgggttttcaccatgttggccaggatggtctcaatctcctgacctcaggcgntctgccttcctcagcttcccaaagtgctgggattacaggtgtgagccaccgcacccggccagtgctgagctgttttgacaacttggaccccgggtcctctgtgggtaggaaaatcagctccctctttgctcctctggggcagctgcacctcgggccagctttctgcctgtctgcctgccggcactgctgggtcgctgtacccaaacgcacagccggtgccccgtgctagaaggtcttcagtttccagaagaaccaaagcatctttggacctacctagggaaggacctgcctgtgacctttgccctgtcctggagggtccagctttgggctgaatggcagcacccacgctgggccgtctggtgctgacccacctgctggtggccctttttggcatgggctcctgggctgctgtgaacgggatctgggtggagctgcctgtggtggtaaaagaccttccagagggttggagcctcccctcatacctctctgtggttgtggcgctgggaaacctgggtctgctggtggtgaccctgtggaggcggctggccccgggcaagggcgagcaggtccccatccaggtggtacaggtgctgagtgtagtgggcacagccctgctggcccctctgtggcaccacgtggccccagtggcagggcagctccactctgtggccttcctaactctggccttggtgttggcaatggcctgttgtacctctaatgtcactttcctgcccttcctgagccacctgccacctcctttcttacggtctttcttcctgggtcagggtctcagtgccctactcccctgtgtgctggccctagtgcaaggtgtgggccgcctcgagtgcccaccagcgcccaccaatggcacctctgggcctcccctcgacttccctgagcgttttcctgccagcaccttcttctgggcactgactgcccttctggtcacttcagctgccgccttccggggtctcctgttgctgttgccatcactaccctctgtaaccacagggggctcagggcctgaacttcaactgggatccccaggagcagaggaggaagagaaggaggaagaagaggctttgccattgcaggagccaccgagccaggcagcaggcaccatccctggcccagaccctgaggcccatcagctgttctcagcccatggtgccttcctgctgggcctgatggccttcaccagtgccgtgaccaatggcgtgctgccttctgtgcagagcttttcctgtttgccctatgggcgcctggcctaccacctggctgtggtgctgggcagtgccgccaacccccttgcctgcttcctggccatgggcgtgctgtgcaggtccctggcagggctggttggtctttctctgctgggcatgctctttggggcctacctgatggcactggcaatcctgagcccctgcccacccctggtgggcaccactgcaggggtggtccttgtggtgctgtcgtgggtgctgtgtctgtgtgtgttctcatatgtgaaggtggctgcaagctccctgctgcatggtgggggtcggccggcattgctggcagctggtgtggccatccaagtgggctccctgcttggtgccggtgccatgttccctcccaccagcatctaccacgtgtttcaaagcagaaaggactgtgtagacccctgtggcccctgagcctgggcaggtggggacccaactccaccccacctgtcttcatcgtgaggctgccacagtgcctgactacttgtggcccaggcaggcttcccccaacacaggaacgctcatggacacctgcacactccacagaagacgttggcatgtgaggccagggtgggcaccaaagaccaggcccagagccaggggacaggttggggctgtgggcttggacccagggcctgagacctttgtgggatttgtgcaataaagtgtttttatttaaaacc

SEQ ID NO: 734245 - DNA, 2490 bp, Homo sapiens; identical to SEQ ID NO: 288779
  misc_feature (339)..(339): n is a, c, g, or t

SEQ ID NO: 734246 - DNA, 2372 bp, Homo sapiens; identical to SEQ ID NO: 288780
  misc_feature (339)..(339): n is a, c, g, or t

SEQ ID NO: 734247 - DNA, 2406 bp, Homo sapiens; identical to SEQ ID NO: 288781
  misc_feature (339)..(339): n is a, c, g, or t

SEQ ID NO: 734248 - DNA, 2321 bp, Homo sapiens
  misc_feature (339)..(339): n is a, c, g, or t
aaaagcgctagggttgcaagtggcaccagagacgtgcccttgtcccggggtccatttgagggtgagcgtgttggtgccgagctgtttttttgttttgttttgttttgttttgtttttgagaccgaatctcgttctgtcgcccaggctggaatgcagtggtgtgatcttggctcactgcaacctccaccttccgggttcaagtgaatctcctgcctcagcctcctgagtagctgggattactggcacccaccaccacgaccagctaatttttgtatttttagtagagacgggttttcaccatgttggccaggatggtctcaatctcctgacctcaggcgntctgccttcctcagcttcccaaagtgctgggattacaggtgtgagccaccgcacccggccagtgctgagctgttttgacaacttggaccccgggtcctctgtgggtaggaaaatcagctccctctttgctcctctggggcagctgcacctcgggccagctttctgcctgtctgcctgccggcactgctgggtcgctgtacccaaacgcacagccggtgccccgtgcctattacctgccagcctgtctgtttccctccagctagaaggtcttcagtttccagaagaaccaaagcatctttggacctacctagggaaggacctgcctgtgacctttgccctgtcctggagggtccagctttgggctgaatggcagcacccacgctgggccgtctggtgctgacccacctgctggtggccctttttggcatgggctcctgggctgctgtgaacgggatctgggtggagctgcctgtggtggtaaaagaccttccagagggttggagcctcccctcatacctctctgtggttgtggcgctgggaaacctgggtctgctggtggtgaccctgtggaggcggctggccccgggcaagggcgagcaggtccccatccaggtggtacaggtgctgagtgtagtgggcacagccctgctggcccctctgtggcaccacgtggccccagtggcagggcagctccactctgtggccttcctaactctggccttggtgttggcaatggcctgttgtacctctaatgtcactttcctgcccttcctgagccacctgccacctcctttcttacggtctttcttcctgggtcagggtctcagtgccctactcccctgtgtgctggccctagtgcaaggtgtgggccgcctcgagtgcccaccagcgcccaccaatggcacctctgggcctcccctcgacttccctgagcgttttcctgccagcaccttcttctgggcactgactgcccttctggtcacttcagctgccgccttccggggtctcctgttgctgttgccatcactaccctctgtaaccacagggggctcagggcctgaacttcaactgggatccccaggagcagaggaggaagagaaggaggaagaagaggctttgccattgcaggagccaccgagccaggcagcaggcaccatccctggcccagaccctgaggcccatcagctgttctcagcccatggtgccttcctgctgggcctgatggccttcaccagtgccgtgaccaatggcgtgctgccttctgtgcagagcttttcctgtttgccctatgggcgcctggcctaccacctggctgtggtgctgggcagtgccgccaacccccttgcctgcttcctggccatgggcgtgctgtgcaggtccctggcagggctggttggtctttctctgctgggcatgctctttggggcctacctgatggcactggcaatcctgagcccctgcccacccctggtgggcaccactgcaggggtggtccttgtggtgctgtcgtgggtgctgtgtctgtgtgtgttctcatatgtgaaggtggctgcaagctccctgctgcatggtgggggtcggccggcattgctggcagctggtgtggccatccaagtgggctccctgcttggtgccggtgccatgttccctcccaccagcatctaccacgtgtttcaaagcagaaaggactgtgtagacccctgtggcccctgagcctgggcaggtggggacccaactccaccccacctgtcttcatcgtgaggctgccacagtgcctgactacttgtggcccaggcaggcttcccccaacacaggaacgctcatggacacctgcacactccacagaagacgttggcatgtgaggccagggtgggcaccaaagaccaggcccagagccaggggacaggttggggctgtgggcttggacccagggcctgagacctttgtgggatttgtgcaataaagtgtttttatttaaaacc

SEQ ID NO: 734249 - DNA, 590 bp, Homo sapiens
ttgcgagaattgcttgaacccgggagcggaggttgtggtgagccgagatcgccattgcactccagcttgggtgacaagagcgaaattccatctcaaaaaaaaaaaaaaaaaaaaaatctgaaatatggaccctggaagagccataaataataaaaatatttcctacaaaatactgtgatgtttacatagaaatcattgtgttgtctgcacagcctgttccaaatagtcacaagctcgtctagtaatgaaattctataaattttagttattgagacaagttagaatgaaagagctgaatgaaagttctcttggccaggtgtgatggctcacgcctataatcccagccctttgggaggccaagacaggtggatcagtcgagtccaggagattgagaccagcctgggcaatgtagtgaaaccctgtctacaaaaaatacaaaaattagctgggcgtgctggcgtgtgcctgtagttccagctactcgggaaactgaggtggaaggatcacctgagccctggaggttgaggctgcagtgagccatgatcatgctactggactctggcctgggtaatagagtgagatcatgtctc

SEQ ID NO: 734250 - DNA, 753 bp, Homo sapiens
atagctatgccgaatcgacggtttctcgtcaagaatgagacggaatgtgggagagggatattaaaagccctaatcccctcttctgatgttcgaagaaaggcaagaccagattcttgggagatccagagattaggggcatctgcgttctatgcagcacagttacccagccctttgatgggctcttcatcgttttgtgactagctcttagaggggaagaaccttgccttagctgctaacagtggttgattcttgaaagcttatgtaatcctagagacatatccaggcatattgggattgccaataaagatgtcacttgtttccacgttggggttctccttattgactcatgagcaccacaatagagtctatacacagacttagtttggggttcttggttgggatttcagcattagaaatagatgcagcactcatggaaaaacatcatgagtgcatctgagccaattttagatgatttcattaattctgcataccttctctttgacccattgatgcaggcccacatctatccagccccaactgtcttatttgcctttaacccattctggaattacccagtatgacttatattatttctatgcacatgagaatccaaggttttagaaacctggcatgcttataactactgctgacagtccctcatagtcagggcttaaagcgccaaaatacacggaaacataagagaaaaagtcccccagtgagaaacctgattgatggaaggggaagaatgtgtgg

SEQ ID NO: 734251 - DNA, 6085 bp, Homo sapiens
gggggtgggggtgccctgctgccccatatatacagcccctgagaccaggtctggctccacagctctgtcctgctctgtgtctttccctgctgctctcaggtcccctgcaggccttggcccctttcctcatctgtagacacacttgagtagcccaggcacagccatgggagattcggagatggcagtctttggggctgccgccccctacctgcgcaagtcagagaaggagcggctagaagcgcagaccaggccttttgacctcaagaaggatgtcttcgtgcctgatgacaaacaggagtttgtcaaggccaagatcgtgtctcgagagggtggcaaagtcactgccgagactgagtatggcaagacagtgaccgtgaaggaggaccaggtgatgcagcagaacccacccaagttcgacaaaatcgaggacatggccatgctgaccttcctgcatgagcccgcggtgctctacaacctcaaggatcgctacggctcctggatgatctacacctactcgggcctcttctgtgtcaccgtcaacccttacaagtggctgccggtgtacactcctgaggtggtggctgcctaccggggcaagaagaggagcgaggccccgccccacatcttctccatctccgacaacgcctatcagtacatgctgacagacagagaaaaccagtccatcctgatcaccggagaatccggagcagggaagacagtcaacaccaagagggtcatccagtactttgctgttattgcagccattggggaccgcagcaagaaggaccagagcccgggcaagggcaccctggaggaccagatcatccaggccaaccctgctctggaggcctttggcaatgccaagaccgtccggaacgacaactcctcccgcttcgggaaattcattcgaattcattttggggcaacaggaaagttggcatctgcagacatagagacctatcttctggaaaaatccagagttattttccagctgaaagcagagagagattatcacattttctaccaaatcctgtctaacaaaaagcctgagctgctggacatgctgctgatcaccaacaacccctacgattatgcattcatctcccaaggagagaccaccgtggcctccattgatgacgctgaggagctcatggccactgataacgcttttgatgtgctgggcttcacttcagaggagaaaaactccatgtataagctgacaggcgccatcatgcactttggaaacatgaagttcaagctgaagcagcgggaggagcaggcggagccagacggcactgaagaggctgacaagtctgcctacctcatggggctgaactcagccgacctgctcaaggggctgtgccaccctcgggtgaaagtgggcaatgagtacgtcaccaaggggcagaatgtccagcaggtgatatatgccactggggcactggccaaggcagtgtatgagaggatgttcaactggatggtgacgcgcatcaatgccaccctggagaccaagcagccacgccagtacttcataggagtcctggacatcgctggcttcgagatcttcgatttcaacagctttgagcagctctgcatcaacttcaccaacgagaagctgcagcagttcttcaaccaccacatgtttgtgctggagcaggaggagtacaagaaggagggcatcgagtggacattcattgactttggcatggacctgcaggcctgcattgacctcatcgagaagcccatgggcatcatgtccatcctggaagaggagtgcatgttccccaaggccaccgacatgaccttcaaggccaagctgtttgacaaccacctgggcaaatccgccaacttccagaagccacgcaatatcaaggggaagcctgaagcccacttctccctgatccactatgccggcatcgtggactacaacatcattggctggctgcagaagaacaaggatcctctcaatgagactgtcgtgggcttgtatcagaagtcttccctcaagctgctcagcaccctgtttgccaactatgctggggctgatgcgcctattgagaagggcaaaggcaaggccaagaaaggctcgtcctttcagactgtgtcagctctgcacagggaaaatctgaacaagctgatgaccaacttgcgctccacccatccccactttgtacgttgtatcatccctaatgagacaaagtctccaggggtgatggacaaccccctggtcatgcaccagctgcgctgcaatggtgtgctggagggcatccgcatctgcaggaaaggcttccccaaccgcatcctctacggggacttccggcagaggtatcgcatcctgaacccagcggccatccctgagggacagttcattgatagcaggaagggggcagagaagctgctcagctccctggacattgatcacaaccagtacaagtttggccacaccaaggtgttcttcaaggccgggctgctggggctgctggaggaaatgagggacgagaggctgagccgcatcatcacgcgtatccaggcccagtcccgaggtgtgctcgccagaatggagtacaaaaagctgctggaacgtagagactccctgctggtaatccagtggaacattcgggccttcatgggggtcaagaattggccctggatgaagctctacttcaagatcaagccgctgctgaagagtgcagaaagagagaaggagatggcctccatgaaggaggagttcacacgcctcaaagaggcgctagagaagtccgaggctcgccgcaaggagctggaggagaagatggtgtccctgctgcaggagaagaatgacctgcagctccaagtgcaggcggaacaagacaacctggcagatgctgaggagcgctgtgatcagctgatcaaaaacaagattcagctggaggccaaggtgaaggagatgaacgagaggctggaggatgaggaggagatgaatgctgagctcactgccaagaagcgcaagctggaagatgagtgctcagagctcaaaagggacatcgatgatctggagctgacactggccaaagtggagaaggagaaacacgcaacagagaacaaggtgaaaaacctgacagaggagatggctgggctggatgagatcattgccaagctgaccaaggagaagaaagctctgcaagaggcccaccaacaggctctggatgaccttcaggccgaggaggacaaggtcaacaccctgactaaggccaaagtcaagctggagcagcaagtggatgatctggaaggatccctggagcaagagaagaaggtgcgcatggacctggagcgagcgaagcggaagctggagggcgacctgaagctgacccaggagagcatcatggacctggagaatgacaagcagcagctggatgagcggctgaaaaaaaaagactttgagctgaatgctctcaacgcaaggattgaggatgaacaggccctcggcagccagctgcagaagaagctcaaggagcttcaggcacgcatcgaggagctggaggaggagctggaggccgagcgcaccgccagggctaaggtggagaagctgcgctcagacctgtctcgggagctggaggagatcagcgagcggctggaagaggccggcggggccacgtccgtgcagatcgagatgaacaagaagcgcgaggccgagttccagaagatgcggcgggacctggaggaggccacgctgcagcacgaggccactgccgcggccctgcgcaagaagcacgccgacagcgtggccgagctgggcgagcagatcgacaacctgcagcgggtgaagcagaagctggagaaggagaagagcgagttcaagctggagctggatgacgtcacctccaacatggagcagatcatcaaggccaaggctaacctggagaagatgtgccggaccttggaagaccagatgaatgagcaccggagcaaggcggaggagacccagcgttctgtcaacgacctcaccagccagcgggccaagttgcaaaccgagaatggtgagctgtcccggcagctggatgagaaggaggcactgatctcccagctgacccgaggcaagctcacctacacccagcagctggaggacctcaagaggcagctggaggaggaggttaaggcgaagaacgccctggcccacgcactgcagtcggcccggcatgactgcgacctgctgcgggagcagtacgaggaggagacggaggccaaggccgagctgcagcgcgtcctttccaaggccaactcggaggtggcccagtggaggaccaagtatgagacggacgccattcagcggactgaggagctcgaggaggccaagaagaagctggcccagcggctgcaggaagctgaggaggccgtggaggctgttaatgccaagtgctcctcgctggagaagaccaagcaccggctacagaatgagatcgaggacttgatggtggacgtagagcgctccaatgctgctgctgcagccctggacaagaagcagaggaacttcgacaagatcctggccgagtggaagcagaagtatgaggagtcgcagtcggagctggagtcctcgcagaaggaggctcgctccctcagcacagagctcttcaaactcaagaacgcctatgaggagtccctggaacatctggagaccttcaagcgggagaacaaaaacctgcaggaggagatctccgacttgactgagcagttgggttccagcggaaagactatccatgagctggagaaggtccgaaagcagctggaggccgagaagatggagctgcagtcagccctggaggaggccgaggcctccctggagcacgaggagggcaagatcctccgggcccagctggagttcaaccagatcaaggcagagatcgagcggaagctggcagagaaggacgaggagatggaacaggccaagcgcaaccacctgcgggtggtggactcgctgcagacctccctggacgcagagacacgcagccgcaacgaggccctgagggtgaagaagaagatggaaggagacctcaatgagatggagatccagctcagccacgccaaccgcatggccgccgaggcccagaagcaagtcaagagcctccagagcttgttgaaggacacccagattcagctggacgatgcagtccgtgccaacgacgacctgaaggagaacatcgccatcgtggagcggcgcaacaacctgctgcaggctgagctggaggagttgcgtgccgtggtggagcagacagagcggtcccggaagctggcggagcaggagctgattgagactagtgagcgggtgcagctgctgcattcccagaacaccagcctcatcaaccagaagaagaagatggatgctgacctgtcccagctccagactgaagtggaggaggcagtgcaggagtgcaggaatgctgaggagaaggccaagaaggccatcacggatgccgccatgatggcagaggagctgaagaaggagcaggacaccagcgcccacctggagcgcatgaagaagaacatggaacagaccattaaggacctgcagcaccggctggacgaagccgagcagatcgccctcaagggcggcaagaagcagctgcagaagctggaagcgcgggtgcgggagctggagaatgagctggaggccgagcagaagcgcaacgcagagtcggtgaagggcatgaggaagagcgagcggcgcatcaaggagctcacctaccagacggaggaggacaggaaaaacctgctgcggctgcaggacctggtagacaagctgcagctaaaggtcaaggcctacaagcgccaggccgaggaggcggaggagcaagccaacaccaacctgtccaagttccgcaaggtgcagcacgagctggatgaggcagaggagcgggcggacatcgccgagtcccaggtcaacaagctgcgggccaagagccgtgacattggcacgaagggcttgaatgaggagtagctttgccacatcttgatctgctcagccctggaggtgccagcaaagccccatgctggagcctgtgtaacagctccttgggaggaagcagaataaagcaattttccttgaagccga

SEQ ID NO: 734252 - DNA, 2022 bp, Homo sapiens; identical to SEQ ID NO: 362119

SEQ ID NO: 734253 - DNA, 375 bp, Homo sapiens
ttcaacagctttgagcagctctgcatcaacttcaccaacgagaagctgcagcagttcttcaaccaccacatgtttgtgctggagcaggaggagtacaagaaggagggcgaggagcaagccaacaccaacctgtccaagttccgcaaggtgcagcacgagctggatgaggcagaggagcgggcggacatcgccgagtcccaggtcaacaagctgcgggccaagagccgtgacattggcacgaagggcttgaatgaggagtagctttgccacatcttgatctgctcagccctggaggtgccagcaaagccccatgctggagcctgtgtaacagctccttgggaggaagcagaataaagcaattttccttgaagccga

SEQ ID NO: 734254 - DNA, 4079 bp, Homo sapiens
acctccccacactgatgcttcttttgttgactctccttcctgcagctattgagaagggcaaaggcaaggccaagaaaggctcgtcctttcagactgtgtcagctctgcacagggaaaatctgaacaagctgatgaccaacttgcgctccacccatccccactttgtacgttgtatcatccctaatgagacaaagtctccaggggtgatggacaaccccctggtcatgcaccagctgcgctgcaatggtgtgctggagggcatccgcatctgcaggaaaggcttccccaaccgcatcctctacggggacttccggcagaggtatcgcatcctgaacccagcggccatccctgagggacagttcattgatagcaggaagggggcagagaagctgctcagctccctggacattgatcacaaccagtacaagtttggccacaccaaggtgttcttcaaggccgggctgctggggctgctggaggaaatgagggacgagaggctgagccgcatcatcacgcgtatccaggcccagtcccgaggtgtgctcgccagaatggagtacaaaaagctgctggaacgtagagactccctgctggtaatccagtggaacattcgggccttcatgggggtcaagaattggccctggatgaagctctacttcaagatcaagccgctgctgaagagtgcagaaagagagaaggagatggcctccatgaaggaggagttcacacgcctcaaagaggcgctagagaagtccgaggctcgccgcaaggagctggaggagaagatggtgtccctgctgcaggagaagaatgacctgcagctccaagtgcaggcggaacaagacaacctggcagatgctgaggagcgctgtgatcagctgatcaaaaacaagattcagctggaggccaaggtgaaggagatgaacgagaggctggaggatgaggaggagatgaatgctgagctcactgccaagaagcgcaagctggaagatgagtgctcagagctcaaaagggacatcgatgatctggagctgacactggccaaagtggagaaggagaaacacgcaacagagaacaaggtgaaaaacctgacagaggagatggctgggctggatgagatcattgccaagctgaccaaggagaagaaagctctgcaagaggcccaccaacaggctctggatgaccttcaggccgaggaggacaaggtcaacaccctgactaaggccaaagtcaagctggagcagcaagtggatgatctggaaggatccctggagcaagagaagaaggtgcgcatggacctggagcgagcgaagcggaagctggagggcgacctgaagctgacccaggagagcatcatggacctggagaatgacaagcagcagctggatgagcggctgaaaaaaaaagactttgagctgaatgctctcaacgcaaggattgaggatgaacaggccctcggcagccagctgcagaagaagctcaaggagcttcaggcacgcatcgaggagctggaggaggagctggaggccgagcgcaccgccagggctaaggtggagaagctgcgctcagacctgtctcgggagctggaggagatcagcgagcggctggaagaggccggcggggccacgtccgtgcagatcgagatgaacaagaagcgcgaggccgagttccagaagatgcggcgggacctggaggaggccacgctgcagcacgaggccactgccgcggccctgcgcaagaagcacgccgacagcgtggccgagctgggcgagcagatcgacaacctgcagcgggtgaagcagaagctggagaaggagaagagcgagttcaagctggagctggatgacgtcacctccaacatggagcagatcatcaaggccaaggctaacctggagaagatgtgccggaccttggaagaccagatgaatgagcaccggagcaaggcggaggagacccagcgttctgtcaacgacctcaccagccagcgggccaagttgcaaaccgagaatggtgagctgtcccggcagctggatgagaaggaggcactgatctcccagctgacccgaggcaagctcacctacacccagcagctggaggacctcaagaggcagctggaggaggaggttaaggcgaagaacgccctggcccacgcactgcagtcggcccggcatgactgcgacctgctgcgggagcagtacgaggaggagacggaggccaaggccgagctgcagcgcgtcctttccaaggccaactcggaggtggcccagtggaggaccaagtatgagacggacgccattcagcggactgaggagctcgaggaggccaagaagaagctggcccagcggctgcaggaagctgaggaggccgtggaggctgttaatgccaagtgctcctcgctggagaagaccaagcaccggctacagaatgagatcgaggacttgatggtggacgtagagcgctccaatgctgctgctgcagccctggacaagaagcagaggaacttcgacaagatcctggccgagtggaagcagaagtatgaggagtcgcagtcggagctggagtcctcgcagaaggaggctcgctccctcagcacagagctcttcaaactcaagaacgcctatgaggagtccctggaacatctggagaccttcaagcgggagaacaaaaacctgcaggaggagatctccgacttgactgagcagttgggttccagcggaaagactatccatgagctggagaaggtccgaaagcagctggaggccgagaagatggagctgcagtcagccctggaggaggccgaggcctccctggagcacgaggagggcaagatcctccgggcccagctggagttcaaccagatcaaggcagagatcgagcggaagctggcagagaaggacgaggagatggaacaggccaagcgcaaccacctgcgggtggtggactcgctgcagacctccctggacgcagagacacgcagccgcaacgaggccctgagggtgaagaagaagatggaaggagacctcaatgagatggagatccagctcagccacgccaaccgcatggccgccgaggcccagaagcaagtcaagagcctccagagcttgttgaaggacacccagattcagctggacgatgcagtccgtgccaacgacgacctgaaggagaacatcgccatcgtggagcggcgcaacaacctgctgcaggctgagctggaggagttgcgtgccgtggtggagcagacagagcggtcccggaagctggcggagcaggagctgattgagactagtgagcgggtgcagctgctgcattcccagaacaccagcctcatcaaccagaagaagaagatggatgctgacctgtcccagctccagactgaagtggaggaggcagtgcaggagtgcaggaatgctgaggagaaggccaagaaggccatcacggatgccgccatgatggcagaggagctgaagaaggagcaggacaccagcgcccacctggagcgcatgaagaagaacatggaacagaccattaaggacctgcagcaccggctggacgaagccgagcagatcgccctcaagggcggcaagaagcagctgcagaagctggaagcgcgggtgcgggagctggagaatgagctggaggccgagcagaagcgcaacgcagagtcggtgaagggcatgaggaagagcgagcggcgcatcaaggagctcacctaccagacggaggaggacaggaaaaacctgctgcggctgcaggacctggtagacaagctgcagctaaaggtcaaggcctacaagcgccaggccgaggaggcggaggagcaagccaacaccaacctgtccaagttccgcaaggtgcagcacgagctggatgaggcagaggagcgggcggacatcgccgagtcccaggtcaacaagctgcgggccaagagccgtgacattggcacgaagggcttgaatgaggagtagctttgccacatcttgatctgctcagccctggaggtgccagcaaagccccatgctggagcctgtgtaacagctccttgggaggaagcagaataaagcaattttccttgaagccga

SEQ ID NO: 734255 - DNA, 2765 bp, Homo sapiens
acctccccacactgatgcttcttttgttgactctccttcctgcagctattgagaagggcaaaggcaaggccaagaaaggctcgtcctttcagactgtgtcagctctgcacagggaaaatctgaacaagctgatgaccaacttgcgctccacccatccccactttgtacgttgtatcatccctaatgagacaaagtctccaggggtgatggacaaccccctggtcatgcaccagctgcgctgcaatggtgtgctggagggcatccgcatctgcaggaaaggcttccccaaccgcatcctctacggggacttccggcagaggtatcgcatcctgaacccagcggccatccctgagggacagttcattgatagcaggaagggggcagagaagctgctcagctccctggacattgatcacaaccagtacaagtttggccacaccaaggtgttcttcaaggccgggctgctggggctgctggaggaaatgagggacgagaggctgagccgcatcatcacgcgtatccaggcccagtcccgaggtgtgctcgccagaatggagtacaaaaagctgctggaacgtagagactccctgctggtaatccagtggaacattcgggccttcatgggggtcaagaattggccctggatgaagctctacttcaagatcaagccgctgctgaagagtgcagaaagagagaaggagatggcctccatgaaggaggagttcacacgcctcaaagaggcgctagagaagtccgaggctcgccgcaaggagctggaggagaagatggtgtccctgctgcaggagaagaatgacctgcagctccaagtgcaggcggaacaagacaacctggcagatgctgaggagcgctgtgatcagctgatcaaaaacaagattcagctggaggccaaggtgaaggagatgaacgagaggctggaggatgaggaggagatgaatgctgagctcactgccaagaagcgcaagctggaagatgagtgctcagagctcaaaagggacatcgatgatctggagctgacactggccaaagtggagaaggagaaacacgcaacagagaacaaggtgaaaaacctgacagaggagatggctgggctggatgagatcattgccaagctgaccaaggagaagaaagctctgcaagaggcccaccaacaggctctggatgaccttcaggccgaggaggacaaggtcaacaccctgactaaggccaaagtcaagctggagcagcaagtggatgatctggaaggatccctggagcaagagaagaaggtgcgcatggacctggagcgagcgaagcggaagctggagggcgacctgaagctgacccaggagagcatcatggacctggagaatgacaagcagcagctggatgagcggctgaaaaaaaaagactttgagctgaatgctctcaacgcaaggattgaggatgaacaggccctcggcagccagctgcagaagaagctcaaggagcttcaggcacgcatcgaggagctggaggaggagctggaggccgagcgcaccgccagggctaaggtggagaagctgcgctcagacctgtctcgggagctggaggagatcagcgagcggctggaagaggccggcggggccacgtccgtgcagacctccctggacgcagagacacgcagccgcaacgaggccctgagggtgaagaagaagatggaaggagacctcaatgagatggagatccagctcagccacgccaaccgcatggccgccgaggcccagaagcaagtcaagagcctccagagcttgttgaaggacacccagattcagctggacgatgcagtccgtgccaacgacgacctgaaggagaacatcgccatcgtggagcggcgcaacaacctgctgcaggctgagctggaggagttgcgtgccgtggtggagcagacagagcggtcccggaagctggcggagcaggagctgattgagactagtgagcgggtgcagctgctgcattcccagaacaccagcctcatcaaccagaagaagaagatggatgctgacctgtcccagctccagactgaagtggaggaggcagtgcaggagtgcaggaatgctgaggagaaggccaagaaggccatcacggatgccgccatgatggcagaggagctgaagaaggagcaggacaccagcgcccacctggagcgcatgaagaagaacatggaacagaccattaaggacctgcagcaccggctggacgaagccgagcagatcgccctcaagggcggcaagaagcagctgcagaagctggaagcgcgggtgcgggagctggagaatgagctggaggccgagcagaagcgcaacgcagagtcggtgaagggcatgaggaagagcgagcggcgcatcaaggagctcacctaccagacggaggaggacaggaaaaacctgctgcggctgcaggacctggtagacaagctgcagctaaaggtcaaggcctacaagcgccaggccgaggaggcggaggagcaagccaacaccaacctgtccaagttccgcaaggtgcagcacgagctggatgaggcagaggagcgggcggacatcgccgagtcccaggtcaacaagctgcgggccaagagccgtgacattggcacgaagggcttgaatgaggagtagctttgccacatcttgatctgctcagccctggaggtgccagcaaagccccatgctggagcctgtgtaacagctccttgggaggaagcagaataaagcaattttccttgaagccga

SEQ ID NO: 734256 - DNA, 4020 bp, Homo sapiens
acctccccacactgatgcttcttttgttgactctccttcctgcagctattgagaagggcaaaggcaaggccaagaaaggctcgtcctttcagactgtgtcagctctgcacagggaaaatctgaacaagctgatgaccaacttgcgctccacccatccccactttgtacgttgtatcatccctaatgagacaaagtctccaggggtgatggacaaccccctggtcatgcaccagctgcgctgcaatggtgtgctggagggcatccgcatctgcaggaaaggcttccccaaccgcatcctctacggggacttccggcagaggtatcgcatcctgaacccagcggccatccctgagggacagttcattgatagcaggaagggggcagagaagctgctcagctccctggacattgatcacaaccagtacaagtttggccacaccaaggtgttcttcaaggccgggctgctggggctgctggaggaaatgagggacgagaggctgagccgcatcatcacgcgtatccaggcccagtcccgaggtgtgctcgccagaatggagtacaaaaagctgctggaacgtagagactccctgctggtaatccagtggaacattcgggccttcatgggggtcaagaattggccctggatgaagctctacttcaagatcaagccgctgctgaagagtgcagaaagagagaaggagatggcctccatgaaggaggagttcacacgcctcaaagaggcgctagagaagtccgaggctcgccgcaaggagctggaggagaagatggtgtccctgctgcaggagaagaatgacctgcagctccaagtgcaggcggaacaagacaacctggcagatgctgaggagcgctgtgatcagctgatcaaaaacaagattcagctggaggccaaggtgaaggagatgaacgagaggctggaggatgaggaggagatgaatgctgagctcactgccaagaagcgcaagctggaagatgagtgctcagagctcaaaagggacatcgatgatctggagctgacactggccaaagtggagaaggagaaacacgcaacagagaacaaggtgaaaaacctgacagaggagatggctgggctggatgagatcattgccaagctgaccaaggagaagaaagctctgcaagaggcccaccaacaggctctggatgaccttcaggccgaggaggacaaggtcaacaccctgactaaggccaaagtcaagctggagcagcaagtggatgatctggaaggatccctggagcaagagaagaaggtgcgcatggacctggagcgagcgaagcggaagctggagggcgacctgaagctgacccaggagagcatcatggacctggagaatgacaagcagcagctggatgagcggctgaaaaaaaaagactttgagctgaatgctctcaacgcaaggattgaggatgaacaggccctcggcagccagctgcagaagaagctcaaggagcttcaggcacgcatcgaggagctggaggaggagctggaggccgagcgcaccgccagggctaaggtggagaagctgcgctcagacctgtctcgggagctggaggagatcagcgagcggctggaagaggccggcggggccacgtccgtgcagatcgagatgaacaagaagcgcgaggccgagttccagaagatgcggcgggacctggaggaggccacgctgcagcacgaggccactgccgcggccctgcgcaagaagcacgccgacagcgtggccgagctgggcgagcagatcgacaacctgcagcgggtgaagcagaagctggagaaggagaagagcgagttcaagctggagctggatgacgtcacctccaacatggagcagatcatcaaggccaaggctaacctggagaagatgtgccggaccttggaagaccagatgaatgagcaccggagcaaggcggaggagacccagcgttctgtcaacgacctcaccagccagcgggccaagttgcaaaccgagaatggtgagctgtcccggcagctggatgagaaggaggcactgatctcccagctgacccgaggcaagctcacctacacccagcagctggaggacctcaagaggcagctggaggaggaggttaaggcgaagaacgccctggcccacgcactgcagtcggcccggcatgactgcgacctgctgcgggagcagtacgaggaggagacggaggccaaggccgagctgcagcgcgtcctttccaaggccaactcggaggtggcccagtggaggaccaagtatgagacggacgccattcagcggactgaggagctcgaggaggccaagaagaagctggcccagcggctgcaggaagctgaggaggccgtggaggctgttaatgccaagtgctcctcgctggagaagaccaagcaccggctacagaatgagatcgaggacttgatggtggacgtagagcgctccaatgctgctgctgcagccctggacaagaagcagaggaacttcgacaagatcctggccgagtggaagcagaagtatgaggagtcgcagtcggagctggagtcctcgcagaaggaggctcgctccctcagcacagagctcttcaaactcaagaacgcctatgaggagtccctggaacatctggagaccttcaagcgggagaacaaaaacctgcaggaggagatctccgacttgactgagcagttgggttccagcggaaagactatccatgagctggagaaggtccgaaagcagctggaggccgagaagatggagctgcagtcagccctggaggaggccgaggcctccctggagcacgaggagggcaagatcctccgggcccagctggaaacaggccaagcgcaaccacctgcgggtggtggactcgctgcagacctccctggacgcagagacacgcagccgcaacgaggccctgagggtgaagaagaagatggaaggagacctcaatgagatggagatccagctcagccacgccaaccgcatggccgccgaggcccagaagcaagtcaagagcctccagagcttgttgaaggacacccagattcagctggacgatgcagtccgtgccaacgacgacctgaaggagaacatcgccatcgtggagcggcgcaacaacctgctgcaggctgagctggaggagttgcgtgccgtggtggagcagacagagcggtcccggaagctggcggagcaggagctgattgagactagtgagcgggtgcagctgctgcattcccagaacaccagcctcatcaaccagaagaagaagatggatgctgacctgtcccagctccagactgaagtggaggaggcagtgcaggagtgcaggaatgctgaggagaaggccaagaaggccatcacggatgccgccatgatggcagaggagctgaagaaggagcaggacaccagcgcccacctggagcgcatgaagaagaacatggaacagaccattaaggacctgcagcaccggctggacgaagccgagcagatcgccctcaagggcggcaagaagcagctgcagaagctggaagcgcgggtgcgggagctggagaatgagctggaggccgagcagaagcgcaacgcagagtcggtgaagggcatgaggaagagcgagcggcgcatcaaggagctcacctaccagacggaggaggacaggaaaaacctgctgcggctgcaggacctggtagacaagctgcagctaaaggtcaaggcctacaagcgccaggccgaggaggcggaggagcaagccaacaccaacctgtccaagttccgcaaggtgcagcacgagctggatgaggcagaggagcgggcggacatcgccgagtcccaggtcaacaagctgcgggccaagagccgtgacattggcacgaagggcttgaatgaggagtagctttgccacatcttgatctgctcagccctggaggtgccagcaaagccccatgctggagcctgtgtaacagctccttgggaggaagcagaataaagcaattttccttgaagccga

SEQ ID NO: 734257 - DNA, 3876 bp, Homo sapiens
gggaaattcattcgaattcattttggggcaacaggaaagttggcatctgcagacatagagacctatcttctggaaaaatccagagttattttccagctgaaagcagagagagattatcacattttctaccaaatcctgtctaacaaaaagcctgagctgctggacatgctgctgatcaccaacaacccctacgattatgcattcatctcccaaggagagaccaccgtggcctccattgatgacgctgaggagctcatggccactgataacgcttttgatgtgctgggcttcacttcagaggagaaaaactccatgtataagctgacaggcgccatcatgcactttggaaacatgaagttcaagctgaagcagcgggaggagcaggcggagccagacggcactgaagaggctgacaagtctgcctacctcatggggctgaactcagccgacctgctcaaggggctgtgccaccctcgggtgaaagtgggcaatgagtacgtcaccaaggggcagaatgtccagcaggtgatatatgccactggggcactggccaaggcagtgtatgagaggatgttcaactggatggtgacgcgcatcaatgccaccctggagaccaagcagccacgccagtacttcataggagtcctggacatcgctggcttcgagatcttcgatttcaacagctttgagcagctctgcatcaacttcaccaacgagaagctgcagcagttcttcaaccaccacatgtttgtgctggagcaggaggagtacaagaaggagggcatcgagtggacattcattgactttggcatggacctgcaggcctgcattgacctcatcgagaagcccatgggcatcatgtccatcctggaagaggagtgcatgttccccaaggccaccgacatgaccttcaaggccaagctgtttgacaaccacctgggcaaatccgccaacttccagaagccacgcaatatcaaggggaagcctgaagcccacttctccctgatccactatgccggcatcgtggactacaacatcattggctggctgcagaagaacaaggatcctctcaatgagactgtcgtgggcttgtatcagaagtcttccctcaagctgctcagcaccctgtttgccaactatgctggggctgatgcgcctattgagaagggcaaaggcaaggccaagaaaggctcgtcctttcagactgtgtcagctctgcacagggaaaatctgaacaagctgatgaccaacttgcgctccacccatccccactttgtacgttgtatcatccctaatgagacaaagtctccaggggtgatggacaaccccctggtcatgcaccagctgcgctgcaatggtgtgctggagggcatccgcatctgcaggaaaggcttccccaaccgcatcctctacggggacttccggcagaggtatcgcatcctgaacccagcggccatccctgagggacagttcattgatagcaggaagggggcagagaagctgctcagctccctggacattgatcacaaccagtacaagtttggccacaccaaggtgttcttcaaggccgggctgctggggctgctggaggaaatgagggacgagaggctgagccgcatcatcacgcgtatccaggcccagtcccgaggtgtgctcgccagaatggagtacaaaaagctgctggaacgtagagactccctgctggtaatccagtggaacattcgggccttcatgggggtcaagaattggccctggatgaagctctacttcaagatcaagccgctgctgaagagtgcagaaagagagaaggagatggcctccatgaaggaggagttcacacgcctcaaagaggcgctagagaagtccgaggctcgccgcaaggagctggaggagaagatggtgtccctgctgcaggagaagaatgacctgcagctccaagtgcaggcggaacaagacaacctggcagatgctgaggagcgctgtgatcagctgatcaaaaacaagattcagctggaggccaaggtgaaggagatgaacgagaggctggaggatgaggaggagatgaatgctgagctcactgccaagaagcgcaagctggaagatgagtgctcagagctcaaaagggacatcgatgatctggagctgacactggccaaagtggagaaggagaaacacgcaacagagaacaaggtgaaaaacctgacagaggagatggctgggctggatgagatcattgccaagctgaccaaggagaagaaagctctgcaagaggcccaccaacaggctctggatgaccttcaggccgaggaggacaaggtcaacaccctgactaaggccaaagtcaagctggagcagcaagtggatgatctggaaggatccctggagcaagagaagaaggtgcgcatggacctggagcgagcgaagcggaagctggagggcgacctgaagctgacccaggagagcatcatggacctggagaatgacaagcagcagctggatgagcggctgaaaaaaaaagactttgagctgaatgctctcaacgcaaggattgaggatgaacaggccctcggcagccagctgcagaagaagctcaaggagcttcaggcacgcatcgaggagctggaggaggagctggaggccgagcgcaccgccagggctaaggtggagaagctgcgctcagacctgtctcgggagctggaggagatcagcgagcggctggaagaggccggcggggccacgtccgtgcagacctccctggacgcagagacacgcagccgcaacgaggccctgagggtgaagaagaagatggaaggagacctcaatgagatggagatccagctcagccacgccaaccgcatggccgccgaggcccagaagcaagtcaagagcctccagagcttgttgaaggacacccagattcagctggacgatgcagtccgtgccaacgacgacctgaaggagaacatcgccatcgtggagcggcgcaacaacctgctgcaggctgagctggaggagttgcgtgccgtggtggagcagacagagcggtcccggaagctggcggagcaggagctgattgagactagtgagcgggtgcagctgctgcattcccagaacaccagcctcatcaaccagaagaagaagatggatgctgacctgtcccagctccagactgaagtggaggaggcagtgcaggagtgcaggaatgctgaggagaaggccaagaaggccatcacggatgccgccatgatggcagaggagctgaagaaggagcaggacaccagcgcccacctggagcgcatgaagaagaacatggaacagaccattaaggacctgcagcaccggctggacgaagccgagcagatcgccctcaagggcggcaagaagcagctgcagaagctggaagcgcgggtgcgggagctggagaatgagctggaggccgagcagaagcgcaacgcagagtcggtgaagggcatgaggaagagcgagcggcgcatcaaggagctcacctaccagacggaggaggacaggaaaaacctgctgcggctgcaggacctggtagacaagctgcagctaaaggtcaaggcctacaagcgccaggccgaggaggcggaggagcaagccaacaccaacctgtccaagttccgcaaggtgcagcacgagctggatgaggcagaggagcgggcggacatcgccgagtcccaggtcaacaagctgcgggccaagagccgtgacattggcacgaagggcttgaatgaggagtagctttgccacatcttgatctgctcagccctggaggtgccagcaaagccccatgctggagcctgtgtaacagctccttgggaggaagcagaataaagcaattttccttgaagccga

SEQ ID NO: 734258 - DNA, 5131 bp, Homo sapiens
gggaaattcattcgaattcattttggggcaacaggaaagttggcatctgcagacatagagacctatcttctggaaaaatccagagttattttccagctgaaagcagagagagattatcacattttctaccaaatcctgtctaacaaaaagcctgagctgctggacatgctgctgatcaccaacaacccctacgattatgcattcatctcccaaggagagaccaccgtggcctccattgatgacgctgaggagctcatggccactgataacgcttttgatgtgctgggcttcacttcagaggagaaaaactccatgtataagctgacaggcgccatcatgcactttggaaacatgaagttcaagctgaagcagcgggaggagcaggcggagccagacggcactgaagaggctgacaagtctgcctacctcatggggctgaactcagccgacctgctcaaggggctgtgccaccctcgggtgaaagtgggcaatgagtacgtcaccaaggggcagaatgtccagcaggtgatatatgccactggggcactggccaaggcagtgtatgagaggatgttcaactggatggtgacgcgcatcaatgccaccctggagaccaagcagccacgccagtacttcataggagtcctggacatcgctggcttcgagatcttcgatttcaacagctttgagcagctctgcatcaacttcaccaacgagaagctgcagcagttcttcaaccaccacatgtttgtgctggagcaggaggagtacaagaaggagggcatcgagtggacattcattgactttggcatggacctgcaggcctgcattgacctcatcgagaagcccatgggcatcatgtccatcctggaagaggagtgcatgttccccaaggccaccgacatgaccttcaaggccaagctgtttgacaaccacctgggcaaatccgccaacttccagaagccacgcaatatcaaggggaagcctgaagcccacttctccctgatccactatgccggcatcgtggactacaacatcattggctggctgcagaagaacaaggatcctctcaatgagactgtcgtgggcttgtatcagaagtcttccctcaagctgctcagcaccctgtttgccaactatgctggggctgatgcgcctattgagaagggcaaaggcaaggccaagaaaggctcgtcctttcagactgtgtcagctctgcacagggaaaatctgaacaagctgatgaccaacttgcgctccacccatccccactttgtacgttgtatcatccctaatgagacaaagtctccaggggtgatggacaaccccctggtcatgcaccagctgcgctgcaatggtgtgctggagggcatccgcatctgcaggaaaggcttccccaaccgcatcctctacggggacttccggcagaggtatcgcatcctgaacccagcggccatccctgagggacagttcattgatagcaggaagggggcagagaagctgctcagctccctggacattgatcacaaccagtacaagtttggccacaccaaggtgttcttcaaggccgggctgctggggctgctggaggaaatgagggacgagaggctgagccgcatcatcacgcgtatccaggcccagtcccgaggtgtgctcgccagaatggagtacaaaaagctgctggaacgtagagactccctgctggtaatccagtggaacattcgggccttcatgggggtcaagaattggccctggatgaagctctacttcaagatcaagccgctgctgaagagtgcagaaagagagaaggagatggcctccatgaaggaggagttcacacgcctcaaagaggcgctagagaagtccgaggctcgccgcaaggagctggaggagaagatggtgtccctgctgcaggagaagaatgacctgcagctccaagtgcaggcggaacaagacaacctggcagatgctgaggagcgctgtgatcagctgatcaaaaacaagattcagctggaggccaaggtgaaggagatgaacgagaggctggaggatgaggaggagatgaatgctgagctcactgccaagaagcgcaagctggaagatgagtgctcagagctcaaaagggacatcgatgatctggagctgacactggccaaagtggagaaggagaaacacgcaacagagaacaaggtgaaaaacctgacagaggagatggctgggctggatgagatcattgccaagctgaccaaggagaagaaagctctgcaagaggcccaccaacaggctctggatgaccttcaggccgaggaggacaaggtcaacaccctgactaaggccaaagtcaagctggagcagcaagtggatgatctggaaggatccctggagcaagagaagaaggtgcgcatggacctggagcgagcgaagcggaagctggagggcgacctgaagctgacccaggagagcatcatggacctggagaatgacaagcagcagctggatgagcggctgaaaaaaaaagactttgagctgaatgctctcaacgcaaggattgaggatgaacaggccctcggcagccagctgcagaagaagctcaaggagcttcaggcacgcatcgaggagctggaggaggagctggaggccgagcgcaccgccagggctaaggtggagaagctgcgctcagacctgtctcgggagctggaggagatcagcgagcggctggaagaggccggcggggccacgtccgtgcagatcgagatgaacaagaagcgcgaggccgagttccagaagatgcggcgggacctggaggaggccacgctgcagcacgaggccactgccgcggccctgcgcaagaagcacgccgacagcgtggccgagctgggcgagcagatcgacaacctgcagcgggtgaagcagaagctggagaaggagaagagcgagttcaagctggagctggatgacgtcacctccaacatggagcagatcatcaaggccaaggctaacctggagaagatgtgccggaccttggaagaccagatgaatgagcaccggagcaaggcggaggagacccagcgttctgtcaacgacctcaccagccagcgggccaagttgcaaaccgagaatggtgagctgtcccggcagctggatgagaaggaggcactgatctcccagctgacccgaggcaagctcacctacacccagcagctggaggacctcaagaggcagctggaggaggaggttaaggcgaagaacgccctggcccacgcactgcagtcggcccggcatgactgcgacctgctgcgggagcagtacgaggaggagacggaggccaaggccgagctgcagcgcgtcctttccaaggccaactcggaggtggcccagtggaggaccaagtatgagacggacgccattcagcggactgaggagctcgaggaggccaagaagaagctggcccagcggctgcaggaagctgaggaggccgtggaggctgttaatgccaagtgctcctcgctggagaagaccaagcaccggctacagaatgagatcgaggacttgatggtggacgtagagcgctccaatgctgctgctgcagccctggacaagaagcagaggaacttcgacaagatcctggccgagtggaagcagaagtatgaggagtcgcagtcggagctggagtcctcgcagaaggaggctcgctccctcagcacagagctcttcaaactcaagaacgcctatgaggagtccctggaacatctggagaccttcaagcgggagaacaaaaacctgcaggaggagatctccgacttgactgagcagttgggttccagcggaaagactatccatgagctggagaaggtccgaaagcagctggaggccgagaagatggagctgcagtcagccctggaggaggccgaggcctccctggagcacgaggagggcaagatcctccgggcccagctggaaacaggccaagcgcaaccacctgcgggtggtggactcgctgcagacctccctggacgcagagacacgcagccgcaacgaggccctgagggtgaagaagaagatggaaggagacctcaatgagatggagatccagctcagccacgccaaccgcatggccgccgaggcccagaagcaagtcaagagcctccagagcttgttgaaggacacccagattcagctggacgatgcagtccgtgccaacgacgacctgaaggagaacatcgccatcgtggagcggcgcaacaacctgctgcaggctgagctggaggagttgcgtgccgtggtggagcagacagagcggtcccggaagctggcggagcaggagctgattgagactagtgagcgggtgcagctgctgcattcccagaacaccagcctcatcaaccagaagaagaagatggatgctgacctgtcccagctccagactgaagtggaggaggcagtgcaggagtgcaggaatgctgaggagaaggccaagaaggccatcacggatgccgccatgatggcagaggagctgaagaaggagcaggacaccagcgcccacctggagcgcatgaagaagaacatggaacagaccattaaggacctgcagcaccggctggacgaagccgagcagatcgccctcaagggcggcaagaagcagctgcagaagctggaagcgcgggtgcgggagctggagaatgagctggaggccgagcagaagcgcaacgcagagtcggtgaagggcatgaggaagagcgagcggcgcatcaaggagctcacctaccagacggaggaggacaggaaaaacctgctgcggctgcaggacctggtagacaagctgcagctaaaggtcaaggcctacaagcgccaggccgaggaggcggaggagcaagccaacaccaacctgtccaagttccgcaaggtgcagcacgagctggatgaggcagaggagcgggcggacatcgccgagtcccaggtcaacaagctgcgggccaagagccgtgacattggcacgaagggcttgaatgaggagtagctttgccacatcttgatctgctcagccctggaggtgccagcaaagccccatgctggagcctgtgtaacagctccttgggaggaagcagaataaagcaattttccttgaagccga

SEQ ID NO: 734259 - DNA, 491 bp, Homo sapiens
ttcaacagctttgagcagctctgcatcaacttcaccaacgagaagctgcagcagttcttcaaccaccacatgtttgtgctggagcaggaggagtacaagaaggagggcgaggagcaagccaacaccaacctgtccaagttccgcaaggtgcagcacgagctggatgaggcagaggagcgggcggacatcgccgagtcccaggtcaacaagctgcgggccaagagccgtgacattggcacgaagggtgggtccctcttttgggctttgctagtcacccccacagcaggcatacccagacagagcaccctcaaacccgggatgcttccttttcatttattccacacacttgagccacatggccccagaggccaaggtaatgcagttctctgtgatttcaaggattcttccagctctaactttttttttttttttttttgagacggtgtctcactctagcctgggtgacagagcaagactccatctcaaaaaaa

SEQ ID NO: 734260 - DNA, 451 bp, Homo sapiens
ttcaacagctttgagcagctctgcatcaacttcaccaacgagaagctgcagcagttcttcaaccaccacatgtttgtgctggagcaggaggagtacaagaaggagggcgaggagcaagccaacaccaacctgtccaagttccgcaaggtgcagcacgagctggatgaggcagaggagcgggcggacatcgccgagtcccaggtcaacaagctgcgggccaagagccgtgacattggcacgaagagatgcggtttcaccatgttggccaggctggtcttgaactcctgaccttgtgatccactcgcctcagcctcccaaaggcttgaatgaggagtagctttgccacatcttgatctgctcagccctggaggtgccagcaaagccccatgctggagcctgtgtaacagctccttgggaggaagcagaataaagcaattttccttgaagccga

SEQ ID NO: 734261 - DNA, 2841 bp, Homo sapiens
acctccccacactgatgcttcttttgttgactctccttcctgcagctattgagaagggcaaaggcaaggccaagaaaggctcgtcctttcagactgtgtcagctctgcacagggaaaatctgaacaagctgatgaccaacttgcgctccacccatccccactttgtacgttgtatcatccctaatgagacaaagtctccaggggtgatggacaaccccctggtcatgcaccagctgcgctgcaatggtgtgctggagggcatccgcatctgcaggaaaggcttccccaaccgcatcctctacggggacttccggcagaggtatcgcatcctgaacccagcggccatccctgagggacagttcattgatagcaggaagggggcagagaagctgctcagctccctggacattgatcacaaccagtacaagtttggccacaccaaggtgttcttcaaggccgggctgctggggctgctggaggaaatgagggacgagaggctgagccgcatcatcacgcgtatccaggcccagtcccgaggtgtgctcgccagaatggagtacaaaaagctgctggaacgtagagactccctgctggtaatccagtggaacattcgggccttcatgggggtcaagaattggccctggatgaagctctacttcaagatcaagccgctgctgaagagtgcagaaagagagaaggagatggcctccatgaaggaggagttcacacgcctcaaagaggcgctagagaagtccgaggctcgccgcaaggagctggaggagaagatggtgtccctgctgcaggagaagaatgacctgcagctccaagtgcaggcggaacaagacaacctggcagatgctgaggagcgctgtgatcagctgatcaaaaacaagattcagctggaggccaaggtgaaggagatgaacgagaggctggaggatgaggaggagatgaatgctgagctcactgccaagaagcgcaagctggaagatgagtgctcagagctcaaaagggacatcgatgatctggagctgacactggccaaagtggagaaggagaaacacgcaacagagaacaaggtgaaaaacctgacagaggagatggctgggctggatgagatcattgccaagctgaccaaggagaagaaagctctgcaagaggcccaccaacaggctctggatgaccttcaggccgaggaggacaaggtcaacaccctgactaaggccaaagtcaagctggagcagcaagtggatgatctggaaggatccctggagcaagagaagaaggtgcgcatggacctggagcgagcgaagcggaagctggagggcgacctgaagctgacccaggagagcatcatggacctggagaatgacaagcagcagctggatgagcggctgaaaaaaaaagactttgagctgaatgctctcaacgcaaggattgaggatgaacaggccctcggcagccagctgcagaagaagctcaaggagcttcaggcacgcatcgaggagctggaggaggagctggaggccgagcgcaccgccagggctaaggtggagaagctgcgctcagacctgtctcgggagctggaggagatcagcgagcggctggaagaggccggcggggccacgtccgtgcagacctccctggacgcagagacacgcagccgcaacgaggccctgagggtgaagaagaagatggaaggagacctcaatgagatggagatccagctcagccacgccaaccgcatggccgccgaggcccagaagcaagtcaagagcctccagagcttgttgaaggacacccagattcagctggacgatgcagtccgtgccaacgacgacctgaaggagaacatcgccatcgtggagcggcgcaacaacctgctgcaggctgagctggaggagttgcgtgccgtggtggagcagacagagcggtcccggaagctggcggagcaggagctgattgagactagtgagcgggtgcagctgctgcattcccagaacaccagcctcatcaaccagaagaagaagatggatgctgacctgtcccagctccagactgaagtggaggaggcagtgcaggagtgcaggaatgctgaggagaaggccaagaaggccatcacggatgccgccatgatggcagaggagctgaagaaggagcaggacaccagcgcccacctggagcgcatgaagaagaacatggaacagaccattaaggacctgcagcaccggctggacgaagccgagcagatcgccctcaagggcggcaagaagcagctgcagaagctggaagcgcgggtgcgggagctggagaatgagctggaggccgagcagaagcgcaacgcagagtcggtgaagggcatgaggaagagcgagcggcgcatcaaggagctcacctaccagacggaggaggacaggaaaaacctgctgcggctgcaggacctggtagacaagctgcagctaaaggtcaaggcctacaagcgccaggccgaggaggcggaggagcaagccaacaccaacctgtccaagttccgcaaggtgcagcacgagctggatgaggcagaggagcgggcggacatcgccgagtcccaggtcaacaagctgcgggccaagagccgtgacattggcacgaagagatgcggtttcaccatgttggccaggctggtcttgaactcctgaccttgtgatccactcgcctcagcctcccaaaggcttgaatgaggagtagctttgccacatcttgatctgctcagccctggaggtgccagcaaagccccatgctggagcctgtgtaacagctccttgggaggaagcagaataaagcaattttccttgaagccga

SEQ ID NO: 734262 - DNA, 2094 bp, Homo sapiens
acctccccacactgatgcttcttttgttgactctccttcctgcagctattgagaagggcaaaggcaaggccaagaaaggctcgtcctttcagactgtgtcagctctgcacagggaaaatctgaacaagctgatgaccaacttgcgctccacccatccccactttgtacgttgtatcatccctaatgagacaaagtctccaggggtgatggacaaccccctggtcatgcaccagctgcgctgcaatggtgtgctggagggcatccgcatctgcaggaaaggcttccccaaccgcatcctctacggggacttccggcagaggtatcgcatcctgaacccagcggccatccctgagggacagttcattgatagcaggaagggggcagagaagctgctcagctccctggacattgatcacaaccagtacaagtttggccacaccaaggtgttcttcaaggccgggctgctggggctgctggaggaaatgagggacgagaggctgagccgcatcatcacgcgtatccaggcccagtcccgaggtgtgctcgccagaatggagtacaaaaagctgctggaacgtagagactccctgctggtaatccagtggaacattcgggccttcatgggggtcaagaattggccctggatgaagctctacttcaagatcaagccgctgctgaagagtgcagaaagagagaaggagatggcctccatgaaggaggagttcacacgcctcaaagaggcgctagagaagtccgaggctcgccgcaaggagctggaggagaagatggtgtccctgctgcaggagaagaatgacctgcagctccaagtgcaggcggaacaagacaacctggcagatgctgaggagcgctgtgatcagctgatcaaaaacaagattcagctggaggccaaggtgaaggagatgaacgagaggctggaggatgaggaggagatgaatgctgagctcactgccaagaagcgcaagctggaagatgagtgctcagagctcaaaagggacatcgatgatctggagctgacactggccaaagtggagaaggagaaacacgcaacagagaacaaggtgaaaaacctgacagaggagatggctgggctggatgagatcattgccaagctgaccaaggagaagaaagctctgcaagaggcccaccaacaggctctggatgaccttcaggccgaggaggacaaggtcaacaccctgactaaggccaaagtcaagctggagcagcaagtggatgatctggaaggatccctggagcaagagaagaaggtgcgcatggacctggagcgagcgaagcggaagctggagggcgacctgaagctgacccaggagagcatcatggacctggagaatgacaagcagcagctggatgagcggctgaaaaaaaaagactttgagctgaatgctctcaacgcaaggattgaggatgaacaggccctcggcagccagctgcagaagaagctcaaggagcttcaggcacgcatcgaggagctggaggaggagctggaggccgagcgcaccgccagggctaaggtggagaagctgcgctcagacctgtctcgggagctggaggagatcagcgagcggctggaagaggccggcggggccacgtccgtgcagacctccctggacgcagagacacgcagccgcaacgaggccctgagggtgaagaagaagatggaaggagacctcaatgagatggagatccagctcagccacgccaaccgcatggccgccgaggcccagaagcaagtcaagagcctccagagcttgttgaaggacacccagattcagctggacgatgcagtccgtgccaacgacgacctgaaggagaacatcgccatcgtggagcggcgcaacaacctgctgcaggctgagctggaggagttgcgtgccgtggtggagcagacagagcggtcccggaagctggcggagcaggagctgattgagactagtgagcgggtgcagctgctgcattcccagaacaccagcctcatcaaccagaagaagaagatggagtcggatctgacccagctccagtcggaagtggaggaggcagtgcaggagtgcagaaacg

SEQ ID NO: 734263 - DNA, 4155 bp, Homo sapiens
acctccccacactgatgcttcttttgttgactctccttcctgcagctattgagaagggcaaaggcaaggccaagaaaggctcgtcctttcagactgtgtcagctctgcacagggaaaatctgaacaagctgatgaccaacttgcgctccacccatccccactttgtacgttgtatcatccctaatgagacaaagtctccaggggtgatggacaaccccctggtcatgcaccagctgcgctgcaatggtgtgctggagggcatccgcatctgcaggaaaggcttccccaaccgcatcctctacggggacttccggcagaggtatcgcatcctgaacccagcggccatccctgagggacagttcattgatagcaggaagggggcagagaagctgctcagctccctggacattgatcacaaccagtacaagtttggccacaccaaggtgttcttcaaggccgggctgctggggctgctggaggaaatgagggacgagaggctgagccgcatcatcacgcgtatccaggcccagtcccgaggtgtgctcgccagaatggagtacaaaaagctgctggaacgtagagactccctgctggtaatccagtggaacattcgggccttcatgggggtcaagaattggccctggatgaagctctacttcaagatcaagccgctgctgaagagtgcagaaagagagaaggagatggcctccatgaaggaggagttcacacgcctcaaagaggcgctagagaagtccgaggctcgccgcaaggagctggaggagaagatggtgtccctgctgcaggagaagaatgacctgcagctccaagtgcaggcggaacaagacaacctggcagatgctgaggagcgctgtgatcagctgatcaaaaacaagattcagctggaggccaaggtgaaggagatgaacgagaggctggaggatgaggaggagatgaatgctgagctcactgccaagaagcgcaagctggaagatgagtgctcagagctcaaaagggacatcgatgatctggagctgacactggccaaagtggagaaggagaaacacgcaacagagaacaaggtgaaaaacctgacagaggagatggctgggctggatgagatcattgccaagctgaccaaggagaagaaagctctgcaagaggcccaccaacaggctctggatgaccttcaggccgaggaggacaaggtcaacaccctgactaaggccaaagtcaagctggagcagcaagtggatgatctggaaggatccctggagcaagagaagaaggtgcgcatggacctggagcgagcgaagcggaagctggagggcgacctgaagctgacccaggagagcatcatggacctggagaatgacaagcagcagctggatgagcggctgaaaaaaaaagactttgagctgaatgctctcaacgcaaggattgaggatgaacaggccctcggcagccagctgcagaagaagctcaaggagcttcaggcacgcatcgaggagctggaggaggagctggaggccgagcgcaccgccagggctaaggtggagaagctgcgctcagacctgtctcgggagctggaggagatcagcgagcggctggaagaggccggcggggccacgtccgtgcagatcgagatgaacaagaagcgcgaggccgagttccagaagatgcggcgggacctggaggaggccacgctgcagcacgaggccactgccgcggccctgcgcaagaagcacgccgacagcgtggccgagctgggcgagcagatcgacaacctgcagcgggtgaagcagaagctggagaaggagaagagcgagttcaagctggagctggatgacgtcacctccaacatggagcagatcatcaaggccaaggctaacctggagaagatgtgccggaccttggaagaccagatgaatgagcaccggagcaaggcggaggagacccagcgttctgtcaacgacctcaccagccagcgggccaagttgcaaaccgagaatggtgagctgtcccggcagctggatgagaaggaggcactgatctcccagctgacccgaggcaagctcacctacacccagcagctggaggacctcaagaggcagctggaggaggaggttaaggcgaagaacgccctggcccacgcactgcagtcggcccggcatgactgcgacctgctgcgggagcagtacgaggaggagacggaggccaaggccgagctgcagcgcgtcctttccaaggccaactcggaggtggcccagtggaggaccaagtatgagacggacgccattcagcggactgaggagctcgaggaggccaagaagaagctggcccagcggctgcaggaagctgaggaggccgtggaggctgttaatgccaagtgctcctcgctggagaagaccaagcaccggctacagaatgagatcgaggacttgatggtggacgtagagcgctccaatgctgctgctgcagccctggacaagaagcagaggaacttcgacaagatcctggccgagtggaagcagaagtatgaggagtcgcagtcggagctggagtcctcgcagaaggaggctcgctccctcagcacagagctcttcaaactcaagaacgcctatgaggagtccctggaacatctggagaccttcaagcgggagaacaaaaacctgcaggaggagatctccgacttgactgagcagttgggttccagcggaaagactatccatgagctggagaaggtccgaaagcagctggaggccgagaagatggagctgcagtcagccctggaggaggccgaggcctccctggagcacgaggagggcaagatcctccgggcccagctggagttcaaccagatcaaggcagagatcgagcggaagctggcagagaaggacgaggagatggaacaggccaagcgcaaccacctgcgggtggtggactcgctgcagacctccctggacgcagagacacgcagccgcaacgaggccctgagggtgaagaagaagatggaaggagacctcaatgagatggagatccagctcagccacgccaaccgcatggccgccgaggcccagaagcaagtcaagagcctccagagcttgttgaaggacacccagattcagctggacgatgcagtccgtgccaacgacgacctgaaggagaacatcgccatcgtggagcggcgcaacaacctgctgcaggctgagctggaggagttgcgtgccgtggtggagcagacagagcggtcccggaagctggcggagcaggagctgattgagactagtgagcgggtgcagctgctgcattcccagaacaccagcctcatcaaccagaagaagaagatggatgctgacctgtcccagctccagactgaagtggaggaggcagtgcaggagtgcaggaatgctgaggagaaggccaagaaggccatcacggatgccgccatgatggcagaggagctgaagaaggagcaggacaccagcgcccacctggagcgcatgaagaagaacatggaacagaccattaaggacctgcagcaccggctggacgaagccgagcagatcgccctcaagggcggcaagaagcagctgcagaagctggaagcgcgggtgcgggagctggagaatgagctggaggccgagcagaagcgcaacgcagagtcggtgaagggcatgaggaagagcgagcggcgcatcaaggagctcacctaccagacggaggaggacaggaaaaacctgctgcggctgcaggacctggtagacaagctgcagctaaaggtcaaggcctacaagcgccaggccgaggaggcggaggagcaagccaacaccaacctgtccaagttccgcaaggtgcagcacgagctggatgaggcagaggagcgggcggacatcgccgagtcccaggtcaacaagctgcgggccaagagccgtgacattggcacgaagagatgcggtttcaccatgttggccaggctggtcttgaactcctgaccttgtgatccactcgcctcagcctcccaaaggcttgaatgaggagtagctttgccacatcttgatctgctcagccctggaggtgccagcaaagccccatgctggagcctgtgtaacagctccttgggaggaagcagaataaagcaattttccttgaagccga

SEQ ID NO: 734264 - DNA, 3408 bp, Homo sapiens
acctccccacactgatgcttcttttgttgactctccttcctgcagctattgagaagggcaaaggcaaggccaagaaaggctcgtcctttcagactgtgtcagctctgcacagggaaaatctgaacaagctgatgaccaacttgcgctccacccatccccactttgtacgttgtatcatccctaatgagacaaagtctccaggggtgatggacaaccccctggtcatgcaccagctgcgctgcaatggtgtgctggagggcatccgcatctgcaggaaaggcttccccaaccgcatcctctacggggacttccggcagaggtatcgcatcctgaacccagcggccatccctgagggacagttcattgatagcaggaagggggcagagaagctgctcagctccctggacattgatcacaaccagtacaagtttggccacaccaaggtgttcttcaaggccgggctgctggggctgctggaggaaatgagggacgagaggctgagccgcatcatcacgcgtatccaggcccagtcccgaggtgtgctcgccagaatggagtacaaaaagctgctggaacgtagagactccctgctggtaatccagtggaacattcgggccttcatgggggtcaagaattggccctggatgaagctctacttcaagatcaagccgctgctgaagagtgcagaaagagagaaggagatggcctccatgaaggaggagttcacacgcctcaaagaggcgctagagaagtccgaggctcgccgcaaggagctggaggagaagatggtgtccctgctgcaggagaagaatgacctgcagctccaagtgcaggcggaacaagacaacctggcagatgctgaggagcgctgtgatcagctgatcaaaaacaagattcagctggaggccaaggtgaaggagatgaacgagaggctggaggatgaggaggagatgaatgctgagctcactgccaagaagcgcaagctggaagatgagtgctcagagctcaaaagggacatcgatgatctggagctgacactggccaaagtggagaaggagaaacacgcaacagagaacaaggtgaaaaacctgacagaggagatggctgggctggatgagatcattgccaagctgaccaaggagaagaaagctctgcaagaggcccaccaacaggctctggatgaccttcaggccgaggaggacaaggtcaacaccctgactaaggccaaagtcaagctggagcagcaagtggatgatctggaaggatccctggagcaagagaagaaggtgcgcatggacctggagcgagcgaagcggaagctggagggcgacctgaagctgacccaggagagcatcatggacctggagaatgacaagcagcagctggatgagcggctgaaaaaaaaagactttgagctgaatgctctcaacgcaaggattgaggatgaacaggccctcggcagccagctgcagaagaagctcaaggagcttcaggcacgcatcgaggagctggaggaggagctggaggccgagcgcaccgccagggctaaggtggagaagctgcgctcagacctgtctcgggagctggaggagatcagcgagcggctggaagaggccggcggggccacgtccgtgcagatcgagatgaacaagaagcgcgaggccgagttccagaagatgcggcgggacctggaggaggccacgctgcagcacgaggccactgccgcggccctgcgcaagaagcacgccgacagcgtggccgagctgggcgagcagatcgacaacctgcagcgggtgaagcagaagctggagaaggagaagagcgagttcaagctggagctggatgacgtcacctccaacatggagcagatcatcaaggccaaggctaacctggagaagatgtgccggaccttggaagaccagatgaatgagcaccggagcaaggcggaggagacccagcgttctgtcaacgacctcaccagccagcgggccaagttgcaaaccgagaatggtgagctgtcccggcagctggatgagaaggaggcactgatctcccagctgacccgaggcaagctcacctacacccagcagctggaggacctcaagaggcagctggaggaggaggttaaggcgaagaacgccctggcccacgcactgcagtcggcccggcatgactgcgacctgctgcgggagcagtacgaggaggagacggaggccaaggccgagctgcagcgcgtcctttccaaggccaactcggaggtggcccagtggaggaccaagtatgagacggacgccattcagcggactgaggagctcgaggaggccaagaagaagctggcccagcggctgcaggaagctgaggaggccgtggaggctgttaatgccaagtgctcctcgctggagaagaccaagcaccggctacagaatgagatcgaggacttgatggtggacgtagagcgctccaatgctgctgctgcagccctggacaagaagcagaggaacttcgacaagatcctggccgagtggaagcagaagtatgaggagtcgcagtcggagctggagtcctcgcagaaggaggctcgctccctcagcacagagctcttcaaactcaagaacgcctatgaggagtccctggaacatctggagaccttcaagcgggagaacaaaaacctgcaggaggagatctccgacttgactgagcagttgggttccagcggaaagactatccatgagctggagaaggtccgaaagcagctggaggccgagaagatggagctgcagtcagccctggaggaggccgaggcctccctggagcacgaggagggcaagatcctccgggcccagctggagttcaaccagatcaaggcagagatcgagcggaagctggcagagaaggacgaggagatggaacaggccaagcgcaaccacctgcgggtggtggactcgctgcagacctccctggacgcagagacacgcagccgcaacgaggccctgagggtgaagaagaagatggaaggagacctcaatgagatggagatccagctcagccacgccaaccgcatggccgccgaggcccagaagcaagtcaagagcctccagagcttgttgaaggacacccagattcagctggacgatgcagtccgtgccaacgacgacctgaaggagaacatcgccatcgtggagcggcgcaacaacctgctgcaggctgagctggaggagttgcgtgccgtggtggagcagacagagcggtcccggaagctggcggagcaggagctgattgagactagtgagcgggtgcagctgctgcattcccagaacaccagcctcatcaaccagaagaagaagatggagtcggatctgacccagctccagtcggaagtggaggaggcagtgcaggagtgcagaaacg

SEQ ID NO: 734265 - DNA, 3942 bp, Homo sapiens
acctccccacactgatgcttcttttgttgactctccttcctgcagctattgagaagggcaaaggcaaggccaagaaaggctcgtcctttcagactgtgtcagctctgcacagggaaaatctgaacaagctgatgaccaacttgcgctccacccatccccactttgtacgttgtatcatccctaatgagacaaagtctccaggggtgatggacaaccccctggtcatgcaccagctgcgctgcaatggtgtgctggagggcatccgcatctgcaggaaaggcttccccaaccgcatcctctacggggacttccggcagaggtatcgcatcctgaacccagcggccatccctgagggacagttcattgatagcaggaagggggcagagaagctgctcagctccctggacattgatcacaaccagtacaagtttggccacaccaaggtgttcttcaaggccgggctgctggggctgctggaggaaatgagggacgagaggctgagccgcatcatcacgcgtatccaggcccagtcccgaggtgtgctcgccagaatggagtacaaaaagctgctggaacgtagagactccctgctggtaatccagtggaacattcgggccttcatgggggtcaagaattggccctggatgaagctctacttcaagatcaagccgctgctgaagagtgcagaaagagagaaggagatggcctccatgaaggaggagttcacacgcctcaaagaggcgctagagaagtccgaggctcgccgcaaggagctggaggagaagatggtgtccctgctgcaggagaagaatgacctgcagctccaagtgcaggcggaacaagacaacctggcagatgctgaggagcgctgtgatcagctgatcaaaaacaagattcagctggaggccaaggtgaaggagatgaacgagaggctggaggatgaggaggagatgaatgctgagctcactgccaagaagcgcaagctggaagatgagtgctcagagctcaaaagggacatcgatgatctggagctgacactggccaaagtggagaaggagaaacacgcaacagagaacaaggtgaaaaacctgacagaggagatggctgggctggatgagatcattgccaagctgaccaaggagaagaaagctctgcaagaggcccaccaacaggctctggatgaccttcaggccgaggaggacaaggtcaacaccctgactaaggccaaagtcaagctggagcagcaagtggatgatctggaaggatccctggagcaagagaagaaggtgcgcatggacctggagcgagcgaagcggaagctggagggcgacctgaagctgacccaggagagcatcatggacctggagaatgacaagcagcagctggatgagcggctgaaaaaaaaagactttgagctgaatgctctcaacgcaaggattgaggatgaacaggccctcggcagccagctgcagaagaagctcaaggagcttcaggcacgcatcgaggagctggaggaggagctggaggccgagcgcaccgccagggctaaggtggagaagctgcgctcagacctgtctcgggagctggaggagatcagcgagcggctggaagaggccggcggggccacgtccgtgcagatcgagatgaacaagaagcgcgaggccgagttccagaagatgcggcgggacctggaggaggccacgctgcagcacgaggccactgccgcggccctgcgcaagaagcacgccgacagcgtggccgagctgggcgagcagatcgacaacctgcagcgggtgaagcagaagctggagaaggagaagagcgagttcaagctggagctggatgacgtcacctccaacatggagcagatcatcaaggccaaggctaacctggagaagatgtgccggaccttggaagaccagatgaatgagcaccggagcaaggcggaggagacccagcgttctgtcaacgacctcaccagccagcgggccaagttgcaaaccgagaatggtgagctgtcccggcagctggatgagaaggaggcactgatctcccagctgacccgaggcaagctcacctacacccagcagctggaggacctcaagaggcagctggaggaggaggttaaggcgaagaacgccctggcccacgcactgcagtcggcccggcatgactgcgacctgctgcgggagcagtacgaggaggagacggaggccaaggccgagctgcagcgcgtcctttccaaggccaactcggaggtggcccagtggaggaccaagtatgagacggacgccattcagcggactgaggagctcgaggaggccaagaagaagctggcccagcggctgcaggaagctgaggaggccgtggaggctgttaatgccaagtgctcctcgctggagaagaccaagcaccggctacagaatgagatcgaggacttgatggtggacgtagagcgctccaatgctgctgctgcagccctggacaagaagcagaggaacttcgacaagatcctggccgagtggaagcagaagtatgaggagtcgcagtcggagctggagtcctcgcagaaggaggctcgctccctcagcacagagctcttcaaactcaagaacgcctatgaggagtccctggaacatctggagaccttcaagcgggagaacaaaaacctgcaggaggagatctccgacttgactgagcagttgggttccagcggaaagactatccatgagctggagaaggtccgaaagcagctggaggccgagaagatggagctgcagtcagccctggaggaggccgaggcctccctggagcacgaggagggcaagatcctccgggcccagctggagttcaaccagatcaaggcagagatcgagcggaagctggcagagaaggacgaggagatggaacaggccaagcgcaaccacctgcgggtggtggactcgctgcagacctccctggacgcagagacacgacacccagattcagctggacgatgcagtccgtgccaacgacgacctgaaggagaacatcgccatcgtggagcggcgcaacaacctgctgcaggctgagctggaggagttgcgtgccgtggtggagcagacagagcggtcccggaagctggcggagcaggagctgattgagactagtgagcgggtgcagctgctgcattcccagaacaccagcctcatcaaccagaagaagaagatggatgctgacctgtcccagctccagactgaagtggaggaggcagtgcaggagtgcaggaatgctgaggagaaggccaagaaggccatcacggatgccgccatgatggcagaggagctgaagaaggagcaggacaccagcgcccacctggagcgcatgaagaagaacatggaacagaccattaaggacctgcagcaccggctggacgaagccgagcagatcgccctcaagggcggcaagaagcagctgcagaagctggaagcgcgggtgcgggagctggagaatgagctggaggccgagcagaagcgcaacgcagagtcggtgaagggcatgaggaagagcgagcggcgcatcaaggagctcacctaccagacggaggaggacaggaaaaacctgctgcggctgcaggacctggtagacaagctgcagctaaaggtcaaggcctacaagcgccaggccgaggaggcggaggagcaagccaacaccaacctgtccaagttccgcaaggtgcagcacgagctggatgaggcagaggagcgggcggacatcgccgagtcccaggtcaacaagctgcgggccaagagccgtgacattggcacgaagggcttgaatgaggagtagctttgccacatcttgatctgctcagccctggaggtgccagcaaagccccatgctggagcctgtgtaacagctccttgggaggaagcagaataaagcaattttccttgaagccga

SEQ ID NO: 734266 - DNA, 4018 bp, Homo sapiens
acctccccacactgatgcttcttttgttgactctccttcctgcagctattgagaagggcaaaggcaaggccaagaaaggctcgtcctttcagactgtgtcagctctgcacagggaaaatctgaacaagctgatgaccaacttgcgctccacccatccccactttgtacgttgtatcatccctaatgagacaaagtctccaggggtgatggacaaccccctggtcatgcaccagctgcgctgcaatggtgtgctggagggcatccgcatctgcaggaaaggcttccccaaccgcatcctctacggggacttccggcagaggtatcgcatcctgaacccagcggccatccctgagggacagttcattgatagcaggaagggggcagagaagctgctcagctccctggacattgatcacaaccagtacaagtttggccacaccaaggtgttcttcaaggccgggctgctggggctgctggaggaaatgagggacgagaggctgagccgcatcatcacgcgtatccaggcccagtcccgaggtgtgctcgccagaatggagtacaaaaagctgctggaacgtagagactccctgctggtaatccagtggaacattcgggccttcatgggggtcaagaattggccctggatgaagctctacttcaagatcaagccgctgctgaagagtgcagaaagagagaaggagatggcctccatgaaggaggagttcacacgcctcaaagaggcgctagagaagtccgaggctcgccgcaaggagctggaggagaagatggtgtccctgctgcaggagaagaatgacctgcagctccaagtgcaggcggaacaagacaacctggcagatgctgaggagcgctgtgatcagctgatcaaaaacaagattcagctggaggccaaggtgaaggagatgaacgagaggctggaggatgaggaggagatgaatgctgagctcactgccaagaagcgcaagctggaagatgagtgctcagagctcaaaagggacatcgatgatctggagctgacactggccaaagtggagaaggagaaacacgcaacagagaacaaggtgaaaaacctgacagaggagatggctgggctggatgagatcattgccaagctgaccaaggagaagaaagctctgcaagaggcccaccaacaggctctggatgaccttcaggccgaggaggacaaggtcaacaccctgactaaggccaaagtcaagctggagcagcaagtggatgatctggaaggatccctggagcaagagaagaaggtgcgcatggacctggagcgagcgaagcggaagctggagggcgacctgaagctgacccaggagagcatcatggacctggagaatgacaagcagcagctggatgagcggctgaaaaaaaaagactttgagctgaatgctctcaacgcaaggattgaggatgaacaggccctcggcagccagctgcagaagaagctcaaggagcttcaggcacgcatcgaggagctggaggaggagctggaggccgagcgcaccgccagggctaaggtggagaagctgcgctcagacctgtctcgggagctggaggagatcagcgagcggctggaagaggccggcggggccacgtccgtgcagatcgagatgaacaagaagcgcgaggccgagttccagaagatgcggcgggacctggaggaggccacgctgcagcacgaggccactgccgcggccctgcgcaagaagcacgccgacagcgtggccgagctgggcgagcagatcgacaacctgcagcgggtgaagcagaagctggagaaggagaagagcgagttcaagctggagctggatgacgtcacctccaacatggagcagatcatcaaggccaaggctaacctggagaagatgtgccggaccttggaagaccagatgaatgagcaccggagcaaggcggaggagacccagcgttctgtcaacgacctcaccagccagcgggccaagttgcaaaccgagaatggtgagctgtcccggcagctggatgagaaggaggcactgatctcccagctgacccgaggcaagctcacctacacccagcagctggaggacctcaagaggcagctggaggaggaggttaaggcgaagaacgccctggcccacgcactgcagtcggcccggcatgactgcgacctgctgcgggagcagtacgaggaggagacggaggccaaggccgagctgcagcgcgtcctttccaaggccaactcggaggtggcccagtggaggaccaagtatgagacggacgccattcagcggactgaggagctcgaggaggccaagaagaagctggcccagcggctgcaggaagctgaggaggccgtggaggctgttaatgccaagtgctcctcgctggagaagaccaagcaccggctacagaatgagatcgaggacttgatggtggacgtagagcgctccaatgctgctgctgcagccctggacaagaagcagaggaacttcgacaagatcctggccgagtggaagcagaagtatgaggagtcgcagtcggagctggagtcctcgcagaaggaggctcgctccctcagcacagagctcttcaaactcaagaacgcctatgaggagtccctggaacatctggagaccttcaagcgggagaacaaaaacctgcaggaggagatctccgacttgactgagcagttgggttccagcggaaagactatccatgagctggagaaggtccgaaagcagctggaggccgagaagatggagctgcagtcagccctggaggaggccgaggcctccctggagcacgaggagggcaagatcctccgggcccagctggagttcaaccagatcaaggcagagatcgagcggaagctggcagagaaggacgaggagatggaacaggccaagcgcaaccacctgcgggtggtggactcgctgcagacctccctggacgcagagacacgacacccagattcagctggacgatgcagtccgtgccaacgacgacctgaaggagaacatcgccatcgtggagcggcgcaacaacctgctgcaggctgagctggaggagttgcgtgccgtggtggagcagacagagcggtcccggaagctggcggagcaggagctgattgagactagtgagcgggtgcagctgctgcattcccagaacaccagcctcatcaaccagaagaagaagatggatgctgacctgtcccagctccagactgaagtggaggaggcagtgcaggagtgcaggaatgctgaggagaaggccaagaaggccatcacggatgccgccatgatggcagaggagctgaagaaggagcaggacaccagcgcccacctggagcgcatgaagaagaacatggaacagaccattaaggacctgcagcaccggctggacgaagccgagcagatcgccctcaagggcggcaagaagcagctgcagaagctggaagcgcgggtgcgggagctggagaatgagctggaggccgagcagaagcgcaacgcagagtcggtgaagggcatgaggaagagcgagcggcgcatcaaggagctcacctaccagacggaggaggacaggaaaaacctgctgcggctgcaggacctggtagacaagctgcagctaaaggtcaaggcctacaagcgccaggccgaggaggcggaggagcaagccaacaccaacctgtccaagttccgcaaggtgcagcacgagctggatgaggcagaggagcgggcggacatcgccgagtcccaggtcaacaagctgcgggccaagagccgtgacattggcacgaagagatgcggtttcaccatgttggccaggctggtcttgaactcctgaccttgtgatccactcgcctcagcctcccaaaggcttgaatgaggagtagctttgccacatcttgatctgctcagccctggaggtgccagcaaagccccatgctggagcctgtgtaacagctccttgggaggaagcagaataaagcaattttccttgaagccga

SEQ ID NO: 734267 - DNA, 3271 bp, Homo sapiens
acctccccacactgatgcttcttttgttgactctccttcctgcagctattgagaagggcaaaggcaaggccaagaaaggctcgtcctttcagactgtgtcagctctgcacagggaaaatctgaacaagctgatgaccaacttgcgctccacccatccccactttgtacgttgtatcatccctaatgagacaaagtctccaggggtgatggacaaccccctggtcatgcaccagctgcgctgcaatggtgtgctggagggcatccgcatctgcaggaaaggcttccccaaccgcatcctctacggggacttccggcagaggtatcgcatcctgaacccagcggccatccctgagggacagttcattgatagcaggaagggggcagagaagctgctcagctccctggacattgatcacaaccagtacaagtttggccacaccaaggtgttcttcaaggccgggctgctggggctgctggaggaaatgagggacgagaggctgagccgcatcatcacgcgtatccaggcccagtcccgaggtgtgctcgccagaatggagtacaaaaagctgctggaacgtagagactccctgctggtaatccagtggaacattcgggccttcatgggggtcaagaattggccctggatgaagctctacttcaagatcaagccgctgctgaagagtgcagaaagagagaaggagatggcctccatgaaggaggagttcacacgcctcaaagaggcgctagagaagtccgaggctcgccgcaaggagctggaggagaagatggtgtccctgctgcaggagaagaatgacctgcagctccaagtgcaggcggaacaagacaacctggcagatgctgaggagcgctgtgatcagctgatcaaaaacaagattcagctggaggccaaggtgaaggagatgaacgagaggctggaggatgaggaggagatgaatgctgagctcactgccaagaagcgcaagctggaagatgagtgctcagagctcaaaagggacatcgatgatctggagctgacactggccaaagtggagaaggagaaacacgcaacagagaacaaggtgaaaaacctgacagaggagatggctgggctggatgagatcattgccaagctgaccaaggagaagaaagctctgcaagaggcccaccaacaggctctggatgaccttcaggccgaggaggacaaggtcaacaccctgactaaggccaaagtcaagctggagcagcaagtggatgatctggaaggatccctggagcaagagaagaaggtgcgcatggacctggagcgagcgaagcggaagctggagggcgacctgaagctgacccaggagagcatcatggacctggagaatgacaagcagcagctggatgagcggctgaaaaaaaaagactttgagctgaatgctctcaacgcaaggattgaggatgaacaggccctcggcagccagctgcagaagaagctcaaggagcttcaggcacgcatcgaggagctggaggaggagctggaggccgagcgcaccgccagggctaaggtggagaagctgcgctcagacctgtctcgggagctggaggagatcagcgagcggctggaagaggccggcggggccacgtccgtgcagatcgagatgaacaagaagcgcgaggccgagttccagaagatgcggcgggacctggaggaggccacgctgcagcacgaggccactgccgcggccctgcgcaagaagcacgccgacagcgtggccgagctgggcgagcagatcgacaacctgcagcgggtgaagcagaagctggagaaggagaagagcgagttcaagctggagctggatgacgtcacctccaacatggagcagatcatcaaggccaaggctaacctggagaagatgtgccggaccttggaagaccagatgaatgagcaccggagcaaggcggaggagacccagcgttctgtcaacgacctcaccagccagcgggccaagttgcaaaccgagaatggtgagctgtcccggcagctggatgagaaggaggcactgatctcccagctgacccgaggcaagctcacctacacccagcagctggaggacctcaagaggcagctggaggaggaggttaaggcgaagaacgccctggcccacgcactgcagtcggcccggcatgactgcgacctgctgcgggagcagtacgaggaggagacggaggccaaggccgagctgcagcgcgtcctttccaaggccaactcggaggtggcccagtggaggaccaagtatgagacggacgccattcagcggactgaggagctcgaggaggccaagaagaagctggcccagcggctgcaggaagctgaggaggccgtggaggctgttaatgccaagtgctcctcgctggagaagaccaagcaccggctacagaatgagatcgaggacttgatggtggacgtagagcgctccaatgctgctgctgcagccctggacaagaagcagaggaacttcgacaagatcctggccgagtggaagcagaagtatgaggagtcgcagtcggagctggagtcctcgcagaaggaggctcgctccctcagcacagagctcttcaaactcaagaacgcctatgaggagtccctggaacatctggagaccttcaagcgggagaacaaaaacctgcaggaggagatctccgacttgactgagcagttgggttccagcggaaagactatccatgagctggagaaggtccgaaagcagctggaggccgagaagatggagctgcagtcagccctggaggaggccgaggcctccctggagcacgaggagggcaagatcctccgggcccagctggagttcaaccagatcaaggcagagatcgagcggaagctggcagagaaggacgaggagatggaacaggccaagcgcaaccacctgcgggtggtggactcgctgcagacctccctggacgcagagacacgacacccagattcagctggacgatgcagtccgtgccaacgacgacctgaaggagaacatcgccatcgtggagcggcgcaacaacctgctgcaggctgagctggaggagttgcgtgccgtggtggagcagacagagcggtcccggaagctggcggagcaggagctgattgagactagtgagcgggtgcagctgctgcattcccagaacaccagcctcatcaaccagaagaagaagatggagtcggatctgacccagctccagtcggaagtggaggaggcagtgcaggagtgcagaaacg

SEQ ID NO: 734268 - DNA, 3936 bp, Homo sapiens
acctccccacactgatgcttcttttgttgactctccttcctgcagctattgagaagggcaaaggcaaggccaagaaaggctcgtcctttcagactgtgtcagctctgcacagggaaaatctgaacaagctgatgaccaacttgcgctccacccatccccactttgtacgttgtatcatccctaatgagacaaagtctccaggggtgatggacaaccccctggtcatgcaccagctgcgctgcaatggtgtgctggagggcatccgcatctgcaggaaaggcttccccaaccgcatcctctacggggacttccggcagaggtatcgcatcctgaacccagcggccatccctgagggacagttcattgatagcaggaagggggcagagaagctgctcagctccctggacattgatcacaaccagtacaagtttggccacaccaaggtgttcttcaaggccgggctgctggggctgctggaggaaatgagggacgagaggctgagccgcatcatcacgcgtatccaggcccagtcccgaggtgtgctcgccagaatggagtacaaaaagctgctggaacgtagagactccctgctggtaatccagtggaacattcgggccttcatgggggtcaagaattggccctggatgaagctctacttcaagatcaagccgctgctgaagagtgcagaaagagagaaggagatggcctccatgaaggaggagttcacacgcctcaaagaggcgctagagaagtccgaggctcgccgcaaggagctggaggagaagatggtgtccctgctgcaggagaagaatgacctgcagctccaagtgcaggcggaacaagacaacctggcagatgctgaggagcgctgtgatcagctgatcaaaaacaagattcagctggaggccaaggtgaaggagatgaacgagaggctggaggatgaggaggagatgaatgctgagctcactgccaagaagcgcaagctggaagatgagtgctcagagctcaaaagggacatcgatgatctggagctgacactggccaaagtggagaaggagaaacacgcaacagagaacaaggtgaaaaacctgacagaggagatggctgggctggatgagatcattgccaagctgaccaaggagaagaaagctctgcaagaggcccaccaacaggctctggatgaccttcaggccgaggaggacaaggtcaacaccctgactaaggccaaagtcaagctggagcagcaagtggatgatctggaaggatccctggagcaagagaagaaggtgcgcatggacctggagcgagcgaagcggaagctggagggcgacctgaagctgacccaggagagcatcatggacctggagaatgacaagcagcagctggatgagcggctgaaaaaaaaagactttgagctgaatgctctcaacgcaaggattgaggatgaacaggccctcggcagccagctgcagaagaagctcaaggagcttcaggcacgcatcgaggagctggaggaggagctggaggccgagcgcaccgccagggctaaggtggagaagctgcgctcagacctgtctcgggagctggaggagatcagcgagcggctggaagaggccggcggggccacgtccgtgcagatcgagatgaacaagaagcgcgaggccgagttccagaagatgcggcgggacctggaggaggccacgctgcagcacgaggccactgccgcggccctgcgcaagaagcacgccgacagcgtggccgagctgggcgagcagatcgacaacctgcagcgggtgaagcagaagctggagaaggagaagagcgagttcaagctggagctggatgacgtcacctccaacatggagcagatcatcaaggccaaggctaacctggagaagatgtgccggaccttggaagaccagatgaatgagcaccggagcaaggcggaggagacccagcgttctgtcaacgacctcaccagccagcgggccaagttgcaaaccgagaatggtgagctgtcccggcagctggatgagaaggaggcactgatctcccagctgacccgaggcaagctcacctacacccagcagctggaggacctcaagaggcagctggaggaggaggttaaggcgaagaacgccctggcccacgcactgcagtcggcccggcatgactgcgacctgctgcgggagcagtacgaggaggagacggaggccaaggccgagctgcagcgcgtcctttccaaggccaactcggaggtggcccagtggaggaccaagtatgagacggacgccattcagcggactgaggagctcgaggaggccaagaagaagctggcccagcggctgcaggaagctgaggaggccgtggaggctgttaatgccaagtgctcctcgctggagaagaccaagcaccggctacagaatgagatcgaggacttgatggtggacgtagagcgctccaatgctgctgctgcagccctggacaagaagcagaggaacttcgacaagatcctggccgagtggaagcagaagtatgaggagtcgcagtcggagctggagtcctcgcagaaggaggctcgctccctcagcacagagctcttcaaactcaagaacgcctatgaggagtccctggaacatctggagaccttcaagcgggagaacaaaaacctgcaggaggagatctccgacttgactgagcagttgggttccagcggaaagactatccatgagctggagaaggtccgaaagcagctggaggccgagaagatggagctgcagtcagccctggaggaggccgaggcctccctggagcacgaggagggcaagatcctccgggcccagctggagttcaaccagatcaaggcagagatcgagcggaagctggcagagaaggacgaggagatgggccaaccgcatggccgccgaggcccagaagcaagtcaagagcctccagagcttgttgaaggacacccagattcagctggacgatgcagtccgtgccaacgacgacctgaaggagaacatcgccatcgtggagcggcgcaacaacctgctgcaggctgagctggaggagttgcgtgccgtggtggagcagacagagcggtcccggaagctggcggagcaggagctgattgagactagtgagcgggtgcagctgctgcattcccagaacaccagcctcatcaaccagaagaagaagatggatgctgacctgtcccagctccagactgaagtggaggaggcagtgcaggagtgcaggaatgctgaggagaaggccaagaaggccatcacggatgccgccatgatggcagaggagctgaagaaggagcaggacaccagcgcccacctggagcgcatgaagaagaacatggaacagaccattaaggacctgcagcaccggctggacgaagccgagcagatcgccctcaagggcggcaagaagcagctgcagaagctggaagcgcgggtgcgggagctggagaatgagctggaggccgagcagaagcgcaacgcagagtcggtgaagggcatgaggaagagcgagcggcgcatcaaggagctcacctaccagacggaggaggacaggaaaaacctgctgcggctgcaggacctggtagacaagctgcagctaaaggtcaaggcctacaagcgccaggccgaggaggcggaggagcaagccaacaccaacctgtccaagttccgcaaggtgcagcacgagctggatgaggcagaggagcgggcggacatcgccgagtcccaggtcaacaagctgcgggccaagagccgtgacattggcacgaagggcttgaatgaggagtagctttgccacatcttgatctgctcagccctggaggtgccagcaaagccccatgctggagcctgtgtaacagctccttgggaggaagcagaataaagcaattttccttgaagccga

SEQ ID NO: 734269 - DNA, 4012 bp, Homo sapiens
acctccccacactgatgcttcttttgttgactctccttcctgcagctattgagaagggcaaaggcaaggccaagaaaggctcgtcctttcagactgtgtcagctctgcacagggaaaatctgaacaagctgatgaccaacttgcgctccacccatccccactttgtacgttgtatcatccctaatgagacaaagtctccaggggtgatggacaaccccctggtcatgcaccagctgcgctgcaatggtgtgctggagggcatccgcatctgcaggaaaggcttccccaaccgcatcctctacggggacttccggcagaggtatcgcatcctgaacccagcggccatccctgagggacagttcattgatagcaggaagggggcagagaagctgctcagctccctggacattgatcacaaccagtacaagtttggccacaccaaggtgttcttcaaggccgggctgctggggctgctggaggaaatgagggacgagaggctgagccgcatcatcacgcgtatccaggcccagtcccgaggtgtgctcgccagaatggagtacaaaaagctgctggaacgtagagactccctgctggtaatccagtggaacattcgggccttcatgggggtcaagaattggccctggatgaagctctacttcaagatcaagccgctgctgaagagtgcagaaagagagaaggagatggcctccatgaaggaggagttcacacgcctcaaagaggcgctagagaagtccgaggctcgccgcaaggagctggaggagaagatggtgtccctgctgcaggagaagaatgacctgcagctccaagtgcaggcggaacaagacaacctggcagatgctgaggagcgctgtgatcagctgatcaaaaacaagattcagctggaggccaaggtgaaggagatgaacgagaggctggaggatgaggaggagatgaatgctgagctcactgccaagaagcgcaagctggaagatgagtgctcagagctcaaaagggacatcgatgatctggagctgacactggccaaagtggagaaggagaaacacgcaacagagaacaaggtgaaaaacctgacagaggagatggctgggctggatgagatcattgccaagctgaccaaggagaagaaagctctgcaagaggcccaccaacaggctctggatgaccttcaggccgaggaggacaaggtcaacaccctgactaaggccaaagtcaagctggagcagcaagtggatgatctggaaggatccctggagcaagagaagaaggtgcgcatggacctggagcgagcgaagcggaagctggagggcgacctgaagctgacccaggagagcatcatggacctggagaatgacaagcagcagctggatgagcggctgaaaaaaaaagactttgagctgaatgctctcaacgcaaggattgaggatgaacaggccctcggcagccagctgcagaagaagctcaaggagcttcaggcacgcatcgaggagctggaggaggagctggaggccgagcgcaccgccagggctaaggtggagaagctgcgctcagacctgtctcgggagctggaggagatcagcgagcggctggaagaggccggcggggccacgtccgtgcagatcgagatgaacaagaagcgcgaggccgagttccagaagatgcggcgggacctggaggaggccacgctgcagcacgaggccactgccgcggccctgcgcaagaagcacgccgacagcgtggccgagctgggcgagcagatcgacaacctgcagcgggtgaagcagaagctggagaaggagaagagcgagttcaagctggagctggatgacgtcacctccaacatggagcagatcatcaaggccaaggctaacctggagaagatgtgccggaccttggaagaccagatgaatgagcaccggagcaaggcggaggagacccagcgttctgtcaacgacctcaccagccagcgggccaagttgcaaaccgagaatggtgagctgtcccggcagctggatgagaaggaggcactgatctcccagctgacccgaggcaagctcacctacacccagcagctggaggacctcaagaggcagctggaggaggaggttaaggcgaagaacgccctggcccacgcactgcagtcggcccggcatgactgcgacctgctgcgggagcagtacgaggaggagacggaggccaaggccgagctgcagcgcgtcctttccaaggccaactcggaggtggcccagtggaggaccaagtatgagacggacgccattcagcggactgaggagctcgaggaggccaagaagaagctggcccagcggctgcaggaagctgaggaggccgtggaggctgttaatgccaagtgctcctcgctggagaagaccaagcaccggctacagaatgagatcgaggacttgatggtggacgtagagcgctccaatgctgctgctgcagccctggacaagaagcagaggaacttcgacaagatcctggccgagtggaagcagaagtatgaggagtcgcagtcggagctggagtcctcgcagaaggaggctcgctccctcagcacagagctcttcaaactcaagaacgcctatgaggagtccctggaacatctggagaccttcaagcgggagaacaaaaacctgcaggaggagatctccgacttgactgagcagttgggttccagcggaaagactatccatgagctggagaaggtccgaaagcagctggaggccgagaagatggagctgcagtcagccctggaggaggccgaggcctccctggagcacgaggagggcaagatcctccgggcccagctggagttcaaccagatcaaggcagagatcgagcggaagctggcagagaaggacgaggagatgggccaaccgcatggccgccgaggcccagaagcaagtcaagagcctccagagcttgttgaaggacacccagattcagctggacgatgcagtccgtgccaacgacgacctgaaggagaacatcgccatcgtggagcggcgcaacaacctgctgcaggctgagctggaggagttgcgtgccgtggtggagcagacagagcggtcccggaagctggcggagcaggagctgattgagactagtgagcgggtgcagctgctgcattcccagaacaccagcctcatcaaccagaagaagaagatggatgctgacctgtcccagctccagactgaagtggaggaggcagtgcaggagtgcaggaatgctgaggagaaggccaagaaggccatcacggatgccgccatgatggcagaggagctgaagaaggagcaggacaccagcgcccacctggagcgcatgaagaagaacatggaacagaccattaaggacctgcagcaccggctggacgaagccgagcagatcgccctcaagggcggcaagaagcagctgcagaagctggaagcgcgggtgcgggagctggagaatgagctggaggccgagcagaagcgcaacgcagagtcggtgaagggcatgaggaagagcgagcggcgcatcaaggagctcacctaccagacggaggaggacaggaaaaacctgctgcggctgcaggacctggtagacaagctgcagctaaaggtcaaggcctacaagcgccaggccgaggaggcggaggagcaagccaacaccaacctgtccaagttccgcaaggtgcagcacgagctggatgaggcagaggagcgggcggacatcgccgagtcccaggtcaacaagctgcgggccaagagccgtgacattggcacgaagagatgcggtttcaccatgttggccaggctggtcttgaactcctgaccttgtgatccactcgcctcagcctcccaaaggcttgaatgaggagtagctttgccacatcttgatctgctcagccctggaggtgccagcaaagccccatgctggagcctgtgtaacagctccttgggaggaagcagaataaagcaattttccttgaagccga

SEQ ID NO: 734270 - DNA, 3265 bp, Homo sapiens
acctccccacactgatgcttcttttgttgactctccttcctgcagctattgagaagggcaaaggcaaggccaagaaaggctcgtcctttcagactgtgtcagctctgcacagggaaaatctgaacaagctgatgaccaacttgcgctccacccatccccactttgtacgttgtatcatccctaatgagacaaagtctccaggggtgatggacaaccccctggtcatgcaccagctgcgctgcaatggtgtgctggagggcatccgcatctgcaggaaaggcttccccaaccgcatcctctacggggacttccggcagaggtatcgcatcctgaacccagcggccatccctgagggacagttcattgatagcaggaagggggcagagaagctgctcagctccctggacattgatcacaaccagtacaagtttggccacaccaaggtgttcttcaaggccgggctgctggggctgctggaggaaatgagggacgagaggctgagccgcatcatcacgcgtatccaggcccagtcccgaggtgtgctcgccagaatggagtacaaaaagctgctggaacgtagagactccctgctggtaatccagtggaacattcgggccttcatgggggtcaagaattggccctggatgaagctctacttcaagatcaagccgctgctgaagagtgcagaaagagagaaggagatggcctccatgaaggaggagttcacacgcctcaaagaggcgctagagaagtccgaggctcgccgcaaggagctggaggagaagatggtgtccctgctgcaggagaagaatgacctgcagctccaagtgcaggcggaacaagacaacctggcagatgctgaggagcgctgtgatcagctgatcaaaaacaagattcagctggaggccaaggtgaaggagatgaacgagaggctggaggatgaggaggagatgaatgctgagctcactgccaagaagcgcaagctggaagatgagtgctcagagctcaaaagggacatcgatgatctggagctgacactggccaaagtggagaaggagaaacacgcaacagagaacaaggtgaaaaacctgacagaggagatggctgggctggatgagatcattgccaagctgaccaaggagaagaaagctctgcaagaggcccaccaacaggctctggatgaccttcaggccgaggaggacaaggtcaacaccctgactaaggccaaagtcaagctggagcagcaagtggatgatctggaaggatccctggagcaagagaagaaggtgcgcatggacctggagcgagcgaagcggaagctggagggcgacctgaagctgacccaggagagcatcatggacctggagaatgacaagcagcagctggatgagcggctgaaaaaaaaagactttgagctgaatgctctcaacgcaaggattgaggatgaacaggccctcggcagccagctgcagaagaagctcaaggagcttcaggcacgcatcgaggagctggaggaggagctggaggccgagcgcaccgccagggctaaggtggagaagctgcgctcagacctgtctcgggagctggaggagatcagcgagcggctggaagaggccggcggggccacgtccgtgcagatcgagatgaacaagaagcgcgaggccgagttccagaagatgcggcgggacctggaggaggccacgctgcagcacgaggccactgccgcggccctgcgcaagaagcacgccgacagcgtggccgagctgggcgagcagatcgacaacctgcagcgggtgaagcagaagctggagaaggagaagagcgagttcaagctggagctggatgacgtcacctccaacatggagcagatcatcaaggccaaggctaacctggagaagatgtgccggaccttggaagaccagatgaatgagcaccggagcaaggcggaggagacccagcgttctgtcaacgacctcaccagccagcgggccaagttgcaaaccgagaatggtgagctgtcccggcagctggatgagaaggaggcactgatctcccagctgacccgaggcaagctcacctacacccagcagctggaggacctcaagaggcagctggaggaggaggttaaggcgaagaacgccctggcccacgcactgcagtcggcccggcatgactgcgacctgctgcgggagcagtacgaggaggagacggaggccaaggccgagctgcagcgcgtcctttccaaggccaactcggaggtggcccagtggaggaccaagtatgagacggacgccattcagcggactgaggagctcgaggaggccaagaagaagctggcccagcggctgcaggaagctgaggaggccgtggaggctgttaatgccaagtgctcctcgctggagaagaccaagcaccggctacagaatgagatcgaggacttgatggtggacgtagagcgctccaatgctgctgctgcagccctggacaagaagcagaggaacttcgacaagatcctggccgagtggaagcagaagtatgaggagtcgcagtcggagctggagtcctcgcagaaggaggctcgctccctcagcacagagctcttcaaactcaagaacgcctatgaggagtccctggaacatctggagaccttcaagcgggagaacaaaaacctgcaggaggagatctccgacttgactgagcagttgggttccagcggaaagactatccatgagctggagaaggtccgaaagcagctggaggccgagaagatggagctgcagtcagccctggaggaggccgaggcctccctggagcacgaggagggcaagatcctccgggcccagctggagttcaaccagatcaaggcagagatcgagcggaagctggcagagaaggacgaggagatgggccaaccgcatggccgccgaggcccagaagcaagtcaagagcctccagagcttgttgaaggacacccagattcagctggacgatgcagtccgtgccaacgacgacctgaaggagaacatcgccatcgtggagcggcgcaacaacctgctgcaggctgagctggaggagttgcgtgccgtggtggagcagacagagcggtcccggaagctggcggagcaggagctgattgagactagtgagcgggtgcagctgctgcattcccagaacaccagcctcatcaaccagaagaagaagatggagtcggatctgacccagctccagtcggaagtggaggaggcagtgcaggagtgcagaaacg

SEQ ID NO: 734271 - DNA, 4096 bp, Homo sapiens
acctccccacactgatgcttcttttgttgactctccttcctgcagctattgagaagggcaaaggcaaggccaagaaaggctcgtcctttcagactgtgtcagctctgcacagggaaaatctgaacaagctgatgaccaacttgcgctccacccatccccactttgtacgttgtatcatccctaatgagacaaagtctccaggggtgatggacaaccccctggtcatgcaccagctgcgctgcaatggtgtgctggagggcatccgcatctgcaggaaaggcttccccaaccgcatcctctacggggacttccggcagaggtatcgcatcctgaacccagcggccatccctgagggacagttcattgatagcaggaagggggcagagaagctgctcagctccctggacattgatcacaaccagtacaagtttggccacaccaaggtgttcttcaaggccgggctgctggggctgctggaggaaatgagggacgagaggctgagccgcatcatcacgcgtatccaggcccagtcccgaggtgtgctcgccagaatggagtacaaaaagctgctggaacgtagagactccctgctggtaatccagtggaacattcgggccttcatgggggtcaagaattggccctggatgaagctctacttcaagatcaagccgctgctgaagagtgcagaaagagagaaggagatggcctccatgaaggaggagttcacacgcctcaaagaggcgctagagaagtccgaggctcgccgcaaggagctggaggagaagatggtgtccctgctgcaggagaagaatgacctgcagctccaagtgcaggcggaacaagacaacctggcagatgctgaggagcgctgtgatcagctgatcaaaaacaagattcagctggaggccaaggtgaaggagatgaacgagaggctggaggatgaggaggagatgaatgctgagctcactgccaagaagcgcaagctggaagatgagtgctcagagctcaaaagggacatcgatgatctggagctgacactggccaaagtggagaaggagaaacacgcaacagagaacaaggtgaaaaacctgacagaggagatggctgggctggatgagatcattgccaagctgaccaaggagaagaaagctctgcaagaggcccaccaacaggctctggatgaccttcaggccgaggaggacaaggtcaacaccctgactaaggccaaagtcaagctggagcagcaagtggatgatctggaaggatccctggagcaagagaagaaggtgcgcatggacctggagcgagcgaagcggaagctggagggcgacctgaagctgacccaggagagcatcatggacctggagaatgacaagcagcagctggatgagcggctgaaaaaaaaagactttgagctgaatgctctcaacgcaaggattgaggatgaacaggccctcggcagccagctgcagaagaagctcaaggagcttcaggcacgcatcgaggagctggaggaggagctggaggccgagcgcaccgccagggctaaggtggagaagctgcgctcagacctgtctcgggagctggaggagatcagcgagcggctggaagaggccggcggggccacgtccgtgcagatcgagatgaacaagaagcgcgaggccgagttccagaagatgcggcgggacctggaggaggccacgctgcagcacgaggccactgccgcggccctgcgcaagaagcacgccgacagcgtggccgagctgggcgagcagatcgacaacctgcagcgggtgaagcagaagctggagaaggagaagagcgagttcaagctggagctggatgacgtcacctccaacatggagcagatcatcaaggccaaggctaacctggagaagatgtgccggaccttggaagaccagatgaatgagcaccggagcaaggcggaggagacccagcgttctgtcaacgacctcaccagccagcgggccaagttgcaaaccgagaatggtgagctgtcccggcagctggatgagaaggaggcactgatctcccagctgacccgaggcaagctcacctacacccagcagctggaggacctcaagaggcagctggaggaggaggttaaggcgaagaacgccctggcccacgcactgcagtcggcccggcatgactgcgacctgctgcgggagcagtacgaggaggagacggaggccaaggccgagctgcagcgcgtcctttccaaggccaactcggaggtggcccagtggaggaccaagtatgagacggacgccattcagcggactgaggagctcgaggaggccaagaagaagctggcccagcggctgcaggaagctgaggaggccgtggaggctgttaatgccaagtgctcctcgctggagaagaccaagcaccggctacagaatgagatcgaggacttgatggtggacgtagagcgctccaatgctgctgctgcagccctggacaagaagcagaggaacttcgacaagatcctggccgagtggaagcagaagtatgaggagtcgcagtcggagctggagtcctcgcagaaggaggctcgctccctcagcacagagctcttcaaactcaagaacgcctatgaggagtccctggaacatctggagaccttcaagcgggagaacaaaaacctgcaggaggagatctccgacttgactgagcagttgggttccagcggaaagactatccatgagctggagaaggtccgaaagcagctggaggccgagaagatggagctgcagtcagccctggaggaggccgaggcctccctggagcacgaggagggcaagatcctccgggcccagctggaaacaggccaagcgcaaccacctgcgggtggtggactcgctgcagacctccctggacgcagagacacgcagccgcaacgaggccctgagggtgaagaagaagatggaaggagacctcaatgagatggagatccagctcagccacgccaaccgcatggccgccgaggcccagaagcaagtcaagagcctccagagcttgttgaaggacacccagattcagctggacgatgcagtccgtgccaacgacgacctgaaggagaacatcgccatcgtggagcggcgcaacaacctgctgcaggctgagctggaggagttgcgtgccgtggtggagcagacagagcggtcccggaagctggcggagcaggagctgattgagactagtgagcgggtgcagctgctgcattcccagaacaccagcctcatcaaccagaagaagaagatggatgctgacctgtcccagctccagactgaagtggaggaggcagtgcaggagtgcaggaatgctgaggagaaggccaagaaggccatcacggatgccgccatgatggcagaggagctgaagaaggagcaggacaccagcgcccacctggagcgcatgaagaagaacatggaacagaccattaaggacctgcagcaccggctggacgaagccgagcagatcgccctcaagggcggcaagaagcagctgcagaagctggaagcgcgggtgcgggagctggagaatgagctggaggccgagcagaagcgcaacgcagagtcggtgaagggcatgaggaagagcgagcggcgcatcaaggagctcacctaccagacggaggaggacaggaaaaacctgctgcggctgcaggacctggtagacaagctgcagctaaaggtcaaggcctacaagcgccaggccgaggaggcggaggagcaagccaacaccaacctgtccaagttccgcaaggtgcagcacgagctggatgaggcagaggagcgggcggacatcgccgagtcccaggtcaacaagctgcgggccaagagccgtgacattggcacgaagagatgcggtttcaccatgttggccaggctggtcttgaactcctgaccttgtgatccactcgcctcagcctcccaaaggcttgaatgaggagtagctttgccacatcttgatctgctcagccctggaggtgccagcaaagccccatgctggagcctgtgtaacagctccttgggaggaagcagaataaagcaattttccttgaagccga

SEQ ID NO: 734272 - DNA, 3349 bp, Homo sapiens
acctccccacactgatgcttcttttgttgactctccttcctgcagctattgagaagggcaaaggcaaggccaagaaaggctcgtcctttcagactgtgtcagctctgcacagggaaaatctgaacaagctgatgaccaacttgcgctccacccatccccactttgtacgttgtatcatccctaatgagacaaagtctccaggggtgatggacaaccccctggtcatgcaccagctgcgctgcaatggtgtgctggagggcatccgcatctgcaggaaaggcttccccaaccgcatcctctacggggacttccggcagaggtatcgcatcctgaacccagcggccatccctgagggacagttcattgatagcaggaagggggcagagaagctgctcagctccctggacattgatcacaaccagtacaagtttggccacaccaaggtgttcttcaaggccgggctgctggggctgctggaggaaatgagggacgagaggctgagccgcatcatcacgcgtatccaggcccagtcccgaggtgtgctcgccagaatggagtacaaaaagctgctggaacgtagagactccctgctggtaatccagtggaacattcgggccttcatgggggtcaagaattggccctggatgaagctctacttcaagatcaagccgctgctgaagagtgcagaaagagagaaggagatggcctccatgaaggaggagttcacacgcctcaaagaggcgctagagaagtccgaggctcgccgcaaggagctggaggagaagatggtgtccctgctgcaggagaagaatgacctgcagctccaagtgcaggcggaacaagacaacctggcagatgctgaggagcgctgtgatcagctgatcaaaaacaagattcagctggaggccaaggtgaaggagatgaacgagaggctggaggatgaggaggagatgaatgctgagctcactgccaagaagcgcaagctggaagatgagtgctcagagctcaaaagggacatcgatgatctggagctgacactggccaaagtggagaaggagaaacacgcaacagagaacaaggtgaaaaacctgacagaggagatggctgggctggatgagatcattgccaagctgaccaaggagaagaaagctctgcaagaggcccaccaacaggctctggatgaccttcaggccgaggaggacaaggtcaacaccctgactaaggccaaagtcaagctggagcagcaagtggatgatctggaaggatccctggagcaagagaagaaggtgcgcatggacctggagcgagcgaagcggaagctggagggcgacctgaagctgacccaggagagcatcatggacctggagaatgacaagcagcagctggatgagcggctgaaaaaaaaagactttgagctgaatgctctcaacgcaaggattgaggatgaacaggccctcggcagccagctgcagaagaagctcaaggagcttcaggcacgcatcgaggagctggaggaggagctggaggccgagcgcaccgccagggctaaggtggagaagctgcgctcagacctgtctcgggagctggaggagatcagcgagcggctggaagaggccggcggggccacgtccgtgcagatcgagatgaacaagaagcgcgaggccgagttccagaagatgcggcgggacctggaggaggccacgctgcagcacgaggccactgccgcggccctgcgcaagaagcacgccgacagcgtggccgagctgggcgagcagatcgacaacctgcagcgggtgaagcagaagctggagaaggagaagagcgagttcaagctggagctggatgacgtcacctccaacatggagcagatcatcaaggccaaggctaacctggagaagatgtgccggaccttggaagaccagatgaatgagcaccggagcaaggcggaggagacccagcgttctgtcaacgacctcaccagccagcgggccaagttgcaaaccgagaatggtgagctgtcccggcagctggatgagaaggaggcactgatctcccagctgacccgaggcaagctcacctacacccagcagctggaggacctcaagaggcagctggaggaggaggttaaggcgaagaacgccctggcccacgcactgcagtcggcccggcatgactgcgacctgctgcgggagcagtacgaggaggagacggaggccaaggccgagctgcagcgcgtcctttccaaggccaactcggaggtggcccagtggaggaccaagtatgagacggacgccattcagcggactgaggagctcgaggaggccaagaagaagctggcccagcggctgcaggaagctgaggaggccgtggaggctgttaatgccaagtgctcctcgctggagaagaccaagcaccggctacagaatgagatcgaggacttgatggtggacgtagagcgctccaatgctgctgctgcagccctggacaagaagcagaggaacttcgacaagatcctggccgagtggaagcagaagtatgaggagtcgcagtcggagctggagtcctcgcagaaggaggctcgctccctcagcacagagctcttcaaactcaagaacgcctatgaggagtccctggaacatctggagaccttcaagcgggagaacaaaaacctgcaggaggagatctccgacttgactgagcagttgggttccagcggaaagactatccatgagctggagaaggtccgaaagcagctggaggccgagaagatggagctgcagtcagccctggaggaggccgaggcctccctggagcacgaggagggcaagatcctccgggcccagctggaaacaggccaagcgcaaccacctgcgggtggtggactcgctgcagacctccctggacgcagagacacgcagccgcaacgaggccctgagggtgaagaagaagatggaaggagacctcaatgagatggagatccagctcagccacgccaaccgcatggccgccgaggcccagaagcaagtcaagagcctccagagcttgttgaaggacacccagattcagctggacgatgcagtccgtgccaacgacgacctgaaggagaacatcgccatcgtggagcggcgcaacaacctgctgcaggctgagctggaggagttgcgtgccgtggtggagcagacagagcggtcccggaagctggcggagcaggagctgattgagactagtgagcgggtgcagctgctgcattcccagaacaccagcctcatcaaccagaagaagaagatggagtcggatctgacccagctccagtcggaagtggaggaggcagtgcaggagtgcagaaacg

SEQ ID NO: 734273 - DNA, 1883 bp, Homo sapiens
acctccccacactgatgcttcttttgttgactctccttcctgcagctattgagaagggcaaaggcaaggccaagaaaggctcgtcctttcagactgtgtcagctctgcacagggaaaatctgaacaagctgatgaccaacttgcgctccacccatccccactttgtacgttgtatcatccctaatgagacaaagtctccaggggtgatggacaaccccctggtcatgcaccagctgcgctgcaatggtgtgctggagggcatccgcatctgcaggaaaggcttccccaaccgcatcctctacggggacttccggcagaggtatcgcatcctgaacccagcggccatccctgagggacagttcattgatagcaggaagggggcagagaagctgctcagctccctggacattgatcacaaccagtacaagtttggccacaccaaggtgttcttcaaggccgggctgctggggctgctggaggaaatgagggacgagaggctgagccgcatcatcacgcgtatccaggcccagtcccgaggtgtgctcgccagaatggagtacaaaaagctgctggaacgtagagactccctgctggtaatccagtggaacattcgggccttcatgggggtcaagaattggccctggatgaagctctacttcaagatcaagccgctgctgaagagtgcagaaagagagaaggagatggcctccatgaaggaggagttcacacgcctcaaagaggcgctagagaagtccgaggctcgccgcaaggagctggaggagaagatggtgtccctgctgcaggagaagaatgacctgcagctccaagtgcaggcggaacaagacaacctggcagatgctgaggagcgctgtgatcagctgatcaaaaacaagattcagctggaggccaaggtgaaggagatgaacgagaggctggaggatgaggaggagatgaatgctgagctcactgccaagaagcgcaagctggaagatgagtgctcagagctcaaaagggacatcgatgatctggagctgacactggccaaagtggagaaggagaaacacgcaacagagaacaaggtgaaaaacctgacagaggagatggctgggctggatgagatcattgccaagctgaccaaggagaagaaagctctgcaagaggcccaccaacaggctctggatgaccttcaggccgaggaggacaaggtcaacaccctgactaaggccaaagtcaagctggagcagcaagtggatgatctggaaggatccctggagcaagagaagaaggtgcgcatggacctggagcgagcgaagcggaagctggagggcgacctgaagctgacccaggagagcatcatggacctggagaatgacaagcagcagctggatgagcggctgaaaaaaaaagactttgagctgaatgctctcaacgcaaggattgaggatgaacaggccctcggcagccagctgcagaagaagctcaaggagcttcagcggcgcatcaaggagctcacctaccagacggaggaggacaggaaaaacctgctgcggctgcaggacctggtagacaagctgcagctaaaggtcaaggcctacaagcgccaggccgaggaggcggaggagcaagccaacaccaacctgtccaagttccgcaaggtgcagcacgagctggatgaggcagaggagcgggcggacatcgccgagtcccaggtcaacaagctgcgggccaagagccgtgacattggcacgaagggcttgaatgaggagtagctttgccacatcttgatctgctcagccctggaggtgccagcaaagccccatgctggagcctgtgtaacagctccttgggaggaagcagaataaagcaattttccttgaagccga

SEQ ID NO: 734274 - DNA, 1966 bp, Homo sapiens
acctccccacactgatgcttcttttgttgactctccttcctgcagctattgagaagggcaaaggcaaggccaagaaaggctcgtcctttcagactgtgtcagctctgcacagggaaaatctgaacaagctgatgaccaacttgcgctccacccatccccactttgtacgttgtatcatccctaatgagacaaagtctccaggggtgatggacaaccccctggtcatgcaccagctgcgctgcaatggtgtgctggagggcatccgcatctgcaggaaaggcttccccaaccgcatcctctacggggacttccggcagaggtatcgcatcctgaacccagcggccatccctgagggacagttcattgatagcaggaagggggcagagaagctgctcagctccctggacattgatcacaaccagtacaagtttggccacaccaaggtgttcttcaaggccgggctgctggggctgctggaggaaatgagggacgagaggctgagccgcatcatcacgcgtatccaggcccagtcccgaggtgtgctcgccagaatggagtacaaaaagctgctggaacgtagagactccctgctggtaatccagtggaacattcgggccttcatgggggtcaagaattggccctggatgaagctctacttcaagatcaagccgctgctgaagagtgcagaaagagagaaggagatggcctccatgaaggaggagttcacacgcctcaaagaggcgctagagaagtccgaggctcgccgcaaggagctggaggagaagatggtgtccctgctgcaggagaagaatgacctgcagctccaagtgcaggcggaacaagacaacctggcagatgctgaggagcgctgtgatcagctgatcaaaaacaagattcagctggaggccaaggtgaaggagatgaacgagaggctggaggatgaggaggagatgaatgctgagctcactgccaagaagcgcaagctggaagatgagtgctcagagctcaaaagggacatcgatgatctggagctgacactggccaaagtggagaaggagaaacacgcaacagagaacaaggtgaaaaacctgacagaggagatggctgggctggatgagatcattgccaagctgaccaaggagaagaaagctctgcaagaggcccaccaacaggctctggatgaccttcaggccgaggaggacaaggtcaacaccctgactaaggccaaagtcaagctggagcagcaagtggatgatctggaaggatccctggagcaagagaagaaggtgcgcatggacctggagcgagcgaagcggaagctggagggcgacctgaagctgacccaggagagcatcatggacctggagaatgacaagcagcagctggatgagcggctgaaaaaaaaagactttgagctgaatgctctcaacgcaaggattgaggatgaacaggccctcggcagccagctgcagaagaagctcaaggagcttcagcgcgggtgcgggagctggagaatgagctggaggccgagcagaagcgcaacgcagagtcggtgaagggcatgaggaagagcgagcggcgcatcaaggagctcacctaccagacggaggaggacaggaaaaacctgctgcggctgcaggacctggtagacaagctgcagctaaaggtcaaggcctacaagcgccaggccgaggaggcggaggagcaagccaacaccaacctgtccaagttccgcaaggtgcagcacgagctggatgaggcagaggagcgggcggacatcgccgagtcccaggtcaacaagctgcgggccaagagccgtgacattggcacgaagggcttgaatgaggagtagctttgccacatcttgatctgctcagccctggaggtgccagcaaagccccatgctggagcctgtgtaacagctccttgggaggaagcagaataaagcaattttccttgaagccga

SEQ ID NO: 734275 - DNA, 2042 bp, Homo sapiens
acctccccacactgatgcttcttttgttgactctccttcctgcagctattgagaagggcaaaggcaaggccaagaaaggctcgtcctttcagactgtgtcagctctgcacagggaaaatctgaacaagctgatgaccaacttgcgctccacccatccccactttgtacgttgtatcatccctaatgagacaaagtctccaggggtgatggacaaccccctggtcatgcaccagctgcgctgcaatggtgtgctggagggcatccgcatctgcaggaaaggcttccccaaccgcatcctctacggggacttccggcagaggtatcgcatcctgaacccagcggccatccctgagggacagttcattgatagcaggaagggggcagagaagctgctcagctccctggacattgatcacaaccagtacaagtttggccacaccaaggtgttcttcaaggccgggctgctggggctgctggaggaaatgagggacgagaggctgagccgcatcatcacgcgtatccaggcccagtcccgaggtgtgctcgccagaatggagtacaaaaagctgctggaacgtagagactccctgctggtaatccagtggaacattcgggccttcatgggggtcaagaattggccctggatgaagctctacttcaagatcaagccgctgctgaagagtgcagaaagagagaaggagatggcctccatgaaggaggagttcacacgcctcaaagaggcgctagagaagtccgaggctcgccgcaaggagctggaggagaagatggtgtccctgctgcaggagaagaatgacctgcagctccaagtgcaggcggaacaagacaacctggcagatgctgaggagcgctgtgatcagctgatcaaaaacaagattcagctggaggccaaggtgaaggagatgaacgagaggctggaggatgaggaggagatgaatgctgagctcactgccaagaagcgcaagctggaagatgagtgctcagagctcaaaagggacatcgatgatctggagctgacactggccaaagtggagaaggagaaacacgcaacagagaacaaggtgaaaaacctgacagaggagatggctgggctggatgagatcattgccaagctgaccaaggagaagaaagctctgcaagaggcccaccaacaggctctggatgaccttcaggccgaggaggacaaggtcaacaccctgactaaggccaaagtcaagctggagcagcaagtggatgatctggaaggatccctggagcaagagaagaaggtgcgcatggacctggagcgagcgaagcggaagctggagggcgacctgaagctgacccaggagagcatcatggacctggagaatgacaagcagcagctggatgagcggctgaaaaaaaaagactttgagctgaatgctctcaacgcaaggattgaggatgaacaggccctcggcagccagctgcagaagaagctcaaggagcttcagcgcgggtgcgggagctggagaatgagctggaggccgagcagaagcgcaacgcagagtcggtgaagggcatgaggaagagcgagcggcgcatcaaggagctcacctaccagacggaggaggacaggaaaaacctgctgcggctgcaggacctggtagacaagctgcagctaaaggtcaaggcctacaagcgccaggccgaggaggcggaggagcaagccaacaccaacctgtccaagttccgcaaggtgcagcacgagctggatgaggcagaggagcgggcggacatcgccgagtcccaggtcaacaagctgcgggccaagagccgtgacattggcacgaagagatgcggtttcaccatgttggccaggctggtcttgaactcctgaccttgtgatccactcgcctcagcctcccaaaggcttgaatgaggagtagctttgccacatcttgatctgctcagccctggaggtgccagcaaagccccatgctggagcctgtgtaacagctccttgggaggaagcagaataaagcaattttccttgaagccga

SEQ ID NO: 734276 - DNA, 1781 bp, Homo sapiens
acctccccacactgatgcttcttttgttgactctccttcctgcagctattgagaagggcaaaggcaaggccaagaaaggctcgtcctttcagactgtgtcagctctgcacagggaaaatctgaacaagctgatgaccaacttgcgctccacccatccccactttgtacgttgtatcatccctaatgagacaaagtctccaggggtgatggacaaccccctggtcatgcaccagctgcgctgcaatggtgtgctggagggcatccgcatctgcaggaaaggcttccccaaccgcatcctctacggggacttccggcagaggtatcgcatcctgaacccagcggccatccctgagggacagttcattgatagcaggaagggggcagagaagctgctcagctccctggacattgatcacaaccagtacaagtttggccacaccaaggtgttcttcaaggccgggctgctggggctgctggaggaaatgagggacgagaggctgagccgcatcatcacgcgtatccaggcccagtcccgaggtgtgctcgccagaatggagtacaaaaagctgctggaacgtagagactccctgctggtaatccagtggaacattcgggccttcatgggggtcaagaattggccctggatgaagctctacttcaagatcaagccgctgctgaagagtgcagaaagagagaaggagatggcctccatgaaggaggagttcacacgcctcaaagaggcgctagagaagtccgaggctcgccgcaaggagctggaggagaagatggtgtccctgctgcaggagaagaatgacctgcagctccaagtgcaggcggaacaagacaacctggcagatgctgaggagcgctgtgatcagctgatcaaaaacaagattcagctggaggccaaggtgaaggagatgaacgagaggctggaggatgaggaggagatgaatgctgagctcactgccaagaagcgcaagctggaagatgagtgctcagagctcaaaagggacatcgatgatctggagctgacactggccaaagtggagaaggagaaacacgcaacagagaacaaggtgaaaaacctgacagaggagatggctgggctggatgagatcattgccaagctgaccaaggagaagaaagctctgcaagaggcccaccaacaggctctggatgaccttcaggccgaggaggacaaggtcaacaccctgactaaggccaaagtcaagctggagcagcaagtggatgatctggaaggatccctggagcaagagaagaaggtgcgcatggacctggagcgagcgaagcggaagctggagggcgacctgaagctgacccaggagagcatcatggacctggagaatgacaagcagcagctggatgagcggctgaaaaaaaaagactttgagctgaatgctctcaacgcaaggattgaggatgaacaggccctcggcagccagctgcagaagaagctcaaggagcttcaggcacgcatcgaggagctggaggaggagctggaggccgagcgcaccgccagggctaaggtggagaagctgcgctcagacctgtctcgggagcgggcggacatcgccgagtcccaggtcaacaagctgcgggccaagagccgtgacattggcacgaagggcttgaatgaggagtagctttgccacatcttgatctgctcagccctggaggtgccagcaaagccccatgctggagcctgtgtaacagctccttgggaggaagcagaataaagcaattttccttgaagccga

SEQ ID NO: 734277 - DNA, 720 bp, Homo sapiens
ggcaccctggaggaccagatcatccaggccaaccctgctctggaggcctttggcaatgccaagaccgtccggaacgacaactcctcccgcttcgggaaattcattcgaattcattttggggcaacaggaaagttggcatctgcagacatagagacctatcttctggaaaaatccagagttattttccagctgaaagcagagagagattatcacattttctaccaaatcctgtctaacaaaaagcctgagctgctggacatgctgctgatcaccaacaacccctacgattatgcattcatctcccaaggagagaccaccgtggcctccattgatgacgctgaggagctcatggccactgataacgcttttgatgtgctgggcttcacttcagaggacctggtagacaagctgcagctaaaggtcaaggcctacaagcgccaggccgaggaggcggaggagcaagccaacaccaacctgtccaagttccgcaaggtgcagcacgagctggatgaggcagaggagcgggcggacatcgccgagtcccaggtcaacaagctgcgggccaagagccgtgacattggcacgaagggcttgaatgaggagtagctttgccacatcttgatctgctcagccctggaggtgccagcaaagccccatgctggagcctgtgtaacagctccttgggaggaagcagaataaagcaattttccttgaagccga

SEQ ID NO: 734278 - DNA, 796 bp, Homo sapiens
ggcaccctggaggaccagatcatccaggccaaccctgctctggaggcctttggcaatgccaagaccgtccggaacgacaactcctcccgcttcgggaaattcattcgaattcattttggggcaacaggaaagttggcatctgcagacatagagacctatcttctggaaaaatccagagttattttccagctgaaagcagagagagattatcacattttctaccaaatcctgtctaacaaaaagcctgagctgctggacatgctgctgatcaccaacaacccctacgattatgcattcatctcccaaggagagaccaccgtggcctccattgatgacgctgaggagctcatggccactgataacgcttttgatgtgctgggcttcacttcagaggacctggtagacaagctgcagctaaaggtcaaggcctacaagcgccaggccgaggaggcggaggagcaagccaacaccaacctgtccaagttccgcaaggtgcagcacgagctggatgaggcagaggagcgggcggacatcgccgagtcccaggtcaacaagctgcgggccaagagccgtgacattggcacgaagagatgcggtttcaccatgttggccaggctggtcttgaactcctgaccttgtgatccactcgcctcagcctcccaaaggcttgaatgaggagtagctttgccacatcttgatctgctcagccctggaggtgccagcaaagccccatgctggagcctgtgtaacagctccttgggaggaagcagaataaagcaattttccttgaagccga

SEQ ID NO: 734279 - DNA, 3952 bp, Homo sapiens
gggaaattcattcgaattcattttggggcaacaggaaagttggcatctgcagacatagagacctatcttctggaaaaatccagagttattttccagctgaaagcagagagagattatcacattttctaccaaatcctgtctaacaaaaagcctgagctgctggacatgctgctgatcaccaacaacccctacgattatgcattcatctcccaaggagagaccaccgtggcctccattgatgacgctgaggagctcatggccactgataacgcttttgatgtgctgggcttcacttcagaggagaaaaactccatgtataagctgacaggcgccatcatgcactttggaaacatgaagttcaagctgaagcagcgggaggagcaggcggagccagacggcactgaagaggctgacaagtctgcctacctcatggggctgaactcagccgacctgctcaaggggctgtgccaccctcgggtgaaagtgggcaatgagtacgtcaccaaggggcagaatgtccagcaggtgatatatgccactggggcactggccaaggcagtgtatgagaggatgttcaactggatggtgacgcgcatcaatgccaccctggagaccaagcagccacgccagtacttcataggagtcctggacatcgctggcttcgagatcttcgatttcaacagctttgagcagctctgcatcaacttcaccaacgagaagctgcagcagttcttcaaccaccacatgtttgtgctggagcaggaggagtacaagaaggagggcatcgagtggacattcattgactttggcatggacctgcaggcctgcattgacctcatcgagaagcccatgggcatcatgtccatcctggaagaggagtgcatgttccccaaggccaccgacatgaccttcaaggccaagctgtttgacaaccacctgggcaaatccgccaacttccagaagccacgcaatatcaaggggaagcctgaagcccacttctccctgatccactatgccggcatcgtggactacaacatcattggctggctgcagaagaacaaggatcctctcaatgagactgtcgtgggcttgtatcagaagtcttccctcaagctgctcagcaccctgtttgccaactatgctggggctgatgcgcctattgagaagggcaaaggcaaggccaagaaaggctcgtcctttcagactgtgtcagctctgcacagggaaaatctgaacaagctgatgaccaacttgcgctccacccatccccactttgtacgttgtatcatccctaatgagacaaagtctccaggggtgatggacaaccccctggtcatgcaccagctgcgctgcaatggtgtgctggagggcatccgcatctgcaggaaaggcttccccaaccgcatcctctacggggacttccggcagaggtatcgcatcctgaacccagcggccatccctgagggacagttcattgatagcaggaagggggcagagaagctgctcagctccctggacattgatcacaaccagtacaagtttggccacaccaaggtgttcttcaaggccgggctgctggggctgctggaggaaatgagggacgagaggctgagccgcatcatcacgcgtatccaggcccagtcccgaggtgtgctcgccagaatggagtacaaaaagctgctggaacgtagagactccctgctggtaatccagtggaacattcgggccttcatgggggtcaagaattggccctggatgaagctctacttcaagatcaagccgctgctgaagagtgcagaaagagagaaggagatggcctccatgaaggaggagttcacacgcctcaaagaggcgctagagaagtccgaggctcgccgcaaggagctggaggagaagatggtgtccctgctgcaggagaagaatgacctgcagctccaagtgcaggcggaacaagacaacctggcagatgctgaggagcgctgtgatcagctgatcaaaaacaagattcagctggaggccaaggtgaaggagatgaacgagaggctggaggatgaggaggagatgaatgctgagctcactgccaagaagcgcaagctggaagatgagtgctcagagctcaaaagggacatcgatgatctggagctgacactggccaaagtggagaaggagaaacacgcaacagagaacaaggtgaaaaacctgacagaggagatggctgggctggatgagatcattgccaagctgaccaaggagaagaaagctctgcaagaggcccaccaacaggctctggatgaccttcaggccgaggaggacaaggtcaacaccctgactaaggccaaagtcaagctggagcagcaagtggatgatctggaaggatccctggagcaagagaagaaggtgcgcatggacctggagcgagcgaagcggaagctggagggcgacctgaagctgacccaggagagcatcatggacctggagaatgacaagcagcagctggatgagcggctgaaaaaaaaagactttgagctgaatgctctcaacgcaaggattgaggatgaacaggccctcggcagccagctgcagaagaagctcaaggagcttcaggcacgcatcgaggagctggaggaggagctggaggccgagcgcaccgccagggctaaggtggagaagctgcgctcagacctgtctcgggagctggaggagatcagcgagcggctggaagaggccggcggggccacgtccgtgcagacctccctggacgcagagacacgcagccgcaacgaggccctgagggtgaagaagaagatggaaggagacctcaatgagatggagatccagctcagccacgccaaccgcatggccgccgaggcccagaagcaagtcaagagcctccagagcttgttgaaggacacccagattcagctggacgatgcagtccgtgccaacgacgacctgaaggagaacatcgccatcgtggagcggcgcaacaacctgctgcaggctgagctggaggagttgcgtgccgtggtggagcagacagagcggtcccggaagctggcggagcaggagctgattgagactagtgagcgggtgcagctgctgcattcccagaacaccagcctcatcaaccagaagaagaagatggatgctgacctgtcccagctccagactgaagtggaggaggcagtgcaggagtgcaggaatgctgaggagaaggccaagaaggccatcacggatgccgccatgatggcagaggagctgaagaaggagcaggacaccagcgcccacctggagcgcatgaagaagaacatggaacagaccattaaggacctgcagcaccggctggacgaagccgagcagatcgccctcaagggcggcaagaagcagctgcagaagctggaagcgcgggtgcgggagctggagaatgagctggaggccgagcagaagcgcaacgcagagtcggtgaagggcatgaggaagagcgagcggcgcatcaaggagctcacctaccagacggaggaggacaggaaaaacctgctgcggctgcaggacctggtagacaagctgcagctaaaggtcaaggcctacaagcgccaggccgaggaggcggaggagcaagccaacaccaacctgtccaagttccgcaaggtgcagcacgagctggatgaggcagaggagcgggcggacatcgccgagtcccaggtcaacaagctgcgggccaagagccgtgacattggcacgaagagatgcggtttcaccatgttggccaggctggtcttgaactcctgaccttgtgatccactcgcctcagcctcccaaaggcttgaatgaggagtagctttgccacatcttgatctgctcagccctggaggtgccagcaaagccccatgctggagcctgtgtaacagctccttgggaggaagcagaataaagcaattttccttgaagccga

SEQ ID NO: 734280 - DNA, 3205 bp, Homo sapiens
gggaaattcattcgaattcattttggggcaacaggaaagttggcatctgcagacatagagacctatcttctggaaaaatccagagttattttccagctgaaagcagagagagattatcacattttctaccaaatcctgtctaacaaaaagcctgagctgctggacatgctgctgatcaccaacaacccctacgattatgcattcatctcccaaggagagaccaccgtggcctccattgatgacgctgaggagctcatggccactgataacgcttttgatgtgctgggcttcacttcagaggagaaaaactccatgtataagctgacaggcgccatcatgcactttggaaacatgaagttcaagctgaagcagcgggaggagcaggcggagccagacggcactgaagaggctgacaagtctgcctacctcatggggctgaactcagccgacctgctcaaggggctgtgccaccctcgggtgaaagtgggcaatgagtacgtcaccaaggggcagaatgtccagcaggtgatatatgccactggggcactggccaaggcagtgtatgagaggatgttcaactggatggtgacgcgcatcaatgccaccctggagaccaagcagccacgccagtacttcataggagtcctggacatcgctggcttcgagatcttcgatttcaacagctttgagcagctctgcatcaacttcaccaacgagaagctgcagcagttcttcaaccaccacatgtttgtgctggagcaggaggagtacaagaaggagggcatcgagtggacattcattgactttggcatggacctgcaggcctgcattgacctcatcgagaagcccatgggcatcatgtccatcctggaagaggagtgcatgttccccaaggccaccgacatgaccttcaaggccaagctgtttgacaaccacctgggcaaatccgccaacttccagaagccacgcaatatcaaggggaagcctgaagcccacttctccctgatccactatgccggcatcgtggactacaacatcattggctggctgcagaagaacaaggatcctctcaatgagactgtcgtgggcttgtatcagaagtcttccctcaagctgctcagcaccctgtttgccaactatgctggggctgatgcgcctattgagaagggcaaaggcaaggccaagaaaggctcgtcctttcagactgtgtcagctctgcacagggaaaatctgaacaagctgatgaccaacttgcgctccacccatccccactttgtacgttgtatcatccctaatgagacaaagtctccaggggtgatggacaaccccctggtcatgcaccagctgcgctgcaatggtgtgctggagggcatccgcatctgcaggaaaggcttccccaaccgcatcctctacggggacttccggcagaggtatcgcatcctgaacccagcggccatccctgagggacagttcattgatagcaggaagggggcagagaagctgctcagctccctggacattgatcacaaccagtacaagtttggccacaccaaggtgttcttcaaggccgggctgctggggctgctggaggaaatgagggacgagaggctgagccgcatcatcacgcgtatccaggcccagtcccgaggtgtgctcgccagaatggagtacaaaaagctgctggaacgtagagactccctgctggtaatccagtggaacattcgggccttcatgggggtcaagaattggccctggatgaagctctacttcaagatcaagccgctgctgaagagtgcagaaagagagaaggagatggcctccatgaaggaggagttcacacgcctcaaagaggcgctagagaagtccgaggctcgccgcaaggagctggaggagaagatggtgtccctgctgcaggagaagaatgacctgcagctccaagtgcaggcggaacaagacaacctggcagatgctgaggagcgctgtgatcagctgatcaaaaacaagattcagctggaggccaaggtgaaggagatgaacgagaggctggaggatgaggaggagatgaatgctgagctcactgccaagaagcgcaagctggaagatgagtgctcagagctcaaaagggacatcgatgatctggagctgacactggccaaagtggagaaggagaaacacgcaacagagaacaaggtgaaaaacctgacagaggagatggctgggctggatgagatcattgccaagctgaccaaggagaagaaagctctgcaagaggcccaccaacaggctctggatgaccttcaggccgaggaggacaaggtcaacaccctgactaaggccaaagtcaagctggagcagcaagtggatgatctggaaggatccctggagcaagagaagaaggtgcgcatggacctggagcgagcgaagcggaagctggagggcgacctgaagctgacccaggagagcatcatggacctggagaatgacaagcagcagctggatgagcggctgaaaaaaaaagactttgagctgaatgctctcaacgcaaggattgaggatgaacaggccctcggcagccagctgcagaagaagctcaaggagcttcaggcacgcatcgaggagctggaggaggagctggaggccgagcgcaccgccagggctaaggtggagaagctgcgctcagacctgtctcgggagctggaggagatcagcgagcggctggaagaggccggcggggccacgtccgtgcagacctccctggacgcagagacacgcagccgcaacgaggccctgagggtgaagaagaagatggaaggagacctcaatgagatggagatccagctcagccacgccaaccgcatggccgccgaggcccagaagcaagtcaagagcctccagagcttgttgaaggacacccagattcagctggacgatgcagtccgtgccaacgacgacctgaaggagaacatcgccatcgtggagcggcgcaacaacctgctgcaggctgagctggaggagttgcgtgccgtggtggagcagacagagcggtcccggaagctggcggagcaggagctgattgagactagtgagcgggtgcagctgctgcattcccagaacaccagcctcatcaaccagaagaagaagatggagtcggatctgacccagctccagtcggaagtggaggaggcagtgcaggagtgcagaaacg

SEQ ID NO: 734281 - DNA, 5266 bp, Homo sapiens
gggaaattcattcgaattcattttggggcaacaggaaagttggcatctgcagacatagagacctatcttctggaaaaatccagagttattttccagctgaaagcagagagagattatcacattttctaccaaatcctgtctaacaaaaagcctgagctgctggacatgctgctgatcaccaacaacccctacgattatgcattcatctcccaaggagagaccaccgtggcctccattgatgacgctgaggagctcatggccactgataacgcttttgatgtgctgggcttcacttcagaggagaaaaactccatgtataagctgacaggcgccatcatgcactttggaaacatgaagttcaagctgaagcagcgggaggagcaggcggagccagacggcactgaagaggctgacaagtctgcctacctcatggggctgaactcagccgacctgctcaaggggctgtgccaccctcgggtgaaagtgggcaatgagtacgtcaccaaggggcagaatgtccagcaggtgatatatgccactggggcactggccaaggcagtgtatgagaggatgttcaactggatggtgacgcgcatcaatgccaccctggagaccaagcagccacgccagtacttcataggagtcctggacatcgctggcttcgagatcttcgatttcaacagctttgagcagctctgcatcaacttcaccaacgagaagctgcagcagttcttcaaccaccacatgtttgtgctggagcaggaggagtacaagaaggagggcatcgagtggacattcattgactttggcatggacctgcaggcctgcattgacctcatcgagaagcccatgggcatcatgtccatcctggaagaggagtgcatgttccccaaggccaccgacatgaccttcaaggccaagctgtttgacaaccacctgggcaaatccgccaacttccagaagccacgcaatatcaaggggaagcctgaagcccacttctccctgatccactatgccggcatcgtggactacaacatcattggctggctgcagaagaacaaggatcctctcaatgagactgtcgtgggcttgtatcagaagtcttccctcaagctgctcagcaccctgtttgccaactatgctggggctgatgcgcctattgagaagggcaaaggcaaggccaagaaaggctcgtcctttcagactgtgtcagctctgcacagggaaaatctgaacaagctgatgaccaacttgcgctccacccatccccactttgtacgttgtatcatccctaatgagacaaagtctccaggggtgatggacaaccccctggtcatgcaccagctgcgctgcaatggtgtgctggagggcatccgcatctgcaggaaaggcttccccaaccgcatcctctacggggacttccggcagaggtatcgcatcctgaacccagcggccatccctgagggacagttcattgatagcaggaagggggcagagaagctgctcagctccctggacattgatcacaaccagtacaagtttggccacaccaaggtgttcttcaaggccgggctgctggggctgctggaggaaatgagggacgagaggctgagccgcatcatcacgcgtatccaggcccagtcccgaggtgtgctcgccagaatggagtacaaaaagctgctggaacgtagagactccctgctggtaatccagtggaacattcgggccttcatgggggtcaagaattggccctggatgaagctctacttcaagatcaagccgctgctgaagagtgcagaaagagagaaggagatggcctccatgaaggaggagttcacacgcctcaaagaggcgctagagaagtccgaggctcgccgcaaggagctggaggagaagatggtgtccctgctgcaggagaagaatgacctgcagctccaagtgcaggcggaacaagacaacctggcagatgctgaggagcgctgtgatcagctgatcaaaaacaagattcagctggaggccaaggtgaaggagatgaacgagaggctggaggatgaggaggagatgaatgctgagctcactgccaagaagcgcaagctggaagatgagtgctcagagctcaaaagggacatcgatgatctggagctgacactggccaaagtggagaaggagaaacacgcaacagagaacaaggtgaaaaacctgacagaggagatggctgggctggatgagatcattgccaagctgaccaaggagaagaaagctctgcaagaggcccaccaacaggctctggatgaccttcaggccgaggaggacaaggtcaacaccctgactaaggccaaagtcaagctggagcagcaagtggatgatctggaaggatccctggagcaagagaagaaggtgcgcatggacctggagcgagcgaagcggaagctggagggcgacctgaagctgacccaggagagcatcatggacctggagaatgacaagcagcagctggatgagcggctgaaaaaaaaagactttgagctgaatgctctcaacgcaaggattgaggatgaacaggccctcggcagccagctgcagaagaagctcaaggagcttcaggcacgcatcgaggagctggaggaggagctggaggccgagcgcaccgccagggctaaggtggagaagctgcgctcagacctgtctcgggagctggaggagatcagcgagcggctggaagaggccggcggggccacgtccgtgcagatcgagatgaacaagaagcgcgaggccgagttccagaagatgcggcgggacctggaggaggccacgctgcagcacgaggccactgccgcggccctgcgcaagaagcacgccgacagcgtggccgagctgggcgagcagatcgacaacctgcagcgggtgaagcagaagctggagaaggagaagagcgagttcaagctggagctggatgacgtcacctccaacatggagcagatcatcaaggccaaggctaacctggagaagatgtgccggaccttggaagaccagatgaatgagcaccggagcaaggcggaggagacccagcgttctgtcaacgacctcaccagccagcgggccaagttgcaaaccgagaatggtgagctgtcccggcagctggatgagaaggaggcactgatctcccagctgacccgaggcaagctcacctacacccagcagctggaggacctcaagaggcagctggaggaggaggttaaggcgaagaacgccctggcccacgcactgcagtcggcccggcatgactgcgacctgctgcgggagcagtacgaggaggagacggaggccaaggccgagctgcagcgcgtcctttccaaggccaactcggaggtggcccagtggaggaccaagtatgagacggacgccattcagcggactgaggagctcgaggaggccaagaagaagctggcccagcggctgcaggaagctgaggaggccgtggaggctgttaatgccaagtgctcctcgctggagaagaccaagcaccggctacagaatgagatcgaggacttgatggtggacgtagagcgctccaatgctgctgctgcagccctggacaagaagcagaggaacttcgacaagatcctggccgagtggaagcagaagtatgaggagtcgcagtcggagctggagtcctcgcagaaggaggctcgctccctcagcacagagctcttcaaactcaagaacgcctatgaggagtccctggaacatctggagaccttcaagcgggagaacaaaaacctgcaggaggagatctccgacttgactgagcagttgggttccagcggaaagactatccatgagctggagaaggtccgaaagcagctggaggccgagaagatggagctgcagtcagccctggaggaggccgaggcctccctggagcacgaggagggcaagatcctccgggcccagctggagttcaaccagatcaaggcagagatcgagcggaagctggcagagaaggacgaggagatggaacaggccaagcgcaaccacctgcgggtggtggactcgctgcagacctccctggacgcagagacacgcagccgcaacgaggccctgagggtgaagaagaagatggaaggagacctcaatgagatggagatccagctcagccacgccaaccgcatggccgccgaggcccagaagcaagtcaagagcctccagagcttgttgaaggacacccagattcagctggacgatgcagtccgtgccaacgacgacctgaaggagaacatcgccatcgtggagcggcgcaacaacctgctgcaggctgagctggaggagttgcgtgccgtggtggagcagacagagcggtcccggaagctggcggagcaggagctgattgagactagtgagcgggtgcagctgctgcattcccagaacaccagcctcatcaaccagaagaagaagatggatgctgacctgtcccagctccagactgaagtggaggaggcagtgcaggagtgcaggaatgctgaggagaaggccaagaaggccatcacggatgccgccatgatggcagaggagctgaagaaggagcaggacaccagcgcccacctggagcgcatgaagaagaacatggaacagaccattaaggacctgcagcaccggctggacgaagccgagcagatcgccctcaagggcggcaagaagcagctgcagaagctggaagcgcgggtgcgggagctggagaatgagctggaggccgagcagaagcgcaacgcagagtcggtgaagggcatgaggaagagcgagcggcgcatcaaggagctcacctaccagacggaggaggacaggaaaaacctgctgcggctgcaggacctggtagacaagctgcagctaaaggtcaaggcctacaagcgccaggccgaggaggcggaggagcaagccaacaccaacctgtccaagttccgcaaggtgcagcacgagctggatgaggcagaggagcgggcggacatcgccgagtcccaggtcaacaagctgcgggccaagagccgtgacattggcacgaagagatgcggtttcaccatgttggccaggctggtcttgaactcctgaccttgtgatccactcgcctcagcctcccaaaggcttgaatgaggagtagctttgccacatcttgatctgctcagccctggaggtgccagcaaagccccatgctggagcctgtgtaacagctccttgggaggaagcagaataaagcaattttccttgaagccga

SEQ ID NO: 734282 - DNA, 4519 bp, Homo sapiens
gggaaattcattcgaattcattttggggcaacaggaaagttggcatctgcagacatagagacctatcttctggaaaaatccagagttattttccagctgaaagcagagagagattatcacattttctaccaaatcctgtctaacaaaaagcctgagctgctggacatgctgctgatcaccaacaacccctacgattatgcattcatctcccaaggagagaccaccgtggcctccattgatgacgctgaggagctcatggccactgataacgcttttgatgtgctgggcttcacttcagaggagaaaaactccatgtataagctgacaggcgccatcatgcactttggaaacatgaagttcaagctgaagcagcgggaggagcaggcggagccagacggcactgaagaggctgacaagtctgcctacctcatggggctgaactcagccgacctgctcaaggggctgtgccaccctcgggtgaaagtgggcaatgagtacgtcaccaaggggcagaatgtccagcaggtgatatatgccactggggcactggccaaggcagtgtatgagaggatgttcaactggatggtgacgcgcatcaatgccaccctggagaccaagcagccacgccagtacttcataggagtcctggacatcgctggcttcgagatcttcgatttcaacagctttgagcagctctgcatcaacttcaccaacgagaagctgcagcagttcttcaaccaccacatgtttgtgctggagcaggaggagtacaagaaggagggcatcgagtggacattcattgactttggcatggacctgcaggcctgcattgacctcatcgagaagcccatgggcatcatgtccatcctggaagaggagtgcatgttccccaaggccaccgacatgaccttcaaggccaagctgtttgacaaccacctgggcaaatccgccaacttccagaagccacgcaatatcaaggggaagcctgaagcccacttctccctgatccactatgccggcatcgtggactacaacatcattggctggctgcagaagaacaaggatcctctcaatgagactgtcgtgggcttgtatcagaagtcttccctcaagctgctcagcaccctgtttgccaactatgctggggctgatgcgcctattgagaagggcaaaggcaaggccaagaaaggctcgtcctttcagactgtgtcagctctgcacagggaaaatctgaacaagctgatgaccaacttgcgctccacccatccccactttgtacgttgtatcatccctaatgagacaaagtctccaggggtgatggacaaccccctggtcatgcaccagctgcgctgcaatggtgtgctggagggcatccgcatctgcaggaaaggcttccccaaccgcatcctctacggggacttccggcagaggtatcgcatcctgaacccagcggccatccctgagggacagttcattgatagcaggaagggggcagagaagctgctcagctccctggacattgatcacaaccagtacaagtttggccacaccaaggtgttcttcaaggccgggctgctggggctgctggaggaaatgagggacgagaggctgagccgcatcatcacgcgtatccaggcccagtcccgaggtgtgctcgccagaatggagtacaaaaagctgctggaacgtagagactccctgctggtaatccagtggaacattcgggccttcatgggggtcaagaattggccctggatgaagctctacttcaagatcaagccgctgctgaagagtgcagaaagagagaaggagatggcctccatgaaggaggagttcacacgcctcaaagaggcgctagagaagtccgaggctcgccgcaaggagctggaggagaagatggtgtccctgctgcaggagaagaatgacctgcagctccaagtgcaggcggaacaagacaacctggcagatgctgaggagcgctgtgatcagctgatcaaaaacaagattcagctggaggccaaggtgaaggagatgaacgagaggctggaggatgaggaggagatgaatgctgagctcactgccaagaagcgcaagctggaagatgagtgctcagagctcaaaagggacatcgatgatctggagctgacactggccaaagtggagaaggagaaacacgcaacagagaacaaggtgaaaaacctgacagaggagatggctgggctggatgagatcattgccaagctgaccaaggagaagaaagctctgcaagaggcccaccaacaggctctggatgaccttcaggccgaggaggacaaggtcaacaccctgactaaggccaaagtcaagctggagcagcaagtggatgatctggaaggatccctggagcaagagaagaaggtgcgcatggacctggagcgagcgaagcggaagctggagggcgacctgaagctgacccaggagagcatcatggacctggagaatgacaagcagcagctggatgagcggctgaaaaaaaaagactttgagctgaatgctctcaacgcaaggattgaggatgaacaggccctcggcagccagctgcagaagaagctcaaggagcttcaggcacgcatcgaggagctggaggaggagctggaggccgagcgcaccgccagggctaaggtggagaagctgcgctcagacctgtctcgggagctggaggagatcagcgagcggctggaagaggccggcggggccacgtccgtgcagatcgagatgaacaagaagcgcgaggccgagttccagaagatgcggcgggacctggaggaggccacgctgcagcacgaggccactgccgcggccctgcgcaagaagcacgccgacagcgtggccgagctgggcgagcagatcgacaacctgcagcgggtgaagcagaagctggagaaggagaagagcgagttcaagctggagctggatgacgtcacctccaacatggagcagatcatcaaggccaaggctaacctggagaagatgtgccggaccttggaagaccagatgaatgagcaccggagcaaggcggaggagacccagcgttctgtcaacgacctcaccagccagcgggccaagttgcaaaccgagaatggtgagctgtcccggcagctggatgagaaggaggcactgatctcccagctgacccgaggcaagctcacctacacccagcagctggaggacctcaagaggcagctggaggaggaggttaaggcgaagaacgccctggcccacgcactgcagtcggcccggcatgactgcgacctgctgcgggagcagtacgaggaggagacggaggccaaggccgagctgcagcgcgtcctttccaaggccaactcggaggtggcccagtggaggaccaagtatgagacggacgccattcagcggactgaggagctcgaggaggccaagaagaagctggcccagcggctgcaggaagctgaggaggccgtggaggctgttaatgccaagtgctcctcgctggagaagaccaagcaccggctacagaatgagatcgaggacttgatggtggacgtagagcgctccaatgctgctgctgcagccctggacaagaagcagaggaacttcgacaagatcctggccgagtggaagcagaagtatgaggagtcgcagtcggagctggagtcctcgcagaaggaggctcgctccctcagcacagagctcttcaaactcaagaacgcctatgaggagtccctggaacatctggagaccttcaagcgggagaacaaaaacctgcaggaggagatctccgacttgactgagcagttgggttccagcggaaagactatccatgagctggagaaggtccgaaagcagctggaggccgagaagatggagctgcagtcagccctggaggaggccgaggcctccctggagcacgaggagggcaagatcctccgggcccagctggagttcaaccagatcaaggcagagatcgagcggaagctggcagagaaggacgaggagatggaacaggccaagcgcaaccacctgcgggtggtggactcgctgcagacctccctggacgcagagacacgcagccgcaacgaggccctgagggtgaagaagaagatggaaggagacctcaatgagatggagatccagctcagccacgccaaccgcatggccgccgaggcccagaagcaagtcaagagcctccagagcttgttgaaggacacccagattcagctggacgatgcagtccgtgccaacgacgacctgaaggagaacatcgccatcgtggagcggcgcaacaacctgctgcaggctgagctggaggagttgcgtgccgtggtggagcagacagagcggtcccggaagctggcggagcaggagctgattgagactagtgagcgggtgcagctgctgcattcccagaacaccagcctcatcaaccagaagaagaagatggagtcggatctgacccagctccagtcggaagtggaggaggcagtgcaggagtgcagaaacg

SEQ ID NO: 734283 - DNA, 5053 bp, Homo sapiens
gggaaattcattcgaattcattttggggcaacaggaaagttggcatctgcagacatagagacctatcttctggaaaaatccagagttattttccagctgaaagcagagagagattatcacattttctaccaaatcctgtctaacaaaaagcctgagctgctggacatgctgctgatcaccaacaacccctacgattatgcattcatctcccaaggagagaccaccgtggcctccattgatgacgctgaggagctcatggccactgataacgcttttgatgtgctgggcttcacttcagaggagaaaaactccatgtataagctgacaggcgccatcatgcactttggaaacatgaagttcaagctgaagcagcgggaggagcaggcggagccagacggcactgaagaggctgacaagtctgcctacctcatggggctgaactcagccgacctgctcaaggggctgtgccaccctcgggtgaaagtgggcaatgagtacgtcaccaaggggcagaatgtccagcaggtgatatatgccactggggcactggccaaggcagtgtatgagaggatgttcaactggatggtgacgcgcatcaatgccaccctggagaccaagcagccacgccagtacttcataggagtcctggacatcgctggcttcgagatcttcgatttcaacagctttgagcagctctgcatcaacttcaccaacgagaagctgcagcagttcttcaaccaccacatgtttgtgctggagcaggaggagtacaagaaggagggcatcgagtggacattcattgactttggcatggacctgcaggcctgcattgacctcatcgagaagcccatgggcatcatgtccatcctggaagaggagtgcatgttccccaaggccaccgacatgaccttcaaggccaagctgtttgacaaccacctgggcaaatccgccaacttccagaagccacgcaatatcaaggggaagcctgaagcccacttctccctgatccactatgccggcatcgtggactacaacatcattggctggctgcagaagaacaaggatcctctcaatgagactgtcgtgggcttgtatcagaagtcttccctcaagctgctcagcaccctgtttgccaactatgctggggctgatgcgcctattgagaagggcaaaggcaaggccaagaaaggctcgtcctttcagactgtgtcagctctgcacagggaaaatctgaacaagctgatgaccaacttgcgctccacccatccccactttgtacgttgtatcatccctaatgagacaaagtctccaggggtgatggacaaccccctggtcatgcaccagctgcgctgcaatggtgtgctggagggcatccgcatctgcaggaaaggcttccccaaccgcatcctctacggggacttccggcagaggtatcgcatcctgaacccagcggccatccctgagggacagttcattgatagcaggaagggggcagagaagctgctcagctccctggacattgatcacaaccagtacaagtttggccacaccaaggtgttcttcaaggccgggctgctggggctgctggaggaaatgagggacgagaggctgagccgcatcatcacgcgtatccaggcccagtcccgaggtgtgctcgccagaatggagtacaaaaagctgctggaacgtagagactccctgctggtaatccagtggaacattcgggccttcatgggggtcaagaattggccctggatgaagctctacttcaagatcaagccgctgctgaagagtgcagaaagagagaaggagatggcctccatgaaggaggagttcacacgcctcaaagaggcgctagagaagtccgaggctcgccgcaaggagctggaggagaagatggtgtccctgctgcaggagaagaatgacctgcagctccaagtgcaggcggaacaagacaacctggcagatgctgaggagcgctgtgatcagctgatcaaaaacaagattcagctggaggccaaggtgaaggagatgaacgagaggctggaggatgaggaggagatgaatgctgagctcactgccaagaagcgcaagctggaagatgagtgctcagagctcaaaagggacatcgatgatctggagctgacactggccaaagtggagaaggagaaacacgcaacagagaacaaggtgaaaaacctgacagaggagatggctgggctggatgagatcattgccaagctgaccaaggagaagaaagctctgcaagaggcccaccaacaggctctggatgaccttcaggccgaggaggacaaggtcaacaccctgactaaggccaaagtcaagctggagcagcaagtggatgatctggaaggatccctggagcaagagaagaaggtgcgcatggacctggagcgagcgaagcggaagctggagggcgacctgaagctgacccaggagagcatcatggacctggagaatgacaagcagcagctggatgagcggctgaaaaaaaaagactttgagctgaatgctctcaacgcaaggattgaggatgaacaggccctcggcagccagctgcagaagaagctcaaggagcttcaggcacgcatcgaggagctggaggaggagctggaggccgagcgcaccgccagggctaaggtggagaagctgcgctcagacctgtctcgggagctggaggagatcagcgagcggctggaagaggccggcggggccacgtccgtgcagatcgagatgaacaagaagcgcgaggccgagttccagaagatgcggcgggacctggaggaggccacgctgcagcacgaggccactgccgcggccctgcgcaagaagcacgccgacagcgtggccgagctgggcgagcagatcgacaacctgcagcgggtgaagcagaagctggagaaggagaagagcgagttcaagctggagctggatgacgtcacctccaacatggagcagatcatcaaggccaaggctaacctggagaagatgtgccggaccttggaagaccagatgaatgagcaccggagcaaggcggaggagacccagcgttctgtcaacgacctcaccagccagcgggccaagttgcaaaccgagaatggtgagctgtcccggcagctggatgagaaggaggcactgatctcccagctgacccgaggcaagctcacctacacccagcagctggaggacctcaagaggcagctggaggaggaggttaaggcgaagaacgccctggcccacgcactgcagtcggcccggcatgactgcgacctgctgcgggagcagtacgaggaggagacggaggccaaggccgagctgcagcgcgtcctttccaaggccaactcggaggtggcccagtggaggaccaagtatgagacggacgccattcagcggactgaggagctcgaggaggccaagaagaagctggcccagcggctgcaggaagctgaggaggccgtggaggctgttaatgccaagtgctcctcgctggagaagaccaagcaccggctacagaatgagatcgaggacttgatggtggacgtagagcgctccaatgctgctgctgcagccctggacaagaagcagaggaacttcgacaagatcctggccgagtggaagcagaagtatgaggagtcgcagtcggagctggagtcctcgcagaaggaggctcgctccctcagcacagagctcttcaaactcaagaacgcctatgaggagtccctggaacatctggagaccttcaagcgggagaacaaaaacctgcaggaggagatctccgacttgactgagcagttgggttccagcggaaagactatccatgagctggagaaggtccgaaagcagctggaggccgagaagatggagctgcagtcagccctggaggaggccgaggcctccctggagcacgaggagggcaagatcctccgggcccagctggagttcaaccagatcaaggcagagatcgagcggaagctggcagagaaggacgaggagatggaacaggccaagcgcaaccacctgcgggtggtggactcgctgcagacctccctggacgcagagacacgacacccagattcagctggacgatgcagtccgtgccaacgacgacctgaaggagaacatcgccatcgtggagcggcgcaacaacctgctgcaggctgagctggaggagttgcgtgccgtggtggagcagacagagcggtcccggaagctggcggagcaggagctgattgagactagtgagcgggtgcagctgctgcattcccagaacaccagcctcatcaaccagaagaagaagatggatgctgacctgtcccagctccagactgaagtggaggaggcagtgcaggagtgcaggaatgctgaggagaaggccaagaaggccatcacggatgccgccatgatggcagaggagctgaagaaggagcaggacaccagcgcccacctggagcgcatgaagaagaacatggaacagaccattaaggacctgcagcaccggctggacgaagccgagcagatcgccctcaagggcggcaagaagcagctgcagaagctggaagcgcgggtgcgggagctggagaatgagctggaggccgagcagaagcgcaacgcagagtcggtgaagggcatgaggaagagcgagcggcgcatcaaggagctcacctaccagacggaggaggacaggaaaaacctgctgcggctgcaggacctggtagacaagctgcagctaaaggtcaaggcctacaagcgccaggccgaggaggcggaggagcaagccaacaccaacctgtccaagttccgcaaggtgcagcacgagctggatgaggcagaggagcgggcggacatcgccgagtcccaggtcaacaagctgcgggccaagagccgtgacattggcacgaagggcttgaatgaggagtagctttgccacatcttgatctgctcagccctggaggtgccagcaaagccccatgctggagcctgtgtaacagctccttgggaggaagcagaataaagcaattttccttgaagccga

SEQ ID NO: 734284 - DNA, 5129 bp, Homo sapiens
gggaaattcattcgaattcattttggggcaacaggaaagttggcatctgcagacatagagacctatcttctggaaaaatccagagttattttccagctgaaagcagagagagattatcacattttctaccaaatcctgtctaacaaaaagcctgagctgctggacatgctgctgatcaccaacaacccctacgattatgcattcatctcccaaggagagaccaccgtggcctccattgatgacgctgaggagctcatggccactgataacgcttttgatgtgctgggcttcacttcagaggagaaaaactccatgtataagctgacaggcgccatcatgcactttggaaacatgaagttcaagctgaagcagcgggaggagcaggcggagccagacggcactgaagaggctgacaagtctgcctacctcatggggctgaactcagccgacctgctcaaggggctgtgccaccctcgggtgaaagtgggcaatgagtacgtcaccaaggggcagaatgtccagcaggtgatatatgccactggggcactggccaaggcagtgtatgagaggatgttcaactggatggtgacgcgcatcaatgccaccctggagaccaagcagccacgccagtacttcataggagtcctggacatcgctggcttcgagatcttcgatttcaacagctttgagcagctctgcatcaacttcaccaacgagaagctgcagcagttcttcaaccaccacatgtttgtgctggagcaggaggagtacaagaaggagggcatcgagtggacattcattgactttggcatggacctgcaggcctgcattgacctcatcgagaagcccatgggcatcatgtccatcctggaagaggagtgcatgttccccaaggccaccgacatgaccttcaaggccaagctgtttgacaaccacctgggcaaatccgccaacttccagaagccacgcaatatcaaggggaagcctgaagcccacttctccctgatccactatgccggcatcgtggactacaacatcattggctggctgcagaagaacaaggatcctctcaatgagactgtcgtgggcttgtatcagaagtcttccctcaagctgctcagcaccctgtttgccaactatgctggggctgatgcgcctattgagaagggcaaaggcaaggccaagaaaggctcgtcctttcagactgtgtcagctctgcacagggaaaatctgaacaagctgatgaccaacttgcgctccacccatccccactttgtacgttgtatcatccctaatgagacaaagtctccaggggtgatggacaaccccctggtcatgcaccagctgcgctgcaatggtgtgctggagggcatccgcatctgcaggaaaggcttccccaaccgcatcctctacggggacttccggcagaggtatcgcatcctgaacccagcggccatccctgagggacagttcattgatagcaggaagggggcagagaagctgctcagctccctggacattgatcacaaccagtacaagtttggccacaccaaggtgttcttcaaggccgggctgctggggctgctggaggaaatgagggacgagaggctgagccgcatcatcacgcgtatccaggcccagtcccgaggtgtgctcgccagaatggagtacaaaaagctgctggaacgtagagactccctgctggtaatccagtggaacattcgggccttcatgggggtcaagaattggccctggatgaagctctacttcaagatcaagccgctgctgaagagtgcagaaagagagaaggagatggcctccatgaaggaggagttcacacgcctcaaagaggcgctagagaagtccgaggctcgccgcaaggagctggaggagaagatggtgtccctgctgcaggagaagaatgacctgcagctccaagtgcaggcggaacaagacaacctggcagatgctgaggagcgctgtgatcagctgatcaaaaacaagattcagctggaggccaaggtgaaggagatgaacgagaggctggaggatgaggaggagatgaatgctgagctcactgccaagaagcgcaagctggaagatgagtgctcagagctcaaaagggacatcgatgatctggagctgacactggccaaagtggagaaggagaaacacgcaacagagaacaaggtgaaaaacctgacagaggagatggctgggctggatgagatcattgccaagctgaccaaggagaagaaagctctgcaagaggcccaccaacaggctctggatgaccttcaggccgaggaggacaaggtcaacaccctgactaaggccaaagtcaagctggagcagcaagtggatgatctggaaggatccctggagcaagagaagaaggtgcgcatggacctggagcgagcgaagcggaagctggagggcgacctgaagctgacccaggagagcatcatggacctggagaatgacaagcagcagctggatgagcggctgaaaaaaaaagactttgagctgaatgctctcaacgcaaggattgaggatgaacaggccctcggcagccagctgcagaagaagctcaaggagcttcaggcacgcatcgaggagctggaggaggagctggaggccgagcgcaccgccagggctaaggtggagaagctgcgctcagacctgtctcgggagctggaggagatcagcgagcggctggaagaggccggcggggccacgtccgtgcagatcgagatgaacaagaagcgcgaggccgagttccagaagatgcggcgggacctggaggaggccacgctgcagcacgaggccactgccgcggccctgcgcaagaagcacgccgacagcgtggccgagctgggcgagcagatcgacaacctgcagcgggtgaagcagaagctggagaaggagaagagcgagttcaagctggagctggatgacgtcacctccaacatggagcagatcatcaaggccaaggctaacctggagaagatgtgccggaccttggaagaccagatgaatgagcaccggagcaaggcggaggagacccagcgttctgtcaacgacctcaccagccagcgggccaagttgcaaaccgagaatggtgagctgtcccggcagctggatgagaaggaggcactgatctcccagctgacccgaggcaagctcacctacacccagcagctggaggacctcaagaggcagctggaggaggaggttaaggcgaagaacgccctggcccacgcactgcagtcggcccggcatgactgcgacctgctgcgggagcagtacgaggaggagacggaggccaaggccgagctgcagcgcgtcctttccaaggccaactcggaggtggcccagtggaggaccaagtatgagacggacgccattcagcggactgaggagctcgaggaggccaagaagaagctggcccagcggctgcaggaagctgaggaggccgtggaggctgttaatgccaagtgctcctcgctggagaagaccaagcaccggctacagaatgagatcgaggacttgatggtggacgtagagcgctccaatgctgctgctgcagccctggacaagaagcagaggaacttcgacaagatcctggccgagtggaagcagaagtatgaggagtcgcagtcggagctggagtcctcgcagaaggaggctcgctccctcagcacagagctcttcaaactcaagaacgcctatgaggagtccctggaacatctggagaccttcaagcgggagaacaaaaacctgcaggaggagatctccgacttgactgagcagttgggttccagcggaaagactatccatgagctggagaaggtccgaaagcagctggaggccgagaagatggagctgcagtcagccctggaggaggccgaggcctccctggagcacgaggagggcaagatcctccgggcccagctggagttcaaccagatcaaggcagagatcgagcggaagctggcagagaaggacgaggagatggaacaggccaagcgcaaccacctgcgggtggtggactcgctgcagacctccctggacgcagagacacgacacccagattcagctggacgatgcagtccgtgccaacgacgacctgaaggagaacatcgccatcgtggagcggcgcaacaacctgctgcaggctgagctggaggagttgcgtgccgtggtggagcagacagagcggtcccggaagctggcggagcaggagctgattgagactagtgagcgggtgcagctgctgcattcccagaacaccagcctcatcaaccagaagaagaagatggatgctgacctgtcccagctccagactgaagtggaggaggcagtgcaggagtgcaggaatgctgaggagaaggccaagaaggccatcacggatgccgccatgatggcagaggagctgaagaaggagcaggacaccagcgcccacctggagcgcatgaagaagaacatggaacagaccattaaggacctgcagcaccggctggacgaagccgagcagatcgccctcaagggcggcaagaagcagctgcagaagctggaagcgcgggtgcgggagctggagaatgagctggaggccgagcagaagcgcaacgcagagtcggtgaagggcatgaggaagagcgagcggcgcatcaaggagctcacctaccagacggaggaggacaggaaaaacctgctgcggctgcaggacctggtagacaagctgcagctaaaggtcaaggcctacaagcgccaggccgaggaggcggaggagcaagccaacaccaacctgtccaagttccgcaaggtgcagcacgagctggatgaggcagaggagcgggcggacatcgccgagtcccaggtcaacaagctgcgggccaagagccgtgacattggcacgaagagatgcggtttcaccatgttggccaggctggtcttgaactcctgaccttgtgatccactcgcctcagcctcccaaaggcttgaatgaggagtagctttgccacatcttgatctgctcagccctggaggtgccagcaaagccccatgctggagcctgtgtaacagctccttgggaggaagcagaataaagcaattttccttgaagccga

SEQ ID NO: 734285 - DNA, 4382 bp, Homo sapiens
gggaaattcattcgaattcattttggggcaacaggaaagttggcatctgcagacatagagacctatcttctggaaaaatccagagttattttccagctgaaagcagagagagattatcacattttctaccaaatcctgtctaacaaaaagcctgagctgctggacatgctgctgatcaccaacaacccctacgattatgcattcatctcccaaggagagaccaccgtggcctccattgatgacgctgaggagctcatggccactgataacgcttttgatgtgctgggcttcacttcagaggagaaaaactccatgtataagctgacaggcgccatcatgcactttggaaacatgaagttcaagctgaagcagcgggaggagcaggcggagccagacggcactgaagaggctgacaagtctgcctacctcatggggctgaactcagccgacctgctcaaggggctgtgccaccctcgggtgaaagtgggcaatgagtacgtcaccaaggggcagaatgtccagcaggtgatatatgccactggggcactggccaaggcagtgtatgagaggatgttcaactggatggtgacgcgcatcaatgccaccctggagaccaagcagccacgccagtacttcataggagtcctggacatcgctggcttcgagatcttcgatttcaacagctttgagcagctctgcatcaacttcaccaacgagaagctgcagcagttcttcaaccaccacatgtttgtgctggagcaggaggagtacaagaaggagggcatcgagtggacattcattgactttggcatggacctgcaggcctgcattgacctcatcgagaagcccatgggcatcatgtccatcctggaagaggagtgcatgttccccaaggccaccgacatgaccttcaaggccaagctgtttgacaaccacctgggcaaatccgccaacttccagaagccacgcaatatcaaggggaagcctgaagcccacttctccctgatccactatgccggcatcgtggactacaacatcattggctggctgcagaagaacaaggatcctctcaatgagactgtcgtgggcttgtatcagaagtcttccctcaagctgctcagcaccctgtttgccaactatgctggggctgatgcgcctattgagaagggcaaaggcaaggccaagaaaggctcgtcctttcagactgtgtcagctctgcacagggaaaatctgaacaagctgatgaccaacttgcgctccacccatccccactttgtacgttgtatcatccctaatgagacaaagtctccaggggtgatggacaaccccctggtcatgcaccagctgcgctgcaatggtgtgctggagggcatccgcatctgcaggaaaggcttccccaaccgcatcctctacggggacttccggcagaggtatcgcatcctgaacccagcggccatccctgagggacagttcattgatagcaggaagggggcagagaagctgctcagctccctggacattgatcacaaccagtacaagtttggccacaccaaggtgttcttcaaggccgggctgctggggctgctggaggaaatgagggacgagaggctgagccgcatcatcacgcgtatccaggcccagtcccgaggtgtgctcgccagaatggagtacaaaaagctgctggaacgtagagactccctgctggtaatccagtggaacattcgggccttcatgggggtcaagaattggccctggatgaagctctacttcaagatcaagccgctgctgaagagtgcagaaagagagaaggagatggcctccatgaaggaggagttcacacgcctcaaagaggcgctagagaagtccgaggctcgccgcaaggagctggaggagaagatggtgtccctgctgcaggagaagaatgacctgcagctccaagtgcaggcggaacaagacaacctggcagatgctgaggagcgctgtgatcagctgatcaaaaacaagattcagctggaggccaaggtgaaggagatgaacgagaggctggaggatgaggaggagatgaatgctgagctcactgccaagaagcgcaagctggaagatgagtgctcagagctcaaaagggacatcgatgatctggagctgacactggccaaagtggagaaggagaaacacgcaacagagaacaaggtgaaaaacctgacagaggagatggctgggctggatgagatcattgccaagctgaccaaggagaagaaagctctgcaagaggcccaccaacaggctctggatgaccttcaggccgaggaggacaaggtcaacaccctgactaaggccaaagtcaagctggagcagcaagtggatgatctggaaggatccctggagcaagagaagaaggtgcgcatggacctggagcgagcgaagcggaagctggagggcgacctgaagctgacccaggagagcatcatggacctggagaatgacaagcagcagctggatgagcggctgaaaaaaaaagactttgagctgaatgctctcaacgcaaggattgaggatgaacaggccctcggcagccagctgcagaagaagctcaaggagcttcaggcacgcatcgaggagctggaggaggagctggaggccgagcgcaccgccagggctaaggtggagaagctgcgctcagacctgtctcgggagctggaggagatcagcgagcggctggaagaggccggcggggccacgtccgtgcagatcgagatgaacaagaagcgcgaggccgagttccagaagatgcggcgggacctggaggaggccacgctgcagcacgaggccactgccgcggccctgcgcaagaagcacgccgacagcgtggccgagctgggcgagcagatcgacaacctgcagcgggtgaagcagaagctggagaaggagaagagcgagttcaagctggagctggatgacgtcacctccaacatggagcagatcatcaaggccaaggctaacctggagaagatgtgccggaccttggaagaccagatgaatgagcaccggagcaaggcggaggagacccagcgttctgtcaacgacctcaccagccagcgggccaagttgcaaaccgagaatggtgagctgtcccggcagctggatgagaaggaggcactgatctcccagctgacccgaggcaagctcacctacacccagcagctggaggacctcaagaggcagctggaggaggaggttaaggcgaagaacgccctggcccacgcactgcagtcggcccggcatgactgcgacctgctgcgggagcagtacgaggaggagacggaggccaaggccgagctgcagcgcgtcctttccaaggccaactcggaggtggcccagtggaggaccaagtatgagacggacgccattcagcggactgaggagctcgaggaggccaagaagaagctggcccagcggctgcaggaagctgaggaggccgtggaggctgttaatgccaagtgctcctcgctggagaagaccaagcaccggctacagaatgagatcgaggacttgatggtggacgtagagcgctccaatgctgctgctgcagccctggacaagaagcagaggaacttcgacaagatcctggccgagtggaagcagaagtatgaggagtcgcagtcggagctggagtcctcgcagaaggaggctcgctccctcagcacagagctcttcaaactcaagaacgcctatgaggagtccctggaacatctggagaccttcaagcgggagaacaaaaacctgcaggaggagatctccgacttgactgagcagttgggttccagcggaaagactatccatgagctggagaaggtccgaaagcagctggaggccgagaagatggagctgcagtcagccctggaggaggccgaggcctccctggagcacgaggagggcaagatcctccgggcccagctggagttcaaccagatcaaggcagagatcgagcggaagctggcagagaaggacgaggagatggaacaggccaagcgcaaccacctgcgggtggtggactcgctgcagacctccctggacgcagagacacgacacccagattcagctggacgatgcagtccgtgccaacgacgacctgaaggagaacatcgccatcgtggagcggcgcaacaacctgctgcaggctgagctggaggagttgcgtgccgtggtggagcagacagagcggtcccggaagctggcggagcaggagctgattgagactagtgagcgggtgcagctgctgcattcccagaacaccagcctcatcaaccagaagaagaagatggagtcggatctgacccagctccagtcggaagtggaggaggcagtgcaggagtgcagaaacg

SEQ ID NO: 734286 - DNA, 5047 bp, Homo sapiens
gggaaattcattcgaattcattttggggcaacaggaaagttggcatctgcagacatagagacctatcttctggaaaaatccagagttattttccagctgaaagcagagagagattatcacattttctaccaaatcctgtctaacaaaaagcctgagctgctggacatgctgctgatcaccaacaacccctacgattatgcattcatctcccaaggagagaccaccgtggcctccattgatgacgctgaggagctcatggccactgataacgcttttgatgtgctgggcttcacttcagaggagaaaaactccatgtataagctgacaggcgccatcatgcactttggaaacatgaagttcaagctgaagcagcgggaggagcaggcggagccagacggcactgaagaggctgacaagtctgcctacctcatggggctgaactcagccgacctgctcaaggggctgtgccaccctcgggtgaaagtgggcaatgagtacgtcaccaaggggcagaatgtccagcaggtgatatatgccactggggcactggccaaggcagtgtatgagaggatgttcaactggatggtgacgcgcatcaatgccaccctggagaccaagcagccacgccagtacttcataggagtcctggacatcgctggcttcgagatcttcgatttcaacagctttgagcagctctgcatcaacttcaccaacgagaagctgcagcagttcttcaaccaccacatgtttgtgctggagcaggaggagtacaagaaggagggcatcgagtggacattcattgactttggcatggacctgcaggcctgcattgacctcatcgagaagcccatgggcatcatgtccatcctggaagaggagtgcatgttccccaaggccaccgacatgaccttcaaggccaagctgtttgacaaccacctgggcaaatccgccaacttccagaagccacgcaatatcaaggggaagcctgaagcccacttctccctgatccactatgccggcatcgtggactacaacatcattggctggctgcagaagaacaaggatcctctcaatgagactgtcgtgggcttgtatcagaagtcttccctcaagctgctcagcaccctgtttgccaactatgctggggctgatgcgcctattgagaagggcaaaggcaaggccaagaaaggctcgtcctttcagactgtgtcagctctgcacagggaaaatctgaacaagctgatgaccaacttgcgctccacccatccccactttgtacgttgtatcatccctaatgagacaaagtctccaggggtgatggacaaccccctggtcatgcaccagctgcgctgcaatggtgtgctggagggcatccgcatctgcaggaaaggcttccccaaccgcatcctctacggggacttccggcagaggtatcgcatcctgaacccagcggccatccctgagggacagttcattgatagcaggaagggggcagagaagctgctcagctccctggacattgatcacaaccagtacaagtttggccacaccaaggtgttcttcaaggccgggctgctggggctgctggaggaaatgagggacgagaggctgagccgcatcatcacgcgtatccaggcccagtcccgaggtgtgctcgccagaatggagtacaaaaagctgctggaacgtagagactccctgctggtaatccagtggaacattcgggccttcatgggggtcaagaattggccctggatgaagctctacttcaagatcaagccgctgctgaagagtgcagaaagagagaaggagatggcctccatgaaggaggagttcacacgcctcaaagaggcgctagagaagtccgaggctcgccgcaaggagctggaggagaagatggtgtccctgctgcaggagaagaatgacctgcagctccaagtgcaggcggaacaagacaacctggcagatgctgaggagcgctgtgatcagctgatcaaaaacaagattcagctggaggccaaggtgaaggagatgaacgagaggctggaggatgaggaggagatgaatgctgagctcactgccaagaagcgcaagctggaagatgagtgctcagagctcaaaagggacatcgatgatctggagctgacactggccaaagtggagaaggagaaacacgcaacagagaacaaggtgaaaaacctgacagaggagatggctgggctggatgagatcattgccaagctgaccaaggagaagaaagctctgcaagaggcccaccaacaggctctggatgaccttcaggccgaggaggacaaggtcaacaccctgactaaggccaaagtcaagctggagcagcaagtggatgatctggaaggatccctggagcaagagaagaaggtgcgcatggacctggagcgagcgaagcggaagctggagggcgacctgaagctgacccaggagagcatcatggacctggagaatgacaagcagcagctggatgagcggctgaaaaaaaaagactttgagctgaatgctctcaacgcaaggattgaggatgaacaggccctcggcagccagctgcagaagaagctcaaggagcttcaggcacgcatcgaggagctggaggaggagctggaggccgagcgcaccgccagggctaaggtggagaagctgcgctcagacctgtctcgggagctggaggagatcagcgagcggctggaagaggccggcggggccacgtccgtgcagatcgagatgaacaagaagcgcgaggccgagttccagaagatgcggcgggacctggaggaggccacgctgcagcacgaggccactgccgcggccctgcgcaagaagcacgccgacagcgtggccgagctgggcgagcagatcgacaacctgcagcgggtgaagcagaagctggagaaggagaagagcgagttcaagctggagctggatgacgtcacctccaacatggagcagatcatcaaggccaaggctaacctggagaagatgtgccggaccttggaagaccagatgaatgagcaccggagcaaggcggaggagacccagcgttctgtcaacgacctcaccagccagcgggccaagttgcaaaccgagaatggtgagctgtcccggcagctggatgagaaggaggcactgatctcccagctgacccgaggcaagctcacctacacccagcagctggaggacctcaagaggcagctggaggaggaggttaaggcgaagaacgccctggcccacgcactgcagtcggcccggcatgactgcgacctgctgcgggagcagtacgaggaggagacggaggccaaggccgagctgcagcgcgtcctttccaaggccaactcggaggtggcccagtggaggaccaagtatgagacggacgccattcagcggactgaggagctcgaggaggccaagaagaagctggcccagcggctgcaggaagctgaggaggccgtggaggctgttaatgccaagtgctcctcgctggagaagaccaagcaccggctacagaatgagatcgaggacttgatggtggacgtagagcgctccaatgctgctgctgcagccctggacaagaagcagaggaacttcgacaagatcctggccgagtggaagcagaagtatgaggagtcgcagtcggagctggagtcctcgcagaaggaggctcgctccctcagcacagagctcttcaaactcaagaacgcctatgaggagtccctggaacatctggagaccttcaagcgggagaacaaaaacctgcaggaggagatctccgacttgactgagcagttgggttccagcggaaagactatccatgagctggagaaggtccgaaagcagctggaggccgagaagatggagctgcagtcagccctggaggaggccgaggcctccctggagcacgaggagggcaagatcctccgggcccagctggagttcaaccagatcaaggcagagatcgagcggaagctggcagagaaggacgaggagatgggccaaccgcatggccgccgaggcccagaagcaagtcaagagcctccagagcttgttgaaggacacccagattcagctggacgatgcagtccgtgccaacgacgacctgaaggagaacatcgccatcgtggagcggcgcaacaacctgctgcaggctgagctggaggagttgcgtgccgtggtggagcagacagagcggtcccggaagctggcggagcaggagctgattgagactagtgagcgggtgcagctgctgcattcccagaacaccagcctcatcaaccagaagaagaagatggatgctgacctgtcccagctccagactgaagtggaggaggcagtgcaggagtgcaggaatgctgaggagaaggccaagaaggccatcacggatgccgccatgatggcagaggagctgaagaaggagcaggacaccagcgcccacctggagcgcatgaagaagaacatggaacagaccattaaggacctgcagcaccggctggacgaagccgagcagatcgccctcaagggcggcaagaagcagctgcagaagctggaagcgcgggtgcgggagctggagaatgagctggaggccgagcagaagcgcaacgcagagtcggtgaagggcatgaggaagagcgagcggcgcatcaaggagctcacctaccagacggaggaggacaggaaaaacctgctgcggctgcaggacctggtagacaagctgcagctaaaggtcaaggcctacaagcgccaggccgaggaggcggaggagcaagccaacaccaacctgtccaagttccgcaaggtgcagcacgagctggatgaggcagaggagcgggcggacatcgccgagtcccaggtcaacaagctgcgggccaagagccgtgacattggcacgaagggcttgaatgaggagtagctttgccacatcttgatctgctcagccctggaggtgccagcaaagccccatgctggagcctgtgtaacagctccttgggaggaagcagaataaagcaattttccttgaagccga

SEQ ID NO: 734287 - DNA, 5123 bp, Homo sapiens
gggaaattcattcgaattcattttggggcaacaggaaagttggcatctgcagacatagagacctatcttctggaaaaatccagagttattttccagctgaaagcagagagagattatcacattttctaccaaatcctgtctaacaaaaagcctgagctgctggacatgctgctgatcaccaacaacccctacgattatgcattcatctcccaaggagagaccaccgtggcctccattgatgacgctgaggagctcatggccactgataacgcttttgatgtgctgggcttcacttcagaggagaaaaactccatgtataagctgacaggcgccatcatgcactttggaaacatgaagttcaagctgaagcagcgggaggagcaggcggagccagacggcactgaagaggctgacaagtctgcctacctcatggggctgaactcagccgacctgctcaaggggctgtgccaccctcgggtgaaagtgggcaatgagtacgtcaccaaggggcagaatgtccagcaggtgatatatgccactggggcactggccaaggcagtgtatgagaggatgttcaactggatggtgacgcgcatcaatgccaccctggagaccaagcagccacgccagtacttcataggagtcctggacatcgctggcttcgagatcttcgatttcaacagctttgagcagctctgcatcaacttcaccaacgagaagctgcagcagttcttcaaccaccacatgtttgtgctggagcaggaggagtacaagaaggagggcatcgagtggacattcattgactttggcatggacctgcaggcctgcattgacctcatcgagaagcccatgggcatcatgtccatcctggaagaggagtgcatgttccccaaggccaccgacatgaccttcaaggccaagctgtttgacaaccacctgggcaaatccgccaacttccagaagccacgcaatatcaaggggaagcctgaagcccacttctccctgatccactatgccggcatcgtggactacaacatcattggctggctgcagaagaacaaggatcctctcaatgagactgtcgtgggcttgtatcagaagtcttccctcaagctgctcagcaccctgtttgccaactatgctggggctgatgcgcctattgagaagggcaaaggcaaggccaagaaaggctcgtcctttcagactgtgtcagctctgcacagggaaaatctgaacaagctgatgaccaacttgcgctccacccatccccactttgtacgttgtatcatccctaatgagacaaagtctccaggggtgatggacaaccccctggtcatgcaccagctgcgctgcaatggtgtgctggagggcatccgcatctgcaggaaaggcttccccaaccgcatcctctacggggacttccggcagaggtatcgcatcctgaacccagcggccatccctgagggacagttcattgatagcaggaagggggcagagaagctgctcagctccctggacattgatcacaaccagtacaagtttggccacaccaaggtgttcttcaaggccgggctgctggggctgctggaggaaatgagggacgagaggctgagccgcatcatcacgcgtatccaggcccagtcccgaggtgtgctcgccagaatggagtacaaaaagctgctggaacgtagagactccctgctggtaatccagtggaacattcgggccttcatgggggtcaagaattggccctggatgaagctctacttcaagatcaagccgctgctgaagagtgcagaaagagagaaggagatggcctccatgaaggaggagttcacacgcctcaaagaggcgctagagaagtccgaggctcgccgcaaggagctggaggagaagatggtgtccctgctgcaggagaagaatgacctgcagctccaagtgcaggcggaacaagacaacctggcagatgctgaggagcgctgtgatcagctgatcaaaaacaagattcagctggaggccaaggtgaaggagatgaacgagaggctggaggatgaggaggagatgaatgctgagctcactgccaagaagcgcaagctggaagatgagtgctcagagctcaaaagggacatcgatgatctggagctgacactggccaaagtggagaaggagaaacacgcaacagagaacaaggtgaaaaacctgacagaggagatggctgggctggatgagatcattgccaagctgaccaaggagaagaaagctctgcaagaggcccaccaacaggctctggatgaccttcaggccgaggaggacaaggtcaacaccctgactaaggccaaagtcaagctggagcagcaagtggatgatctggaaggatccctggagcaagagaagaaggtgcgcatggacctggagcgagcgaagcggaagctggagggcgacctgaagctgacccaggagagcatcatggacctggagaatgacaagcagcagctggatgagcggctgaaaaaaaaagactttgagctgaatgctctcaacgcaaggattgaggatgaacaggccctcggcagccagctgcagaagaagctcaaggagcttcaggcacgcatcgaggagctggaggaggagctggaggccgagcgcaccgccagggctaaggtggagaagctgcgctcagacctgtctcgggagctggaggagatcagcgagcggctggaagaggccggcggggccacgtccgtgcagatcgagatgaacaagaagcgcgaggccgagttccagaagatgcggcgggacctggaggaggccacgctgcagcacgaggccactgccgcggccctgcgcaagaagcacgccgacagcgtggccgagctgggcgagcagatcgacaacctgcagcgggtgaagcagaagctggagaaggagaagagcgagttcaagctggagctggatgacgtcacctccaacatggagcagatcatcaaggccaaggctaacctggagaagatgtgccggaccttggaagaccagatgaatgagcaccggagcaaggcggaggagacccagcgttctgtcaacgacctcaccagccagcgggccaagttgcaaaccgagaatggtgagctgtcccggcagctggatgagaaggaggcactgatctcccagctgacccgaggcaagctcacctacacccagcagctggaggacctcaagaggcagctggaggaggaggttaaggcgaagaacgccctggcccacgcactgcagtcggcccggcatgactgcgacctgctgcgggagcagtacgaggaggagacggaggccaaggccgagctgcagcgcgtcctttccaaggccaactcggaggtggcccagtggaggaccaagtatgagacggacgccattcagcggactgaggagctcgaggaggccaagaagaagctggcccagcggctgcaggaagctgaggaggccgtggaggctgttaatgccaagtgctcctcgctggagaagaccaagcaccggctacagaatgagatcgaggacttgatggtggacgtagagcgctccaatgctgctgctgcagccctggacaagaagcagaggaacttcgacaagatcctggccgagtggaagcagaagtatgaggagtcgcagtcggagctggagtcctcgcagaaggaggctcgctccctcagcacagagctcttcaaactcaagaacgcctatgaggagtccctggaacatctggagaccttcaagcgggagaacaaaaacctgcaggaggagatctccgacttgactgagcagttgggttccagcggaaagactatccatgagctggagaaggtccgaaagcagctggaggccgagaagatggagctgcagtcagccctggaggaggccgaggcctccctggagcacgaggagggcaagatcctccgggcccagctggagttcaaccagatcaaggcagagatcgagcggaagctggcagagaaggacgaggagatgggccaaccgcatggccgccgaggcccagaagcaagtcaagagcctccagagcttgttgaaggacacccagattcagctggacgatgcagtccgtgccaacgacgacctgaaggagaacatcgccatcgtggagcggcgcaacaacctgctgcaggctgagctggaggagttgcgtgccgtggtggagcagacagagcggtcccggaagctggcggagcaggagctgattgagactagtgagcgggtgcagctgctgcattcccagaacaccagcctcatcaaccagaagaagaagatggatgctgacctgtcccagctccagactgaagtggaggaggcagtgcaggagtgcaggaatgctgaggagaaggccaagaaggccatcacggatgccgccatgatggcagaggagctgaagaaggagcaggacaccagcgcccacctggagcgcatgaagaagaacatggaacagaccattaaggacctgcagcaccggctggacgaagccgagcagatcgccctcaagggcggcaagaagcagctgcagaagctggaagcgcgggtgcgggagctggagaatgagctggaggccgagcagaagcgcaacgcagagtcggtgaagggcatgaggaagagcgagcggcgcatcaaggagctcacctaccagacggaggaggacaggaaaaacctgctgcggctgcaggacctggtagacaagctgcagctaaaggtcaaggcctacaagcgccaggccgaggaggcggaggagcaagccaacaccaacctgtccaagttccgcaaggtgcagcacgagctggatgaggcagaggagcgggcggacatcgccgagtcccaggtcaacaagctgcgggccaagagccgtgacattggcacgaagagatgcggtttcaccatgttggccaggctggtcttgaactcctgaccttgtgatccactcgcctcagcctcccaaaggcttgaatgaggagtagctttgccacatcttgatctgctcagccctggaggtgccagcaaagccccatgctggagcctgtgtaacagctccttgggaggaagcagaataaagcaattttccttgaagccga

SEQ ID NO: 734288 - DNA, 4376 bp, Homo sapiens
gggaaattcattcgaattcattttggggcaacaggaaagttggcatctgcagacatagagacctatcttctggaaaaatccagagttattttccagctgaaagcagagagagattatcacattttctaccaaatcctgtctaacaaaaagcctgagctgctggacatgctgctgatcaccaacaacccctacgattatgcattcatctcccaaggagagaccaccgtggcctccattgatgacgctgaggagctcatggccactgataacgcttttgatgtgctgggcttcacttcagaggagaaaaactccatgtataagctgacaggcgccatcatgcactttggaaacatgaagttcaagctgaagcagcgggaggagcaggcggagccagacggcactgaagaggctgacaagtctgcctacctcatggggctgaactcagccgacctgctcaaggggctgtgccaccctcgggtgaaagtgggcaatgagtacgtcaccaaggggcagaatgtccagcaggtgatatatgccactggggcactggccaaggcagtgtatgagaggatgttcaactggatggtgacgcgcatcaatgccaccctggagaccaagcagccacgccagtacttcataggagtcctggacatcgctggcttcgagatcttcgatttcaacagctttgagcagctctgcatcaacttcaccaacgagaagctgcagcagttcttcaaccaccacatgtttgtgctggagcaggaggagtacaagaaggagggcatcgagtggacattcattgactttggcatggacctgcaggcctgcattgacctcatcgagaagcccatgggcatcatgtccatcctggaagaggagtgcatgttccccaaggccaccgacatgaccttcaaggccaagctgtttgacaaccacctgggcaaatccgccaacttccagaagccacgcaatatcaaggggaagcctgaagcccacttctccctgatccactatgccggcatcgtggactacaacatcattggctggctgcagaagaacaaggatcctctcaatgagactgtcgtgggcttgtatcagaagtcttccctcaagctgctcagcaccctgtttgccaactatgctggggctgatgcgcctattgagaagggcaaaggcaaggccaagaaaggctcgtcctttcagactgtgtcagctctgcacagggaaaatctgaacaagctgatgaccaacttgcgctccacccatccccactttgtacgttgtatcatccctaatgagacaaagtctccaggggtgatggacaaccccctggtcatgcaccagctgcgctgcaatggtgtgctggagggcatccgcatctgcaggaaaggcttccccaaccgcatcctctacggggacttccggcagaggtatcgcatcctgaacccagcggccatccctgagggacagttcattgatagcaggaagggggcagagaagctgctcagctccctggacattgatcacaaccagtacaagtttggccacaccaaggtgttcttcaaggccgggctgctggggctgctggaggaaatgagggacgagaggctgagccgcatcatcacgcgtatccaggcccagtcccgaggtgtgctcgccagaatggagtacaaaaagctgctggaacgtagagactccctgctggtaatccagtggaacattcgggccttcatgggggtcaagaattggccctggatgaagctctacttcaagatcaagccgctgctgaagagtgcagaaagagagaaggagatggcctccatgaaggaggagttcacacgcctcaaagaggcgctagagaagtccgaggctcgccgcaaggagctggaggagaagatggtgtccctgctgcaggagaagaatgacctgcagctccaagtgcaggcggaacaagacaacctggcagatgctgaggagcgctgtgatcagctgatcaaaaacaagattcagctggaggccaaggtgaaggagatgaacgagaggctggaggatgaggaggagatgaatgctgagctcactgccaagaagcgcaagctggaagatgagtgctcagagctcaaaagggacatcgatgatctggagctgacactggccaaagtggagaaggagaaacacgcaacagagaacaaggtgaaaaacctgacagaggagatggctgggctggatgagatcattgccaagctgaccaaggagaagaaagctctgcaagaggcccaccaacaggctctggatgaccttcaggccgaggaggacaaggtcaacaccctgactaaggccaaagtcaagctggagcagcaagtggatgatctggaaggatccctggagcaagagaagaaggtgcgcatggacctggagcgagcgaagcggaagctggagggcgacctgaagctgacccaggagagcatcatggacctggagaatgacaagcagcagctggatgagcggctgaaaaaaaaagactttgagctgaatgctctcaacgcaaggattgaggatgaacaggccctcggcagccagctgcagaagaagctcaaggagcttcaggcacgcatcgaggagctggaggaggagctggaggccgagcgcaccgccagggctaaggtggagaagctgcgctcagacctgtctcgggagctggaggagatcagcgagcggctggaagaggccggcggggccacgtccgtgcagatcgagatgaacaagaagcgcgaggccgagttccagaagatgcggcgggacctggaggaggccacgctgcagcacgaggccactgccgcggccctgcgcaagaagcacgccgacagcgtggccgagctgggcgagcagatcgacaacctgcagcgggtgaagcagaagctggagaaggagaagagcgagttcaagctggagctggatgacgtcacctccaacatggagcagatcatcaaggccaaggctaacctggagaagatgtgccggaccttggaagaccagatgaatgagcaccggagcaaggcggaggagacccagcgttctgtcaacgacctcaccagccagcgggccaagttgcaaaccgagaatggtgagctgtcccggcagctggatgagaaggaggcactgatctcccagctgacccgaggcaagctcacctacacccagcagctggaggacctcaagaggcagctggaggaggaggttaaggcgaagaacgccctggcccacgcactgcagtcggcccggcatgactgcgacctgctgcgggagcagtacgaggaggagacggaggccaaggccgagctgcagcgcgtcctttccaaggccaactcggaggtggcccagtggaggaccaagtatgagacggacgccattcagcggactgaggagctcgaggaggccaagaagaagctggcccagcggctgcaggaagctgaggaggccgtggaggctgttaatgccaagtgctcctcgctggagaagaccaagcaccggctacagaatgagatcgaggacttgatggtggacgtagagcgctccaatgctgctgctgcagccctggacaagaagcagaggaacttcgacaagatcctggccgagtggaagcagaagtatgaggagtcgcagtcggagctggagtcctcgcagaaggaggctcgctccctcagcacagagctcttcaaactcaagaacgcctatgaggagtccctggaacatctggagaccttcaagcgggagaacaaaaacctgcaggaggagatctccgacttgactgagcagttgggttccagcggaaagactatccatgagctggagaaggtccgaaagcagctggaggccgagaagatggagctgcagtcagccctggaggaggccgaggcctccctggagcacgaggagggcaagatcctccgggcccagctggagttcaaccagatcaaggcagagatcgagcggaagctggcagagaaggacgaggagatgggccaaccgcatggccgccgaggcccagaagcaagtcaagagcctccagagcttgttgaaggacacccagattcagctggacgatgcagtccgtgccaacgacgacctgaaggagaacatcgccatcgtggagcggcgcaacaacctgctgcaggctgagctggaggagttgcgtgccgtggtggagcagacagagcggtcccggaagctggcggagcaggagctgattgagactagtgagcgggtgcagctgctgcattcccagaacaccagcctcatcaaccagaagaagaagatggagtcggatctgacccagctccagtcggaagtggaggaggcagtgcaggagtgcagaaacg

SEQ ID NO: 734289 - DNA, 5207 bp, Homo sapiens
gggaaattcattcgaattcattttggggcaacaggaaagttggcatctgcagacatagagacctatcttctggaaaaatccagagttattttccagctgaaagcagagagagattatcacattttctaccaaatcctgtctaacaaaaagcctgagctgctggacatgctgctgatcaccaacaacccctacgattatgcattcatctcccaaggagagaccaccgtggcctccattgatgacgctgaggagctcatggccactgataacgcttttgatgtgctgggcttcacttcagaggagaaaaactccatgtataagctgacaggcgccatcatgcactttggaaacatgaagttcaagctgaagcagcgggaggagcaggcggagccagacggcactgaagaggctgacaagtctgcctacctcatggggctgaactcagccgacctgctcaaggggctgtgccaccctcgggtgaaagtgggcaatgagtacgtcaccaaggggcagaatgtccagcaggtgatatatgccactggggcactggccaaggcagtgtatgagaggatgttcaactggatggtgacgcgcatcaatgccaccctggagaccaagcagccacgccagtacttcataggagtcctggacatcgctggcttcgagatcttcgatttcaacagctttgagcagctctgcatcaacttcaccaacgagaagctgcagcagttcttcaaccaccacatgtttgtgctggagcaggaggagtacaagaaggagggcatcgagtggacattcattgactttggcatggacctgcaggcctgcattgacctcatcgagaagcccatgggcatcatgtccatcctggaagaggagtgcatgttccccaaggccaccgacatgaccttcaaggccaagctgtttgacaaccacctgggcaaatccgccaacttccagaagccacgcaatatcaaggggaagcctgaagcccacttctccctgatccactatgccggcatcgtggactacaacatcattggctggctgcagaagaacaaggatcctctcaatgagactgtcgtgggcttgtatcagaagtcttccctcaagctgctcagcaccctgtttgccaactatgctggggctgatgcgcctattgagaagggcaaaggcaaggccaagaaaggctcgtcctttcagactgtgtcagctctgcacagggaaaatctgaacaagctgatgaccaacttgcgctccacccatccccactttgtacgttgtatcatccctaatgagacaaagtctccaggggtgatggacaaccccctggtcatgcaccagctgcgctgcaatggtgtgctggagggcatccgcatctgcaggaaaggcttccccaaccgcatcctctacggggacttccggcagaggtatcgcatcctgaacccagcggccatccctgagggacagttcattgatagcaggaagggggcagagaagctgctcagctccctggacattgatcacaaccagtacaagtttggccacaccaaggtgttcttcaaggccgggctgctggggctgctggaggaaatgagggacgagaggctgagccgcatcatcacgcgtatccaggcccagtcccgaggtgtgctcgccagaatggagtacaaaaagctgctggaacgtagagactccctgctggtaatccagtggaacattcgggccttcatgggggtcaagaattggccctggatgaagctctacttcaagatcaagccgctgctgaagagtgcagaaagagagaaggagatggcctccatgaaggaggagttcacacgcctcaaagaggcgctagagaagtccgaggctcgccgcaaggagctggaggagaagatggtgtccctgctgcaggagaagaatgacctgcagctccaagtgcaggcggaacaagacaacctggcagatgctgaggagcgctgtgatcagctgatcaaaaacaagattcagctggaggccaaggtgaaggagatgaacgagaggctggaggatgaggaggagatgaatgctgagctcactgccaagaagcgcaagctggaagatgagtgctcagagctcaaaagggacatcgatgatctggagctgacactggccaaagtggagaaggagaaacacgcaacagagaacaaggtgaaaaacctgacagaggagatggctgggctggatgagatcattgccaagctgaccaaggagaagaaagctctgcaagaggcccaccaacaggctctggatgaccttcaggccgaggaggacaaggtcaacaccctgactaaggccaaagtcaagctggagcagcaagtggatgatctggaaggatccctggagcaagagaagaaggtgcgcatggacctggagcgagcgaagcggaagctggagggcgacctgaagctgacccaggagagcatcatggacctggagaatgacaagcagcagctggatgagcggctgaaaaaaaaagactttgagctgaatgctctcaacgcaaggattgaggatgaacaggccctcggcagccagctgcagaagaagctcaaggagcttcaggcacgcatcgaggagctggaggaggagctggaggccgagcgcaccgccagggctaaggtggagaagctgcgctcagacctgtctcgggagctggaggagatcagcgagcggctggaagaggccggcggggccacgtccgtgcagatcgagatgaacaagaagcgcgaggccgagttccagaagatgcggcgggacctggaggaggccacgctgcagcacgaggccactgccgcggccctgcgcaagaagcacgccgacagcgtggccgagctgggcgagcagatcgacaacctgcagcgggtgaagcagaagctggagaaggagaagagcgagttcaagctggagctggatgacgtcacctccaacatggagcagatcatcaaggccaaggctaacctggagaagatgtgccggaccttggaagaccagatgaatgagcaccggagcaaggcggaggagacccagcgttctgtcaacgacctcaccagccagcgggccaagttgcaaaccgagaatggtgagctgtcccggcagctggatgagaaggaggcactgatctcccagctgacccgaggcaagctcacctacacccagcagctggaggacctcaagaggcagctggaggaggaggttaaggcgaagaacgccctggcccacgcactgcagtcggcccggcatgactgcgacctgctgcgggagcagtacgaggaggagacggaggccaaggccgagctgcagcgcgtcctttccaaggccaactcggaggtggcccagtggaggaccaagtatgagacggacgccattcagcggactgaggagctcgaggaggccaagaagaagctggcccagcggctgcaggaagctgaggaggccgtggaggctgttaatgccaagtgctcctcgctggagaagaccaagcaccggctacagaatgagatcgaggacttgatggtggacgtagagcgctccaatgctgctgctgcagccctggacaagaagcagaggaacttcgacaagatcctggccgagtggaagcagaagtatgaggagtcgcagtcggagctggagtcctcgcagaaggaggctcgctccctcagcacagagctcttcaaactcaagaacgcctatgaggagtccctggaacatctggagaccttcaagcgggagaacaaaaacctgcaggaggagatctccgacttgactgagcagttgggttccagcggaaagactatccatgagctggagaaggtccgaaagcagctggaggccgagaagatggagctgcagtcagccctggaggaggccgaggcctccctggagcacgaggagggcaagatcctccgggcccagctggaaacaggccaagcgcaaccacctgcgggtggtggactcgctgcagacctccctggacgcagagacacgcagccgcaacgaggccctgagggtgaagaagaagatggaaggagacctcaatgagatggagatccagctcagccacgccaaccgcatggccgccgaggcccagaagcaagtcaagagcctccagagcttgttgaaggacacccagattcagctggacgatgcagtccgtgccaacgacgacctgaaggagaacatcgccatcgtggagcggcgcaacaacctgctgcaggctgagctggaggagttgcgtgccgtggtggagcagacagagcggtcccggaagctggcggagcaggagctgattgagactagtgagcgggtgcagctgctgcattcccagaacaccagcctcatcaaccagaagaagaagatggatgctgacctgtcccagctccagactgaagtggaggaggcagtgcaggagtgcaggaatgctgaggagaaggccaagaaggccatcacggatgccgccatgatggcagaggagctgaagaaggagcaggacaccagcgcccacctggagcgcatgaagaagaacatggaacagaccattaaggacctgcagcaccggctggacgaagccgagcagatcgccctcaagggcggcaagaagcagctgcagaagctggaagcgcgggtgcgggagctggagaatgagctggaggccgagcagaagcgcaacgcagagtcggtgaagggcatgaggaagagcgagcggcgcatcaaggagctcacctaccagacggaggaggacaggaaaaacctgctgcggctgcaggacctggtagacaagctgcagctaaaggtcaaggcctacaagcgccaggccgaggaggcggaggagcaagccaacaccaacctgtccaagttccgcaaggtgcagcacgagctggatgaggcagaggagcgggcggacatcgccgagtcccaggtcaacaagctgcgggccaagagccgtgacattggcacgaagagatgcggtttcaccatgttggccaggctggtcttgaactcctgaccttgtgatccactcgcctcagcctcccaaaggcttgaatgaggagtagctttgccacatcttgatctgctcagccctggaggtgccagcaaagccccatgctggagcctgtgtaacagctccttgggaggaagcagaataaagcaattttccttgaagccga

SEQ ID NO: 734290 - DNA, 4460 bp, Homo sapiens
gggaaattcattcgaattcattttggggcaacaggaaagttggcatctgcagacatagagacctatcttctggaaaaatccagagttattttccagctgaaagcagagagagattatcacattttctaccaaatcctgtctaacaaaaagcctgagctgctggacatgctgctgatcaccaacaacccctacgattatgcattcatctcccaaggagagaccaccgtggcctccattgatgacgctgaggagctcatggccactgataacgcttttgatgtgctgggcttcacttcagaggagaaaaactccatgtataagctgacaggcgccatcatgcactttggaaacatgaagttcaagctgaagcagcgggaggagcaggcggagccagacggcactgaagaggctgacaagtctgcctacctcatggggctgaactcagccgacctgctcaaggggctgtgccaccctcgggtgaaagtgggcaatgagtacgtcaccaaggggcagaatgtccagcaggtgatatatgccactggggcactggccaaggcagtgtatgagaggatgttcaactggatggtgacgcgcatcaatgccaccctggagaccaagcagccacgccagtacttcataggagtcctggacatcgctggcttcgagatcttcgatttcaacagctttgagcagctctgcatcaacttcaccaacgagaagctgcagcagttcttcaaccaccacatgtttgtgctggagcaggaggagtacaagaaggagggcatcgagtggacattcattgactttggcatggacctgcaggcctgcattgacctcatcgagaagcccatgggcatcatgtccatcctggaagaggagtgcatgttccccaaggccaccgacatgaccttcaaggccaagctgtttgacaaccacctgggcaaatccgccaacttccagaagccacgcaatatcaaggggaagcctgaagcccacttctccctgatccactatgccggcatcgtggactacaacatcattggctggctgcagaagaacaaggatcctctcaatgagactgtcgtgggcttgtatcagaagtcttccctcaagctgctcagcaccctgtttgccaactatgctggggctgatgcgcctattgagaagggcaaaggcaaggccaagaaaggctcgtcctttcagactgtgtcagctctgcacagggaaaatctgaacaagctgatgaccaacttgcgctccacccatccccactttgtacgttgtatcatccctaatgagacaaagtctccaggggtgatggacaaccccctggtcatgcaccagctgcgctgcaatggtgtgctggagggcatccgcatctgcaggaaaggcttccccaaccgcatcctctacggggacttccggcagaggtatcgcatcctgaacccagcggccatccctgagggacagttcattgatagcaggaagggggcagagaagctgctcagctccctggacattgatcacaaccagtacaagtttggccacaccaaggtgttcttcaaggccgggctgctggggctgctggaggaaatgagggacgagaggctgagccgcatcatcacgcgtatccaggcccagtcccgaggtgtgctcgccagaatggagtacaaaaagctgctggaacgtagagactccctgctggtaatccagtggaacattcgggccttcatgggggtcaagaattggccctggatgaagctctacttcaagatcaagccgctgctgaagagtgcagaaagagagaaggagatggcctccatgaaggaggagttcacacgcctcaaagaggcgctagagaagtccgaggctcgccgcaaggagctggaggagaagatggtgtccctgctgcaggagaagaatgacctgcagctccaagtgcaggcggaacaagacaacctggcagatgctgaggagcgctgtgatcagctgatcaaaaacaagattcagctggaggccaaggtgaaggagatgaacgagaggctggaggatgaggaggagatgaatgctgagctcactgccaagaagcgcaagctggaagatgagtgctcagagctcaaaagggacatcgatgatctggagctgacactggccaaagtggagaaggagaaacacgcaacagagaacaaggtgaaaaacctgacagaggagatggctgggctggatgagatcattgccaagctgaccaaggagaagaaagctctgcaagaggcccaccaacaggctctggatgaccttcaggccgaggaggacaaggtcaacaccctgactaaggccaaagtcaagctggagcagcaagtggatgatctggaaggatccctggagcaagagaagaaggtgcgcatggacctggagcgagcgaagcggaagctggagggcgacctgaagctgacccaggagagcatcatggacctggagaatgacaagcagcagctggatgagcggctgaaaaaaaaagactttgagctgaatgctctcaacgcaaggattgaggatgaacaggccctcggcagccagctgcagaagaagctcaaggagcttcaggcacgcatcgaggagctggaggaggagctggaggccgagcgcaccgccagggctaaggtggagaagctgcgctcagacctgtctcgggagctggaggagatcagcgagcggctggaagaggccggcggggccacgtccgtgcagatcgagatgaacaagaagcgcgaggccgagttccagaagatgcggcgggacctggaggaggccacgctgcagcacgaggccactgccgcggccctgcgcaagaagcacgccgacagcgtggccgagctgggcgagcagatcgacaacctgcagcgggtgaagcagaagctggagaaggagaagagcgagttcaagctggagctggatgacgtcacctccaacatggagcagatcatcaaggccaaggctaacctggagaagatgtgccggaccttggaagaccagatgaatgagcaccggagcaaggcggaggagacccagcgttctgtcaacgacctcaccagccagcgggccaagttgcaaaccgagaatggtgagctgtcccggcagctggatgagaaggaggcactgatctcccagctgacccgaggcaagctcacctacacccagcagctggaggacctcaagaggcagctggaggaggaggttaaggcgaagaacgccctggcccacgcactgcagtcggcccggcatgactgcgacctgctgcgggagcagtacgaggaggagacggaggccaaggccgagctgcagcgcgtcctttccaaggccaactcggaggtggcccagtggaggaccaagtatgagacggacgccattcagcggactgaggagctcgaggaggccaagaagaagctggcccagcggctgcaggaagctgaggaggccgtggaggctgttaatgccaagtgctcctcgctggagaagaccaagcaccggctacagaatgagatcgaggacttgatggtggacgtagagcgctccaatgctgctgctgcagccctggacaagaagcagaggaacttcgacaagatcctggccgagtggaagcagaagtatgaggagtcgcagtcggagctggagtcctcgcagaaggaggctcgctccctcagcacagagctcttcaaactcaagaacgcctatgaggagtccctggaacatctggagaccttcaagcgggagaacaaaaacctgcaggaggagatctccgacttgactgagcagttgggttccagcggaaagactatccatgagctggagaaggtccgaaagcagctggaggccgagaagatggagctgcagtcagccctggaggaggccgaggcctccctggagcacgaggagggcaagatcctccgggcccagctggaaacaggccaagcgcaaccacctgcgggtggtggactcgctgcagacctccctggacgcagagacacgcagccgcaacgaggccctgagggtgaagaagaagatggaaggagacctcaatgagatggagatccagctcagccacgccaaccgcatggccgccgaggcccagaagcaagtcaagagcctccagagcttgttgaaggacacccagattcagctggacgatgcagtccgtgccaacgacgacctgaaggagaacatcgccatcgtggagcggcgcaacaacctgctgcaggctgagctggaggagttgcgtgccgtggtggagcagacagagcggtcccggaagctggcggagcaggagctgattgagactagtgagcgggtgcagctgctgcattcccagaacaccagcctcatcaaccagaagaagaagatggagtcggatctgacccagctccagtcggaagtggaggaggcagtgcaggagtgcagaaacg

SEQ ID NO: 734291 - DNA, 2994 bp, Homo sapiens
gggaaattcattcgaattcattttggggcaacaggaaagttggcatctgcagacatagagacctatcttctggaaaaatccagagttattttccagctgaaagcagagagagattatcacattttctaccaaatcctgtctaacaaaaagcctgagctgctggacatgctgctgatcaccaacaacccctacgattatgcattcatctcccaaggagagaccaccgtggcctccattgatgacgctgaggagctcatggccactgataacgcttttgatgtgctgggcttcacttcagaggagaaaaactccatgtataagctgacaggcgccatcatgcactttggaaacatgaagttcaagctgaagcagcgggaggagcaggcggagccagacggcactgaagaggctgacaagtctgcctacctcatggggctgaactcagccgacctgctcaaggggctgtgccaccctcgggtgaaagtgggcaatgagtacgtcaccaaggggcagaatgtccagcaggtgatatatgccactggggcactggccaaggcagtgtatgagaggatgttcaactggatggtgacgcgcatcaatgccaccctggagaccaagcagccacgccagtacttcataggagtcctggacatcgctggcttcgagatcttcgatttcaacagctttgagcagctctgcatcaacttcaccaacgagaagctgcagcagttcttcaaccaccacatgtttgtgctggagcaggaggagtacaagaaggagggcatcgagtggacattcattgactttggcatggacctgcaggcctgcattgacctcatcgagaagcccatgggcatcatgtccatcctggaagaggagtgcatgttccccaaggccaccgacatgaccttcaaggccaagctgtttgacaaccacctgggcaaatccgccaacttccagaagccacgcaatatcaaggggaagcctgaagcccacttctccctgatccactatgccggcatcgtggactacaacatcattggctggctgcagaagaacaaggatcctctcaatgagactgtcgtgggcttgtatcagaagtcttccctcaagctgctcagcaccctgtttgccaactatgctggggctgatgcgcctattgagaagggcaaaggcaaggccaagaaaggctcgtcctttcagactgtgtcagctctgcacagggaaaatctgaacaagctgatgaccaacttgcgctccacccatccccactttgtacgttgtatcatccctaatgagacaaagtctccaggggtgatggacaaccccctggtcatgcaccagctgcgctgcaatggtgtgctggagggcatccgcatctgcaggaaaggcttccccaaccgcatcctctacggggacttccggcagaggtatcgcatcctgaacccagcggccatccctgagggacagttcattgatagcaggaagggggcagagaagctgctcagctccctggacattgatcacaaccagtacaagtttggccacaccaaggtgttcttcaaggccgggctgctggggctgctggaggaaatgagggacgagaggctgagccgcatcatcacgcgtatccaggcccagtcccgaggtgtgctcgccagaatggagtacaaaaagctgctggaacgtagagactccctgctggtaatccagtggaacattcgggccttcatgggggtcaagaattggccctggatgaagctctacttcaagatcaagccgctgctgaagagtgcagaaagagagaaggagatggcctccatgaaggaggagttcacacgcctcaaagaggcgctagagaagtccgaggctcgccgcaaggagctggaggagaagatggtgtccctgctgcaggagaagaatgacctgcagctccaagtgcaggcggaacaagacaacctggcagatgctgaggagcgctgtgatcagctgatcaaaaacaagattcagctggaggccaaggtgaaggagatgaacgagaggctggaggatgaggaggagatgaatgctgagctcactgccaagaagcgcaagctggaagatgagtgctcagagctcaaaagggacatcgatgatctggagctgacactggccaaagtggagaaggagaaacacgcaacagagaacaaggtgaaaaacctgacagaggagatggctgggctggatgagatcattgccaagctgaccaaggagaagaaagctctgcaagaggcccaccaacaggctctggatgaccttcaggccgaggaggacaaggtcaacaccctgactaaggccaaagtcaagctggagcagcaagtggatgatctggaaggatccctggagcaagagaagaaggtgcgcatggacctggagcgagcgaagcggaagctggagggcgacctgaagctgacccaggagagcatcatggacctggagaatgacaagcagcagctggatgagcggctgaaaaaaaaagactttgagctgaatgctctcaacgcaaggattgaggatgaacaggccctcggcagccagctgcagaagaagctcaaggagcttcagcggcgcatcaaggagctcacctaccagacggaggaggacaggaaaaacctgctgcggctgcaggacctggtagacaagctgcagctaaaggtcaaggcctacaagcgccaggccgaggaggcggaggagcaagccaacaccaacctgtccaagttccgcaaggtgcagcacgagctggatgaggcagaggagcgggcggacatcgccgagtcccaggtcaacaagctgcgggccaagagccgtgacattggcacgaagggcttgaatgaggagtagctttgccacatcttgatctgctcagccctggaggtgccagcaaagccccatgctggagcctgtgtaacagctccttgggaggaagcagaataaagcaattttccttgaagccga

SEQ ID NO: 734292 - DNA, 3077 bp, Homo sapiens
gggaaattcattcgaattcattttggggcaacaggaaagttggcatctgcagacatagagacctatcttctggaaaaatccagagttattttccagctgaaagcagagagagattatcacattttctaccaaatcctgtctaacaaaaagcctgagctgctggacatgctgctgatcaccaacaacccctacgattatgcattcatctcccaaggagagaccaccgtggcctccattgatgacgctgaggagctcatggccactgataacgcttttgatgtgctgggcttcacttcagaggagaaaaactccatgtataagctgacaggcgccatcatgcactttggaaacatgaagttcaagctgaagcagcgggaggagcaggcggagccagacggcactgaagaggctgacaagtctgcctacctcatggggctgaactcagccgacctgctcaaggggctgtgccaccctcgggtgaaagtgggcaatgagtacgtcaccaaggggcagaatgtccagcaggtgatatatgccactggggcactggccaaggcagtgtatgagaggatgttcaactggatggtgacgcgcatcaatgccaccctggagaccaagcagccacgccagtacttcataggagtcctggacatcgctggcttcgagatcttcgatttcaacagctttgagcagctctgcatcaacttcaccaacgagaagctgcagcagttcttcaaccaccacatgtttgtgctggagcaggaggagtacaagaaggagggcatcgagtggacattcattgactttggcatggacctgcaggcctgcattgacctcatcgagaagcccatgggcatcatgtccatcctggaagaggagtgcatgttccccaaggccaccgacatgaccttcaaggccaagctgtttgacaaccacctgggcaaatccgccaacttccagaagccacgcaatatcaaggggaagcctgaagcccacttctccctgatccactatgccggcatcgtggactacaacatcattggctggctgcagaagaacaaggatcctctcaatgagactgtcgtgggcttgtatcagaagtcttccctcaagctgctcagcaccctgtttgccaactatgctggggctgatgcgcctattgagaagggcaaaggcaaggccaagaaaggctcgtcctttcagactgtgtcagctctgcacagggaaaatctgaacaagctgatgaccaacttgcgctccacccatccccactttgtacgttgtatcatccctaatgagacaaagtctccaggggtgatggacaaccccctggtcatgcaccagctgcgctgcaatggtgtgctggagggcatccgcatctgcaggaaaggcttccccaaccgcatcctctacggggacttccggcagaggtatcgcatcctgaacccagcggccatccctgagggacagttcattgatagcaggaagggggcagagaagctgctcagctccctggacattgatcacaaccagtacaagtttggccacaccaaggtgttcttcaaggccgggctgctggggctgctggaggaaatgagggacgagaggctgagccgcatcatcacgcgtatccaggcccagtcccgaggtgtgctcgccagaatggagtacaaaaagctgctggaacgtagagactccctgctggtaatccagtggaacattcgggccttcatgggggtcaagaattggccctggatgaagctctacttcaagatcaagccgctgctgaagagtgcagaaagagagaaggagatggcctccatgaaggaggagttcacacgcctcaaagaggcgctagagaagtccgaggctcgccgcaaggagctggaggagaagatggtgtccctgctgcaggagaagaatgacctgcagctccaagtgcaggcggaacaagacaacctggcagatgctgaggagcgctgtgatcagctgatcaaaaacaagattcagctggaggccaaggtgaaggagatgaacgagaggctggaggatgaggaggagatgaatgctgagctcactgccaagaagcgcaagctggaagatgagtgctcagagctcaaaagggacatcgatgatctggagctgacactggccaaagtggagaaggagaaacacgcaacagagaacaaggtgaaaaacctgacagaggagatggctgggctggatgagatcattgccaagctgaccaaggagaagaaagctctgcaagaggcccaccaacaggctctggatgaccttcaggccgaggaggacaaggtcaacaccctgactaaggccaaagtcaagctggagcagcaagtggatgatctggaaggatccctggagcaagagaagaaggtgcgcatggacctggagcgagcgaagcggaagctggagggcgacctgaagctgacccaggagagcatcatggacctggagaatgacaagcagcagctggatgagcggctgaaaaaaaaagactttgagctgaatgctctcaacgcaaggattgaggatgaacaggccctcggcagccagctgcagaagaagctcaaggagcttcagcgcgggtgcgggagctggagaatgagctggaggccgagcagaagcgcaacgcagagtcggtgaagggcatgaggaagagcgagcggcgcatcaaggagctcacctaccagacggaggaggacaggaaaaacctgctgcggctgcaggacctggtagacaagctgcagctaaaggtcaaggcctacaagcgccaggccgaggaggcggaggagcaagccaacaccaacctgtccaagttccgcaaggtgcagcacgagctggatgaggcagaggagcgggcggacatcgccgagtcccaggtcaacaagctgcgggccaagagccgtgacattggcacgaagggcttgaatgaggagtagctttgccacatcttgatctgctcagccctggaggtgccagcaaagccccatgctggagcctgtgtaacagctccttgggaggaagcagaataaagcaattttccttgaagccga

SEQ ID NO: 734293 - DNA, 3153 bp, Homo sapiens
gggaaattcattcgaattcattttggggcaacaggaaagttggcatctgcagacatagagacctatcttctggaaaaatccagagttattttccagctgaaagcagagagagattatcacattttctaccaaatcctgtctaacaaaaagcctgagctgctggacatgctgctgatcaccaacaacccctacgattatgcattcatctcccaaggagagaccaccgtggcctccattgatgacgctgaggagctcatggccactgataacgcttttgatgtgctgggcttcacttcagaggagaaaaactccatgtataagctgacaggcgccatcatgcactttggaaacatgaagttcaagctgaagcagcgggaggagcaggcggagccagacggcactgaagaggctgacaagtctgcctacctcatggggctgaactcagccgacctgctcaaggggctgtgccaccctcgggtgaaagtgggcaatgagtacgtcaccaaggggcagaatgtccagcaggtgatatatgccactggggcactggccaaggcagtgtatgagaggatgttcaactggatggtgacgcgcatcaatgccaccctggagaccaagcagccacgccagtacttcataggagtcctggacatcgctggcttcgagatcttcgatttcaacagctttgagcagctctgcatcaacttcaccaacgagaagctgcagcagttcttcaaccaccacatgtttgtgctggagcaggaggagtacaagaaggagggcatcgagtggacattcattgactttggcatggacctgcaggcctgcattgacctcatcgagaagcccatgggcatcatgtccatcctggaagaggagtgcatgttccccaaggccaccgacatgaccttcaaggccaagctgtttgacaaccacctgggcaaatccgccaacttccagaagccacgcaatatcaaggggaagcctgaagcccacttctccctgatccactatgccggcatcgtggactacaacatcattggctggctgcagaagaacaaggatcctctcaatgagactgtcgtgggcttgtatcagaagtcttccctcaagctgctcagcaccctgtttgccaactatgctggggctgatgcgcctattgagaagggcaaaggcaaggccaagaaaggctcgtcctttcagactgtgtcagctctgcacagggaaaatctgaacaagctgatgaccaacttgcgctccacccatccccactttgtacgttgtatcatccctaatgagacaaagtctccaggggtgatggacaaccccctggtcatgcaccagctgcgctgcaatggtgtgctggagggcatccgcatctgcaggaaaggcttccccaaccgcatcctctacggggacttccggcagaggtatcgcatcctgaacccagcggccatccctgagggacagttcattgatagcaggaagggggcagagaagctgctcagctccctggacattgatcacaaccagtacaagtttggccacaccaaggtgttcttcaaggccgggctgctggggctgctggaggaaatgagggacgagaggctgagccgcatcatcacgcgtatccaggcccagtcccgaggtgtgctcgccagaatggagtacaaaaagctgctggaacgtagagactccctgctggtaatccagtggaacattcgggccttcatgggggtcaagaattggccctggatgaagctctacttcaagatcaagccgctgctgaagagtgcagaaagagagaaggagatggcctccatgaaggaggagttcacacgcctcaaagaggcgctagagaagtccgaggctcgccgcaaggagctggaggagaagatggtgtccctgctgcaggagaagaatgacctgcagctccaagtgcaggcggaacaagacaacctggcagatgctgaggagcgctgtgatcagctgatcaaaaacaagattcagctggaggccaaggtgaaggagatgaacgagaggctggaggatgaggaggagatgaatgctgagctcactgccaagaagcgcaagctggaagatgagtgctcagagctcaaaagggacatcgatgatctggagctgacactggccaaagtggagaaggagaaacacgcaacagagaacaaggtgaaaaacctgacagaggagatggctgggctggatgagatcattgccaagctgaccaaggagaagaaagctctgcaagaggcccaccaacaggctctggatgaccttcaggccgaggaggacaaggtcaacaccctgactaaggccaaagtcaagctggagcagcaagtggatgatctggaaggatccctggagcaagagaagaaggtgcgcatggacctggagcgagcgaagcggaagctggagggcgacctgaagctgacccaggagagcatcatggacctggagaatgacaagcagcagctggatgagcggctgaaaaaaaaagactttgagctgaatgctctcaacgcaaggattgaggatgaacaggccctcggcagccagctgcagaagaagctcaaggagcttcagcgcgggtgcgggagctggagaatgagctggaggccgagcagaagcgcaacgcagagtcggtgaagggcatgaggaagagcgagcggcgcatcaaggagctcacctaccagacggaggaggacaggaaaaacctgctgcggctgcaggacctggtagacaagctgcagctaaaggtcaaggcctacaagcgccaggccgaggaggcggaggagcaagccaacaccaacctgtccaagttccgcaaggtgcagcacgagctggatgaggcagaggagcgggcggacatcgccgagtcccaggtcaacaagctgcgggccaagagccgtgacattggcacgaagagatgcggtttcaccatgttggccaggctggtcttgaactcctgaccttgtgatccactcgcctcagcctcccaaaggcttgaatgaggagtagctttgccacatcttgatctgctcagccctggaggtgccagcaaagccccatgctggagcctgtgtaacagctccttgggaggaagcagaataaagcaattttccttgaagccga

SEQ ID NO: 734294 - DNA, 2892 bp, Homo sapiens
gggaaattcattcgaattcattttggggcaacaggaaagttggcatctgcagacatagagacctatcttctggaaaaatccagagttattttccagctgaaagcagagagagattatcacattttctaccaaatcctgtctaacaaaaagcctgagctgctggacatgctgctgatcaccaacaacccctacgattatgcattcatctcccaaggagagaccaccgtggcctccattgatgacgctgaggagctcatggccactgataacgcttttgatgtgctgggcttcacttcagaggagaaaaactccatgtataagctgacaggcgccatcatgcactttggaaacatgaagttcaagctgaagcagcgggaggagcaggcggagccagacggcactgaagaggctgacaagtctgcctacctcatggggctgaactcagccgacctgctcaaggggctgtgccaccctcgggtgaaagtgggcaatgagtacgtcaccaaggggcagaatgtccagcaggtgatatatgccactggggcactggccaaggcagtgtatgagaggatgttcaactggatggtgacgcgcatcaatgccaccctggagaccaagcagccacgccagtacttcataggagtcctggacatcgctggcttcgagatcttcgatttcaacagctttgagcagctctgcatcaacttcaccaacgagaagctgcagcagttcttcaaccaccacatgtttgtgctggagcaggaggagtacaagaaggagggcatcgagtggacattcattgactttggcatggacctgcaggcctgcattgacctcatcgagaagcccatgggcatcatgtccatcctggaagaggagtgcatgttccccaaggccaccgacatgaccttcaaggccaagctgtttgacaaccacctgggcaaatccgccaacttccagaagccacgcaatatcaaggggaagcctgaagcccacttctccctgatccactatgccggcatcgtggactacaacatcattggctggctgcagaagaacaaggatcctctcaatgagactgtcgtgggcttgtatcagaagtcttccctcaagctgctcagcaccctgtttgccaactatgctggggctgatgcgcctattgagaagggcaaaggcaaggccaagaaaggctcgtcctttcagactgtgtcagctctgcacagggaaaatctgaacaagctgatgaccaacttgcgctccacccatccccactttgtacgttgtatcatccctaatgagacaaagtctccaggggtgatggacaaccccctggtcatgcaccagctgcgctgcaatggtgtgctggagggcatccgcatctgcaggaaaggcttccccaaccgcatcctctacggggacttccggcagaggtatcgcatcctgaacccagcggccatccctgagggacagttcattgatagcaggaagggggcagagaagctgctcagctccctggacattgatcacaaccagtacaagtttggccacaccaaggtgttcttcaaggccgggctgctggggctgctggaggaaatgagggacgagaggctgagccgcatcatcacgcgtatccaggcccagtcccgaggtgtgctcgccagaatggagtacaaaaagctgctggaacgtagagactccctgctggtaatccagtggaacattcgggccttcatgggggtcaagaattggccctggatgaagctctacttcaagatcaagccgctgctgaagagtgcagaaagagagaaggagatggcctccatgaaggaggagttcacacgcctcaaagaggcgctagagaagtccgaggctcgccgcaaggagctggaggagaagatggtgtccctgctgcaggagaagaatgacctgcagctccaagtgcaggcggaacaagacaacctggcagatgctgaggagcgctgtgatcagctgatcaaaaacaagattcagctggaggccaaggtgaaggagatgaacgagaggctggaggatgaggaggagatgaatgctgagctcactgccaagaagcgcaagctggaagatgagtgctcagagctcaaaagggacatcgatgatctggagctgacactggccaaagtggagaaggagaaacacgcaacagagaacaaggtgaaaaacctgacagaggagatggctgggctggatgagatcattgccaagctgaccaaggagaagaaagctctgcaagaggcccaccaacaggctctggatgaccttcaggccgaggaggacaaggtcaacaccctgactaaggccaaagtcaagctggagcagcaagtggatgatctggaaggatccctggagcaagagaagaaggtgcgcatggacctggagcgagcgaagcggaagctggagggcgacctgaagctgacccaggagagcatcatggacctggagaatgacaagcagcagctggatgagcggctgaaaaaaaaagactttgagctgaatgctctcaacgcaaggattgaggatgaacaggccctcggcagccagctgcagaagaagctcaaggagcttcaggcacgcatcgaggagctggaggaggagctggaggccgagcgcaccgccagggctaaggtggagaagctgcgctcagacctgtctcgggagcgggcggacatcgccgagtcccaggtcaacaagctgcgggccaagagccgtgacattggcacgaagggcttgaatgaggagtagctttgccacatcttgatctgctcagccctggaggtgccagcaaagccccatgctggagcctgtgtaacagctccttgggaggaagcagaataaagcaattttccttgaagccga

SEQ ID NO: 734295 - DNA, 2912 bp, Homo sapiens
acctccccacactgatgcttcttttgttgactctccttcctgcagctattgagaagggcaaaggcaaggccaagaaaggctcgtcctttcagactgtgtcagctctgcacagggaaaatctgaacaagctgatgaccaacttgcgctccacccatccccactttgtacgttgtatcatccctaatgagacaaagtctccaggggtgatggacaaccccctggtcatgcaccagctgcgctgcaatggtgtgctggagggcatccgcatctgcaggaaaggcttccccaaccgcatcctctacggggacttccggcagaggtatcgcatcctgaacccagcggccatccctgagggacagttcattgatagcaggaagggggcagagaagctgctcagctccctggacattgatcacaaccagtacaagtttggccacaccaaggtgttcttcaaggccgggctgctggggctgctggaggaaatgagggacgagaggctgagccgcatcatcacgcgtatccaggcccagtcccgaggtgtgctcgccagaatggagtacaaaaagctgctggaacgtagagactccctgctggtaatccagtggaacattcgggccttcatgggggtcaagaattggccctggatgaagctctacttcaagatcaagccgctgctgaagagtgcagaaagagagaaggagatggcctccatgaaggaggagttcacacgcctcaaagaggcgctagagaagtccgaggctcgccgcaaggagctggaggagaagatggtgtccctgctgcaggagaagaatgacctgcagctccaagtgcaggcggaacaagacaacctggcagatgctgaggagcgctgtgatcagctgatcaaaaacaagattcagctggaggccaaggtgaaggagatgaacgagaggctggaggatgaggaggagatgaatgctgagctcactgccaagaagcgcaagctggaagatgagtgctcagagctcaaaagggacatcgatgatctggagctgacactggccaaagtggagaaggagaaacacgcaacagagaacaaggtgaaaaacctgacagaggagatggctgggctggatgagatcattgccaagctgaccaaggagaagaaagctctgcaagaggcccaccaacaggctctggatgaccttcaggccgaggaggacaaggtcaacaccctgactaaggccaaagtcaagctggagcagcaagtggatgatctggaaggatccctggagcaagagaagaaggtgcgcatggacctggagcgagcgaagcggaagctggagggcgacctgaagctgacccaggagagcatcatggacctggagaatgacaagcagcagctggatgagcggctgaaaaaaaaagactttgagctgaatgctctcaacgcaaggattgaggatgaacaggccctcggcagccagctgcagaagaagctcaaggagcttcaggcacgcatcgaggagctggaggaggagctggaggccgagcgcaccgccagggctaaggtggagaagctgcgctcagacctgtctcgggagctggaggagatcagcgagcggctggaagaggccggcggggccacgtccgtgcagatcgagatgaacaagaagcgcgaggccgagttccagaagatgcggcgggacctggaggaggccacgctgcagcacgaggccactgccgcggccctgcgcaagaagcacgccgacagcgtggccgagctgggcgagcagatcgacaacctgcagcgggtgaagcagaagctggagaaggagaagagcgagttcaagctggagctggatgacgtcacctccaacatggagcagatcatcaaggccaaggccaaccgcatggccgccgaggcccagaagcaagtcaagagcctccagagcttgttgaaggacacccagattcagctggacgatgcagtccgtgccaacgacgacctgaaggagaacatcgccatcgtggagcggcgcaacaacctgctgcaggctgagctggaggagttgcgtgccgtggtggagcagacagagcggtcccggaagctggcggagcaggagctgattgagactagtgagcgggtgcagctgctgcattcccagaacaccagcctcatcaaccagaagaagaagatggatgctgacctgtcccagctccagactgaagtggaggaggcagtgcaggagtgcaggaatgctgaggagaaggccaagaaggccatcacggatgccgccatgatggcagaggagctgaagaaggagcaggacaccagcgcccacctggagcgcatgaagaagaacatggaacagaccattaaggacctgcagcaccggctggacgaagccgagcagatcgccctcaagggcggcaagaagcagctgcagaagctggaagcgcgggtgcgggagctggagaatgagctggaggccgagcagaagcgcaacgcagagtcggtgaagggcatgaggaagagcgagcggcgcatcaaggagctcacctaccagacggaggaggacaggaaaaacctgctgcggctgcaggacctggtagacaagctgcagctaaaggtcaaggcctacaagcgccaggccgaggaggcggaggagcaagccaacaccaacctgtccaagttccgcaaggtgcagcacgagctggatgaggcagaggagcgggcggacatcgccgagtcccaggtcaacaagctgcgggccaagagccgtgacattggcacgaagggcttgaatgaggagtagctttgccacatcttgatctgctcagccctggaggtgccagcaaagccccatgctggagcctgtgtaacagctccttgggaggaagcagaataaagcaattttccttgaagccga

SEQ ID NO: 734296 - DNA, 2988 bp, Homo sapiens
acctccccacactgatgcttcttttgttgactctccttcctgcagctattgagaagggcaaaggcaaggccaagaaaggctcgtcctttcagactgtgtcagctctgcacagggaaaatctgaacaagctgatgaccaacttgcgctccacccatccccactttgtacgttgtatcatccctaatgagacaaagtctccaggggtgatggacaaccccctggtcatgcaccagctgcgctgcaatggtgtgctggagggcatccgcatctgcaggaaaggcttccccaaccgcatcctctacggggacttccggcagaggtatcgcatcctgaacccagcggccatccctgagggacagttcattgatagcaggaagggggcagagaagctgctcagctccctggacattgatcacaaccagtacaagtttggccacaccaaggtgttcttcaaggccgggctgctggggctgctggaggaaatgagggacgagaggctgagccgcatcatcacgcgtatccaggcccagtcccgaggtgtgctcgccagaatggagtacaaaaagctgctggaacgtagagactccctgctggtaatccagtggaacattcgggccttcatgggggtcaagaattggccctggatgaagctctacttcaagatcaagccgctgctgaagagtgcagaaagagagaaggagatggcctccatgaaggaggagttcacacgcctcaaagaggcgctagagaagtccgaggctcgccgcaaggagctggaggagaagatggtgtccctgctgcaggagaagaatgacctgcagctccaagtgcaggcggaacaagacaacctggcagatgctgaggagcgctgtgatcagctgatcaaaaacaagattcagctggaggccaaggtgaaggagatgaacgagaggctggaggatgaggaggagatgaatgctgagctcactgccaagaagcgcaagctggaagatgagtgctcagagctcaaaagggacatcgatgatctggagctgacactggccaaagtggagaaggagaaacacgcaacagagaacaaggtgaaaaacctgacagaggagatggctgggctggatgagatcattgccaagctgaccaaggagaagaaagctctgcaagaggcccaccaacaggctctggatgaccttcaggccgaggaggacaaggtcaacaccctgactaaggccaaagtcaagctggagcagcaagtggatgatctggaaggatccctggagcaagagaagaaggtgcgcatggacctggagcgagcgaagcggaagctggagggcgacctgaagctgacccaggagagcatcatggacctggagaatgacaagcagcagctggatgagcggctgaaaaaaaaagactttgagctgaatgctctcaacgcaaggattgaggatgaacaggccctcggcagccagctgcagaagaagctcaaggagcttcaggcacgcatcgaggagctggaggaggagctggaggccgagcgcaccgccagggctaaggtggagaagctgcgctcagacctgtctcgggagctggaggagatcagcgagcggctggaagaggccggcggggccacgtccgtgcagatcgagatgaacaagaagcgcgaggccgagttccagaagatgcggcgggacctggaggaggccacgctgcagcacgaggccactgccgcggccctgcgcaagaagcacgccgacagcgtggccgagctgggcgagcagatcgacaacctgcagcgggtgaagcagaagctggagaaggagaagagcgagttcaagctggagctggatgacgtcacctccaacatggagcagatcatcaaggccaaggccaaccgcatggccgccgaggcccagaagcaagtcaagagcctccagagcttgttgaaggacacccagattcagctggacgatgcagtccgtgccaacgacgacctgaaggagaacatcgccatcgtggagcggcgcaacaacctgctgcaggctgagctggaggagttgcgtgccgtggtggagcagacagagcggtcccggaagctggcggagcaggagctgattgagactagtgagcgggtgcagctgctgcattcccagaacaccagcctcatcaaccagaagaagaagatggatgctgacctgtcccagctccagactgaagtggaggaggcagtgcaggagtgcaggaatgctgaggagaaggccaagaaggccatcacggatgccgccatgatggcagaggagctgaagaaggagcaggacaccagcgcccacctggagcgcatgaagaagaacatggaacagaccattaaggacctgcagcaccggctggacgaagccgagcagatcgccctcaagggcggcaagaagcagctgcagaagctggaagcgcgggtgcgggagctggagaatgagctggaggccgagcagaagcgcaacgcagagtcggtgaagggcatgaggaagagcgagcggcgcatcaaggagctcacctaccagacggaggaggacaggaaaaacctgctgcggctgcaggacctggtagacaagctgcagctaaaggtcaaggcctacaagcgccaggccgaggaggcggaggagcaagccaacaccaacctgtccaagttccgcaaggtgcagcacgagctggatgaggcagaggagcgggcggacatcgccgagtcccaggtcaacaagctgcgggccaagagccgtgacattggcacgaagagatgcggtttcaccatgttggccaggctggtcttgaactcctgaccttgtgatccactcgcctcagcctcccaaaggcttgaatgaggagtagctttgccacatcttgatctgctcagccctggaggtgccagcaaagccccatgctggagcctgtgtaacagctccttgggaggaagcagaataaagcaattttccttgaagccga

SEQ ID NO: 734297 - DNA, 2241 bp, Homo sapiens
acctccccacactgatgcttcttttgttgactctccttcctgcagctattgagaagggcaaaggcaaggccaagaaaggctcgtcctttcagactgtgtcagctctgcacagggaaaatctgaacaagctgatgaccaacttgcgctccacccatccccactttgtacgttgtatcatccctaatgagacaaagtctccaggggtgatggacaaccccctggtcatgcaccagctgcgctgcaatggtgtgctggagggcatccgcatctgcaggaaaggcttccccaaccgcatcctctacggggacttccggcagaggtatcgcatcctgaacccagcggccatccctgagggacagttcattgatagcaggaagggggcagagaagctgctcagctccctggacattgatcacaaccagtacaagtttggccacaccaaggtgttcttcaaggccgggctgctggggctgctggaggaaatgagggacgagaggctgagccgcatcatcacgcgtatccaggcccagtcccgaggtgtgctcgccagaatggagtacaaaaagctgctggaacgtagagactccctgctggtaatccagtggaacattcgggccttcatgggggtcaagaattggccctggatgaagctctacttcaagatcaagccgctgctgaagagtgcagaaagagagaaggagatggcctccatgaaggaggagttcacacgcctcaaagaggcgctagagaagtccgaggctcgccgcaaggagctggaggagaagatggtgtccctgctgcaggagaagaatgacctgcagctccaagtgcaggcggaacaagacaacctggcagatgctgaggagcgctgtgatcagctgatcaaaaacaagattcagctggaggccaaggtgaaggagatgaacgagaggctggaggatgaggaggagatgaatgctgagctcactgccaagaagcgcaagctggaagatgagtgctcagagctcaaaagggacatcgatgatctggagctgacactggccaaagtggagaaggagaaacacgcaacagagaacaaggtgaaaaacctgacagaggagatggctgggctggatgagatcattgccaagctgaccaaggagaagaaagctctgcaagaggcccaccaacaggctctggatgaccttcaggccgaggaggacaaggtcaacaccctgactaaggccaaagtcaagctggagcagcaagtggatgatctggaaggatccctggagcaagagaagaaggtgcgcatggacctggagcgagcgaagcggaagctggagggcgacctgaagctgacccaggagagcatcatggacctggagaatgacaagcagcagctggatgagcggctgaaaaaaaaagactttgagctgaatgctctcaacgcaaggattgaggatgaacaggccctcggcagccagctgcagaagaagctcaaggagcttcaggcacgcatcgaggagctggaggaggagctggaggccgagcgcaccgccagggctaaggtggagaagctgcgctcagacctgtctcgggagctggaggagatcagcgagcggctggaagaggccggcggggccacgtccgtgcagatcgagatgaacaagaagcgcgaggccgagttccagaagatgcggcgggacctggaggaggccacgctgcagcacgaggccactgccgcggccctgcgcaagaagcacgccgacagcgtggccgagctgggcgagcagatcgacaacctgcagcgggtgaagcagaagctggagaaggagaagagcgagttcaagctggagctggatgacgtcacctccaacatggagcagatcatcaaggccaaggccaaccgcatggccgccgaggcccagaagcaagtcaagagcctccagagcttgttgaaggacacccagattcagctggacgatgcagtccgtgccaacgacgacctgaaggagaacatcgccatcgtggagcggcgcaacaacctgctgcaggctgagctggaggagttgcgtgccgtggtggagcagacagagcggtcccggaagctggcggagcaggagctgattgagactagtgagcgggtgcagctgctgcattcccagaacaccagcctcatcaaccagaagaagaagatggagtcggatctgacccagctccagtcggaagtggaggaggcagtgcaggagtgcagaaacg

SEQ ID NO: 734298 - DNA, 2405 bp, Homo sapiens
acctccccacactgatgcttcttttgttgactctccttcctgcagctattgagaagggcaaaggcaaggccaagaaaggctcgtcctttcagactgtgtcagctctgcacagggaaaatctgaacaagctgatgaccaacttgcgctccacccatccccactttgtacgttgtatcatccctaatgagacaaagtctccaggggtgatggacaaccccctggtcatgcaccagctgcgctgcaatggtgtgctggagggcatccgcatctgcaggaaaggcttccccaaccgcatcctctacggggacttccggcagaggtatcgcatcctgaacccagcggccatccctgagggacagttcattgatagcaggaagggggcagagaagctgctcagctccctggacattgatcacaaccagtacaagtttggccacaccaaggtgttcttcaaggccgggctgctggggctgctggaggaaatgagggacgagaggctgagccgcatcatcacgcgtatccaggcccagtcccgaggtgtgctcgccagaatggagtacaaaaagctgctggaacgtagagactccctgctggtaatccagtggaacattcgggccttcatgggggtcaagaattggccctggatgaagctctacttcaagatcaagccgctgctgaagagtgcagaaagagagaaggagatggcctccatgaaggaggagttcacacgcctcaaagaggcgctagagaagtccgaggctcgccgcaaggagctggaggagaagatggtgtccctgctgcaggagaagaatgacctgcagctccaagtgcaggcggaacaagacaacctggcagatgctgaggagcgctgtgatcagctgatcaaaaacaagattcagctggaggccaaggtgaaggagatgaacgagaggctggaggatgaggaggagatgaatgctgagctcactgccaagaagcgcaagctggaagatgagtgctcagagctcaaaagggacatcgatgatctggagctgacactggccaaagtggagaaggagaaacacgcaacagagaacaaggtgaaaaacctgacagaggagatggctgggctggatgagatcattgccaagctgaccaaggagaagaaagctctgcaagaggcccaccaacaggctctggatgaccttcaggccgaggaggacaaggtcaacaccctgactaaggccaaagtcaagctggagcagcaagtggatgatctggaaggatccctggagcaagagaagaaggtgcgcatggacctggagcgagcgaagcggaagctggagggcgacctgaagctgacccaggagagcatcatggacctggagaatgacaagcagcagctggatgagcggctgaaaaaaaaagactttgagctgaatgctctcaacgcaaggattgaggatgaacaggccctcggcagccagctgcagaagaagctcaaggagcttcaggcacgcatcgaggagctggaggaggagctggaggccgagcgcaccgccagggctaaggtggagaagctgcgctcagacctgtctcgggagctggcggagcaggagctgattgagactagtgagcgggtgcagctgctgcattcccagaacaccagcctcatcaaccagaagaagaagatggatgctgacctgtcccagctccagactgaagtggaggaggcagtgcaggagtgcaggaatgctgaggagaaggccaagaaggccatcacggatgccgccatgatggcagaggagctgaagaaggagcaggacaccagcgcccacctggagcgcatgaagaagaacatggaacagaccattaaggacctgcagcaccggctggacgaagccgagcagatcgccctcaagggcggcaagaagcagctgcagaagctggaagcgcgggtgcgggagctggagaatgagctggaggccgagcagaagcgcaacgcagagtcggtgaagggcatgaggaagagcgagcggcgcatcaaggagctcacctaccagacggaggaggacaggaaaaacctgctgcggctgcaggacctggtagacaagctgcagctaaaggtcaaggcctacaagcgccaggccgaggaggcggaggagcaagccaacaccaacctgtccaagttccgcaaggtgcagcacgagctggatgaggcagaggagcgggcggacatcgccgagtcccaggtcaacaagctgcgggccaagagccgtgacattggcacgaagggcttgaatgaggagtagctttgccacatcttgatctgctcagccctggaggtgccagcaaagccccatgctggagcctgtgtaacagctccttgggaggaagcagaataaagcaattttccttgaagccga

SEQ ID NO: 734299 - DNA, 2481 bp, Homo sapiens
acctccccacactgatgcttcttttgttgactctccttcctgcagctattgagaagggcaaaggcaaggccaagaaaggctcgtcctttcagactgtgtcagctctgcacagggaaaatctgaacaagctgatgaccaacttgcgctccacccatccccactttgtacgttgtatcatccctaatgagacaaagtctccaggggtgatggacaaccccctggtcatgcaccagctgcgctgcaatggtgtgctggagggcatccgcatctgcaggaaaggcttccccaaccgcatcctctacggggacttccggcagaggtatcgcatcctgaacccagcggccatccctgagggacagttcattgatagcaggaagggggcagagaagctgctcagctccctggacattgatcacaaccagtacaagtttggccacaccaaggtgttcttcaaggccgggctgctggggctgctggaggaaatgagggacgagaggctgagccgcatcatcacgcgtatccaggcccagtcccgaggtgtgctcgccagaatggagtacaaaaagctgctggaacgtagagactccctgctggtaatccagtggaacattcgggccttcatgggggtcaagaattggccctggatgaagctctacttcaagatcaagccgctgctgaagagtgcagaaagagagaaggagatggcctccatgaaggaggagttcacacgcctcaaagaggcgctagagaagtccgaggctcgccgcaaggagctggaggagaagatggtgtccctgctgcaggagaagaatgacctgcagctccaagtgcaggcggaacaagacaacctggcagatgctgaggagcgctgtgatcagctgatcaaaaacaagattcagctggaggccaaggtgaaggagatgaacgagaggctggaggatgaggaggagatgaatgctgagctcactgccaagaagcgcaagctggaagatgagtgctcagagctcaaaagggacatcgatgatctggagctgacactggccaaagtggagaaggagaaacacgcaacagagaacaaggtgaaaaacctgacagaggagatggctgggctggatgagatcattgccaagctgaccaaggagaagaaagctctgcaagaggcccaccaacaggctctggatgaccttcaggccgaggaggacaaggtcaacaccctgactaaggccaaagtcaagctggagcagcaagtggatgatctggaaggatccctggagcaagagaagaaggtgcgcatggacctggagcgagcgaagcggaagctggagggcgacctgaagctgacccaggagagcatcatggacctggagaatgacaagcagcagctggatgagcggctgaaaaaaaaagactttgagctgaatgctctcaacgcaaggattgaggatgaacaggccctcggcagccagctgcagaagaagctcaaggagcttcaggcacgcatcgaggagctggaggaggagctggaggccgagcgcaccgccagggctaaggtggagaagctgcgctcagacctgtctcgggagctggcggagcaggagctgattgagactagtgagcgggtgcagctgctgcattcccagaacaccagcctcatcaaccagaagaagaagatggatgctgacctgtcccagctccagactgaagtggaggaggcagtgcaggagtgcaggaatgctgaggagaaggccaagaaggccatcacggatgccgccatgatggcagaggagctgaagaaggagcaggacaccagcgcccacctggagcgcatgaagaagaacatggaacagaccattaaggacctgcagcaccggctggacgaagccgagcagatcgccctcaagggcggcaagaagcagctgcagaagctggaagcgcgggtgcgggagctggagaatgagctggaggccgagcagaagcgcaacgcagagtcggtgaagggcatgaggaagagcgagcggcgcatcaaggagctcacctaccagacggaggaggacaggaaaaacctgctgcggctgcaggacctggtagacaagctgcagctaaaggtcaaggcctacaagcgccaggccgaggaggcggaggagcaagccaacaccaacctgtccaagttccgcaaggtgcagcacgagctggatgaggcagaggagcgggcggacatcgccgagtcccaggtcaacaagctgcgggccaagagccgtgacattggcacgaagagatgcggtttcaccatgttggccaggctggtcttgaactcctgaccttgtgatccactcgcctcagcctcccaaaggcttgaatgaggagtagctttgccacatcttgatctgctcagccctggaggtgccagcaaagccccatgctggagcctgtgtaacagctccttgggaggaagcagaataaagcaattttccttgaagccga

SEQ ID NO: 734300 - DNA, 4023 bp, Homo sapiens
gggaaattcattcgaattcattttggggcaacaggaaagttggcatctgcagacatagagacctatcttctggaaaaatccagagttattttccagctgaaagcagagagagattatcacattttctaccaaatcctgtctaacaaaaagcctgagctgctggacatgctgctgatcaccaacaacccctacgattatgcattcatctcccaaggagagaccaccgtggcctccattgatgacgctgaggagctcatggccactgataacgcttttgatgtgctgggcttcacttcagaggagaaaaactccatgtataagctgacaggcgccatcatgcactttggaaacatgaagttcaagctgaagcagcgggaggagcaggcggagccagacggcactgaagaggctgacaagtctgcctacctcatggggctgaactcagccgacctgctcaaggggctgtgccaccctcgggtgaaagtgggcaatgagtacgtcaccaaggggcagaatgtccagcaggtgatatatgccactggggcactggccaaggcagtgtatgagaggatgttcaactggatggtgacgcgcatcaatgccaccctggagaccaagcagccacgccagtacttcataggagtcctggacatcgctggcttcgagatcttcgatttcaacagctttgagcagctctgcatcaacttcaccaacgagaagctgcagcagttcttcaaccaccacatgtttgtgctggagcaggaggagtacaagaaggagggcatcgagtggacattcattgactttggcatggacctgcaggcctgcattgacctcatcgagaagcccatgggcatcatgtccatcctggaagaggagtgcatgttccccaaggccaccgacatgaccttcaaggccaagctgtttgacaaccacctgggcaaatccgccaacttccagaagccacgcaatatcaaggggaagcctgaagcccacttctccctgatccactatgccggcatcgtggactacaacatcattggctggctgcagaagaacaaggatcctctcaatgagactgtcgtgggcttgtatcagaagtcttccctcaagctgctcagcaccctgtttgccaactatgctggggctgatgcgcctattgagaagggcaaaggcaaggccaagaaaggctcgtcctttcagactgtgtcagctctgcacagggaaaatctgaacaagctgatgaccaacttgcgctccacccatccccactttgtacgttgtatcatccctaatgagacaaagtctccaggggtgatggacaaccccctggtcatgcaccagctgcgctgcaatggtgtgctggagggcatccgcatctgcaggaaaggcttccccaaccgcatcctctacggggacttccggcagaggtatcgcatcctgaacccagcggccatccctgagggacagttcattgatagcaggaagggggcagagaagctgctcagctccctggacattgatcacaaccagtacaagtttggccacaccaaggtgttcttcaaggccgggctgctggggctgctggaggaaatgagggacgagaggctgagccgcatcatcacgcgtatccaggcccagtcccgaggtgtgctcgccagaatggagtacaaaaagctgctggaacgtagagactccctgctggtaatccagtggaacattcgggccttcatgggggtcaagaattggccctggatgaagctctacttcaagatcaagccgctgctgaagagtgcagaaagagagaaggagatggcctccatgaaggaggagttcacacgcctcaaagaggcgctagagaagtccgaggctcgccgcaaggagctggaggagaagatggtgtccctgctgcaggagaagaatgacctgcagctccaagtgcaggcggaacaagacaacctggcagatgctgaggagcgctgtgatcagctgatcaaaaacaagattcagctggaggccaaggtgaaggagatgaacgagaggctggaggatgaggaggagatgaatgctgagctcactgccaagaagcgcaagctggaagatgagtgctcagagctcaaaagggacatcgatgatctggagctgacactggccaaagtggagaaggagaaacacgcaacagagaacaaggtgaaaaacctgacagaggagatggctgggctggatgagatcattgccaagctgaccaaggagaagaaagctctgcaagaggcccaccaacaggctctggatgaccttcaggccgaggaggacaaggtcaacaccctgactaaggccaaagtcaagctggagcagcaagtggatgatctggaaggatccctggagcaagagaagaaggtgcgcatggacctggagcgagcgaagcggaagctggagggcgacctgaagctgacccaggagagcatcatggacctggagaatgacaagcagcagctggatgagcggctgaaaaaaaaagactttgagctgaatgctctcaacgcaaggattgaggatgaacaggccctcggcagccagctgcagaagaagctcaaggagcttcaggcacgcatcgaggagctggaggaggagctggaggccgagcgcaccgccagggctaaggtggagaagctgcgctcagacctgtctcgggagctggaggagatcagcgagcggctggaagaggccggcggggccacgtccgtgcagatcgagatgaacaagaagcgcgaggccgagttccagaagatgcggcgggacctggaggaggccacgctgcagcacgaggccactgccgcggccctgcgcaagaagcacgccgacagcgtggccgagctgggcgagcagatcgacaacctgcagcgggtgaagcagaagctggagaaggagaagagcgagttcaagctggagctggatgacgtcacctccaacatggagcagatcatcaaggccaaggccaaccgcatggccgccgaggcccagaagcaagtcaagagcctccagagcttgttgaaggacacccagattcagctggacgatgcagtccgtgccaacgacgacctgaaggagaacatcgccatcgtggagcggcgcaacaacctgctgcaggctgagctggaggagttgcgtgccgtggtggagcagacagagcggtcccggaagctggcggagcaggagctgattgagactagtgagcgggtgcagctgctgcattcccagaacaccagcctcatcaaccagaagaagaagatggatgctgacctgtcccagctccagactgaagtggaggaggcagtgcaggagtgcaggaatgctgaggagaaggccaagaaggccatcacggatgccgccatgatggcagaggagctgaagaaggagcaggacaccagcgcccacctggagcgcatgaagaagaacatggaacagaccattaaggacctgcagcaccggctggacgaagccgagcagatcgccctcaagggcggcaagaagcagctgcagaagctggaagcgcgggtgcgggagctggagaatgagctggaggccgagcagaagcgcaacgcagagtcggtgaagggcatgaggaagagcgagcggcgcatcaaggagctcacctaccagacggaggaggacaggaaaaacctgctgcggctgcaggacctggtagacaagctgcagctaaaggtcaaggcctacaagcgccaggccgaggaggcggaggagcaagccaacaccaacctgtccaagttccgcaaggtgcagcacgagctggatgaggcagaggagcgggcggacatcgccgagtcccaggtcaacaagctgcgggccaagagccgtgacattggcacgaagggcttgaatgaggagtagctttgccacatcttgatctgctcagccctggaggtgccagcaaagccccatgctggagcctgtgtaacagctccttgggaggaagcagaataaagcaattttccttgaagccga

SEQ ID NO: 734301 - DNA, 4099 bp, Homo sapiens
gggaaattcattcgaattcattttggggcaacaggaaagttggcatctgcagacatagagacctatcttctggaaaaatccagagttattttccagctgaaagcagagagagattatcacattttctaccaaatcctgtctaacaaaaagcctgagctgctggacatgctgctgatcaccaacaacccctacgattatgcattcatctcccaaggagagaccaccgtggcctccattgatgacgctgaggagctcatggccactgataacgcttttgatgtgctgggcttcacttcagaggagaaaaactccatgtataagctgacaggcgccatcatgcactttggaaacatgaagttcaagctgaagcagcgggaggagcaggcggagccagacggcactgaagaggctgacaagtctgcctacctcatggggctgaactcagccgacctgctcaaggggctgtgccaccctcgggtgaaagtgggcaatgagtacgtcaccaaggggcagaatgtccagcaggtgatatatgccactggggcactggccaaggcagtgtatgagaggatgttcaactggatggtgacgcgcatcaatgccaccctggagaccaagcagccacgccagtacttcataggagtcctggacatcgctggcttcgagatcttcgatttcaacagctttgagcagctctgcatcaacttcaccaacgagaagctgcagcagttcttcaaccaccacatgtttgtgctggagcaggaggagtacaagaaggagggcatcgagtggacattcattgactttggcatggacctgcaggcctgcattgacctcatcgagaagcccatgggcatcatgtccatcctggaagaggagtgcatgttccccaaggccaccgacatgaccttcaaggccaagctgtttgacaaccacctgggcaaatccgccaacttccagaagccacgcaatatcaaggggaagcctgaagcccacttctccctgatccactatgccggcatcgtggactacaacatcattggctggctgcagaagaacaaggatcctctcaatgagactgtcgtgggcttgtatcagaagtcttccctcaagctgctcagcaccctgtttgccaactatgctggggctgatgcgcctattgagaagggcaaaggcaaggccaagaaaggctcgtcctttcagactgtgtcagctctgcacagggaaaatctgaacaagctgatgaccaacttgcgctccacccatccccactttgtacgttgtatcatccctaatgagacaaagtctccaggggtgatggacaaccccctggtcatgcaccagctgcgctgcaatggtgtgctggagggcatccgcatctgcaggaaaggcttccccaaccgcatcctctacggggacttccggcagaggtatcgcatcctgaacccagcggccatccctgagggacagttcattgatagcaggaagggggcagagaagctgctcagctccctggacattgatcacaaccagtacaagtttggccacaccaaggtgttcttcaaggccgggctgctggggctgctggaggaaatgagggacgagaggctgagccgcatcatcacgcgtatccaggcccagtcccgaggtgtgctcgccagaatggagtacaaaaagctgctggaacgtagagactccctgctggtaatccagtggaacattcgggccttcatgggggtcaagaattggccctggatgaagctctacttcaagatcaagccgctgctgaagagtgcagaaagagagaaggagatggcctccatgaaggaggagttcacacgcctcaaagaggcgctagagaagtccgaggctcgccgcaaggagctggaggagaagatggtgtccctgctgcaggagaagaatgacctgcagctccaagtgcaggcggaacaagacaacctggcagatgctgaggagcgctgtgatcagctgatcaaaaacaagattcagctggaggccaaggtgaaggagatgaacgagaggctggaggatgaggaggagatgaatgctgagctcactgccaagaagcgcaagctggaagatgagtgctcagagctcaaaagggacatcgatgatctggagctgacactggccaaagtggagaaggagaaacacgcaacagagaacaaggtgaaaaacctgacagaggagatggctgggctggatgagatcattgccaagctgaccaaggagaagaaagctctgcaagaggcccaccaacaggctctggatgaccttcaggccgaggaggacaaggtcaacaccctgactaaggccaaagtcaagctggagcagcaagtggatgatctggaaggatccctggagcaagagaagaaggtgcgcatggacctggagcgagcgaagcggaagctggagggcgacctgaagctgacccaggagagcatcatggacctggagaatgacaagcagcagctggatgagcggctgaaaaaaaaagactttgagctgaatgctctcaacgcaaggattgaggatgaacaggccctcggcagccagctgcagaagaagctcaaggagcttcaggcacgcatcgaggagctggaggaggagctggaggccgagcgcaccgccagggctaaggtggagaagctgcgctcagacctgtctcgggagctggaggagatcagcgagcggctggaagaggccggcggggccacgtccgtgcagatcgagatgaacaagaagcgcgaggccgagttccagaagatgcggcgggacctggaggaggccacgctgcagcacgaggccactgccgcggccctgcgcaagaagcacgccgacagcgtggccgagctgggcgagcagatcgacaacctgcagcgggtgaagcagaagctggagaaggagaagagcgagttcaagctggagctggatgacgtcacctccaacatggagcagatcatcaaggccaaggccaaccgcatggccgccgaggcccagaagcaagtcaagagcctccagagcttgttgaaggacacccagattcagctggacgatgcagtccgtgccaacgacgacctgaaggagaacatcgccatcgtggagcggcgcaacaacctgctgcaggctgagctggaggagttgcgtgccgtggtggagcagacagagcggtcccggaagctggcggagcaggagctgattgagactagtgagcgggtgcagctgctgcattcccagaacaccagcctcatcaaccagaagaagaagatggatgctgacctgtcccagctccagactgaagtggaggaggcagtgcaggagtgcaggaatgctgaggagaaggccaagaaggccatcacggatgccgccatgatggcagaggagctgaagaaggagcaggacaccagcgcccacctggagcgcatgaagaagaacatggaacagaccattaaggacctgcagcaccggctggacgaagccgagcagatcgccctcaagggcggcaagaagcagctgcagaagctggaagcgcgggtgcgggagctggagaatgagctggaggccgagcagaagcgcaacgcagagtcggtgaagggcatgaggaagagcgagcggcgcatcaaggagctcacctaccagacggaggaggacaggaaaaacctgctgcggctgcaggacctggtagacaagctgcagctaaaggtcaaggcctacaagcgccaggccgaggaggcggaggagcaagccaacaccaacctgtccaagttccgcaaggtgcagcacgagctggatgaggcagaggagcgggcggacatcgccgagtcccaggtcaacaagctgcgggccaagagccgtgacattggcacgaagagatgcggtttcaccatgttggccaggctggtcttgaactcctgaccttgtgatccactcgcctcagcctcccaaaggcttgaatgaggagtagctttgccacatcttgatctgctcagccctggaggtgccagcaaagccccatgctggagcctgtgtaacagctccttgggaggaagcagaataaagcaattttccttgaagccga

SEQ ID NO: 734302 - DNA, 3352 bp, Homo sapiens
gggaaattcattcgaattcattttggggcaacaggaaagttggcatctgcagacatagagacctatcttctggaaaaatccagagttattttccagctgaaagcagagagagattatcacattttctaccaaatcctgtctaacaaaaagcctgagctgctggacatgctgctgatcaccaacaacccctacgattatgcattcatctcccaaggagagaccaccgtggcctccattgatgacgctgaggagctcatggccactgataacgcttttgatgtgctgggcttcacttcagaggagaaaaactccatgtataagctgacaggcgccatcatgcactttggaaacatgaagttcaagctgaagcagcgggaggagcaggcggagccagacggcactgaagaggctgacaagtctgcctacctcatggggctgaactcagccgacctgctcaaggggctgtgccaccctcgggtgaaagtgggcaatgagtacgtcaccaaggggcagaatgtccagcaggtgatatatgccactggggcactggccaaggcagtgtatgagaggatgttcaactggatggtgacgcgcatcaatgccaccctggagaccaagcagccacgccagtacttcataggagtcctggacatcgctggcttcgagatcttcgatttcaacagctttgagcagctctgcatcaacttcaccaacgagaagctgcagcagttcttcaaccaccacatgtttgtgctggagcaggaggagtacaagaaggagggcatcgagtggacattcattgactttggcatggacctgcaggcctgcattgacctcatcgagaagcccatgggcatcatgtccatcctggaagaggagtgcatgttccccaaggccaccgacatgaccttcaaggccaagctgtttgacaaccacctgggcaaatccgccaacttccagaagccacgcaatatcaaggggaagcctgaagcccacttctccctgatccactatgccggcatcgtggactacaacatcattggctggctgcagaagaacaaggatcctctcaatgagactgtcgtgggcttgtatcagaagtcttccctcaagctgctcagcaccctgtttgccaactatgctggggctgatgcgcctattgagaagggcaaaggcaaggccaagaaaggctcgtcctttcagactgtgtcagctctgcacagggaaaatctgaacaagctgatgaccaacttgcgctccacccatccccactttgtacgttgtatcatccctaatgagacaaagtctccaggggtgatggacaaccccctggtcatgcaccagctgcgctgcaatggtgtgctggagggcatccgcatctgcaggaaaggcttccccaaccgcatcctctacggggacttccggcagaggtatcgcatcctgaacccagcggccatccctgagggacagttcattgatagcaggaagggggcagagaagctgctcagctccctggacattgatcacaaccagtacaagtttggccacaccaaggtgttcttcaaggccgggctgctggggctgctggaggaaatgagggacgagaggctgagccgcatcatcacgcgtatccaggcccagtcccgaggtgtgctcgccagaatggagtacaaaaagctgctggaacgtagagactccctgctggtaatccagtggaacattcgggccttcatgggggtcaagaattggccctggatgaagctctacttcaagatcaagccgctgctgaagagtgcagaaagagagaaggagatggcctccatgaaggaggagttcacacgcctcaaagaggcgctagagaagtccgaggctcgccgcaaggagctggaggagaagatggtgtccctgctgcaggagaagaatgacctgcagctccaagtgcaggcggaacaagacaacctggcagatgctgaggagcgctgtgatcagctgatcaaaaacaagattcagctggaggccaaggtgaaggagatgaacgagaggctggaggatgaggaggagatgaatgctgagctcactgccaagaagcgcaagctggaagatgagtgctcagagctcaaaagggacatcgatgatctggagctgacactggccaaagtggagaaggagaaacacgcaacagagaacaaggtgaaaaacctgacagaggagatggctgggctggatgagatcattgccaagctgaccaaggagaagaaagctctgcaagaggcccaccaacaggctctggatgaccttcaggccgaggaggacaaggtcaacaccctgactaaggccaaagtcaagctggagcagcaagtggatgatctggaaggatccctggagcaagagaagaaggtgcgcatggacctggagcgagcgaagcggaagctggagggcgacctgaagctgacccaggagagcatcatggacctggagaatgacaagcagcagctggatgagcggctgaaaaaaaaagactttgagctgaatgctctcaacgcaaggattgaggatgaacaggccctcggcagccagctgcagaagaagctcaaggagcttcaggcacgcatcgaggagctggaggaggagctggaggccgagcgcaccgccagggctaaggtggagaagctgcgctcagacctgtctcgggagctggaggagatcagcgagcggctggaagaggccggcggggccacgtccgtgcagatcgagatgaacaagaagcgcgaggccgagttccagaagatgcggcgggacctggaggaggccacgctgcagcacgaggccactgccgcggccctgcgcaagaagcacgccgacagcgtggccgagctgggcgagcagatcgacaacctgcagcgggtgaagcagaagctggagaaggagaagagcgagttcaagctggagctggatgacgtcacctccaacatggagcagatcatcaaggccaaggccaaccgcatggccgccgaggcccagaagcaagtcaagagcctccagagcttgttgaaggacacccagattcagctggacgatgcagtccgtgccaacgacgacctgaaggagaacatcgccatcgtggagcggcgcaacaacctgctgcaggctgagctggaggagttgcgtgccgtggtggagcagacagagcggtcccggaagctggcggagcaggagctgattgagactagtgagcgggtgcagctgctgcattcccagaacaccagcctcatcaaccagaagaagaagatggagtcggatctgacccagctccagtcggaagtggaggaggcagtgcaggagtgcagaaacg

SEQ ID NO: 734303 - DNA, 3516 bp, Homo sapiens
gggaaattcattcgaattcattttggggcaacaggaaagttggcatctgcagacatagagacctatcttctggaaaaatccagagttattttccagctgaaagcagagagagattatcacattttctaccaaatcctgtctaacaaaaagcctgagctgctggacatgctgctgatcaccaacaacccctacgattatgcattcatctcccaaggagagaccaccgtggcctccattgatgacgctgaggagctcatggccactgataacgcttttgatgtgctgggcttcacttcagaggagaaaaactccatgtataagctgacaggcgccatcatgcactttggaaacatgaagttcaagctgaagcagcgggaggagcaggcggagccagacggcactgaagaggctgacaagtctgcctacctcatggggctgaactcagccgacctgctcaaggggctgtgccaccctcgggtgaaagtgggcaatgagtacgtcaccaaggggcagaatgtccagcaggtgatatatgccactggggcactggccaaggcagtgtatgagaggatgttcaactggatggtgacgcgcatcaatgccaccctggagaccaagcagccacgccagtacttcataggagtcctggacatcgctggcttcgagatcttcgatttcaacagctttgagcagctctgcatcaacttcaccaacgagaagctgcagcagttcttcaaccaccacatgtttgtgctggagcaggaggagtacaagaaggagggcatcgagtggacattcattgactttggcatggacctgcaggcctgcattgacctcatcgagaagcccatgggcatcatgtccatcctggaagaggagtgcatgttccccaaggccaccgacatgaccttcaaggccaagctgtttgacaaccacctgggcaaatccgccaacttccagaagccacgcaatatcaaggggaagcctgaagcccacttctccctgatccactatgccggcatcgtggactacaacatcattggctggctgcagaagaacaaggatcctctcaatgagactgtcgtgggcttgtatcagaagtcttccctcaagctgctcagcaccctgtttgccaactatgctggggctgatgcgcctattgagaagggcaaaggcaaggccaagaaaggctcgtcctttcagactgtgtcagctctgcacagggaaaatctgaacaagctgatgaccaacttgcgctccacccatccccactttgtacgttgtatcatccctaatgagacaaagtctccaggggtgatggacaaccccctggtcatgcaccagctgcgctgcaatggtgtgctggagggcatccgcatctgcaggaaaggcttccccaaccgcatcctctacggggacttccggcagaggtatcgcatcctgaacccagcggccatccctgagggacagttcattgatagcaggaagggggcagagaagctgctcagctccctggacattgatcacaaccagtacaagtttggccacaccaaggtgttcttcaaggccgggctgctggggctgctggaggaaatgagggacgagaggctgagccgcatcatcacgcgtatccaggcccagtcccgaggtgtgctcgccagaatggagtacaaaaagctgctggaacgtagagactccctgctggtaatccagtggaacattcgggccttcatgggggtcaagaattggccctggatgaagctctacttcaagatcaagccgctgctgaagagtgcagaaagagagaaggagatggcctccatgaaggaggagttcacacgcctcaaagaggcgctagagaagtccgaggctcgccgcaaggagctggaggagaagatggtgtccctgctgcaggagaagaatgacctgcagctccaagtgcaggcggaacaagacaacctggcagatgctgaggagcgctgtgatcagctgatcaaaaacaagattcagctggaggccaaggtgaaggagatgaacgagaggctggaggatgaggaggagatgaatgctgagctcactgccaagaagcgcaagctggaagatgagtgctcagagctcaaaagggacatcgatgatctggagctgacactggccaaagtggagaaggagaaacacgcaacagagaacaaggtgaaaaacctgacagaggagatggctgggctggatgagatcattgccaagctgaccaaggagaagaaagctctgcaagaggcccaccaacaggctctggatgaccttcaggccgaggaggacaaggtcaacaccctgactaaggccaaagtcaagctggagcagcaagtggatgatctggaaggatccctggagcaagagaagaaggtgcgcatggacctggagcgagcgaagcggaagctggagggcgacctgaagctgacccaggagagcatcatggacctggagaatgacaagcagcagctggatgagcggctgaaaaaaaaagactttgagctgaatgctctcaacgcaaggattgaggatgaacaggccctcggcagccagctgcagaagaagctcaaggagcttcaggcacgcatcgaggagctggaggaggagctggaggccgagcgcaccgccagggctaaggtggagaagctgcgctcagacctgtctcgggagctggcggagcaggagctgattgagactagtgagcgggtgcagctgctgcattcccagaacaccagcctcatcaaccagaagaagaagatggatgctgacctgtcccagctccagactgaagtggaggaggcagtgcaggagtgcaggaatgctgaggagaaggccaagaaggccatcacggatgccgccatgatggcagaggagctgaagaaggagcaggacaccagcgcccacctggagcgcatgaagaagaacatggaacagaccattaaggacctgcagcaccggctggacgaagccgagcagatcgccctcaagggcggcaagaagcagctgcagaagctggaagcgcgggtgcgggagctggagaatgagctggaggccgagcagaagcgcaacgcagagtcggtgaagggcatgaggaagagcgagcggcgcatcaaggagctcacctaccagacggaggaggacaggaaaaacctgctgcggctgcaggacctggtagacaagctgcagctaaaggtcaaggcctacaagcgccaggccgaggaggcggaggagcaagccaacaccaacctgtccaagttccgcaaggtgcagcacgagctggatgaggcagaggagcgggcggacatcgccgagtcccaggtcaacaagctgcgggccaagagccgtgacattggcacgaagggcttgaatgaggagtagctttgccacatcttgatctgctcagccctggaggtgccagcaaagccccatgctggagcctgtgtaacagctccttgggaggaagcagaataaagcaattttccttgaagccga

SEQ ID NO: 734304 - DNA, 3592 bp, Homo sapiens
gggaaattcattcgaattcattttggggcaacaggaaagttggcatctgcagacatagagacctatcttctggaaaaatccagagttattttccagctgaaagcagagagagattatcacattttctaccaaatcctgtctaacaaaaagcctgagctgctggacatgctgctgatcaccaacaacccctacgattatgcattcatctcccaaggagagaccaccgtggcctccattgatgacgctgaggagctcatggccactgataacgcttttgatgtgctgggcttcacttcagaggagaaaaactccatgtataagctgacaggcgccatcatgcactttggaaacatgaagttcaagctgaagcagcgggaggagcaggcggagccagacggcactgaagaggctgacaagtctgcctacctcatggggctgaactcagccgacctgctcaaggggctgtgccaccctcgggtgaaagtgggcaatgagtacgtcaccaaggggcagaatgtccagcaggtgatatatgccactggggcactggccaaggcagtgtatgagaggatgttcaactggatggtgacgcgcatcaatgccaccctggagaccaagcagccacgccagtacttcataggagtcctggacatcgctggcttcgagatcttcgatttcaacagctttgagcagctctgcatcaacttcaccaacgagaagctgcagcagttcttcaaccaccacatgtttgtgctggagcaggaggagtacaagaaggagggcatcgagtggacattcattgactttggcatggacctgcaggcctgcattgacctcatcgagaagcccatgggcatcatgtccatcctggaagaggagtgcatgttccccaaggccaccgacatgaccttcaaggccaagctgtttgacaaccacctgggcaaatccgccaacttccagaagccacgcaatatcaaggggaagcctgaagcccacttctccctgatccactatgccggcatcgtggactacaacatcattggctggctgcagaagaacaaggatcctctcaatgagactgtcgtgggcttgtatcagaagtcttccctcaagctgctcagcaccctgtttgccaactatgctggggctgatgcgcctattgagaagggcaaaggcaaggccaagaaaggctcgtcctttcagactgtgtcagctctgcacagggaaaatctgaacaagctgatgaccaacttgcgctccacccatccccactttgtacgttgtatcatccctaatgagacaaagtctccaggggtgatggacaaccccctggtcatgcaccagctgcgctgcaatggtgtgctggagggcatccgcatctgcaggaaaggcttccccaaccgcatcctctacggggacttccggcagaggtatcgcatcctgaacccagcggccatccctgagggacagttcattgatagcaggaagggggcagagaagctgctcagctccctggacattgatcacaaccagtacaagtttggccacaccaaggtgttcttcaaggccgggctgctggggctgctggaggaaatgagggacgagaggctgagccgcatcatcacgcgtatccaggcccagtcccgaggtgtgctcgccagaatggagtacaaaaagctgctggaacgtagagactccctgctggtaatccagtggaacattcgggccttcatgggggtcaagaattggccctggatgaagctctacttcaagatcaagccgctgctgaagagtgcagaaagagagaaggagatggcctccatgaaggaggagttcacacgcctcaaagaggcgctagagaagtccgaggctcgccgcaaggagctggaggagaagatggtgtccctgctgcaggagaagaatgacctgcagctccaagtgcaggcggaacaagacaacctggcagatgctgaggagcgctgtgatcagctgatcaaaaacaagattcagctggaggccaaggtgaaggagatgaacgagaggctggaggatgaggaggagatgaatgctgagctcactgccaagaagcgcaagctggaagatgagtgctcagagctcaaaagggacatcgatgatctggagctgacactggccaaagtggagaaggagaaacacgcaacagagaacaaggtgaaaaacctgacagaggagatggctgggctggatgagatcattgccaagctgaccaaggagaagaaagctctgcaagaggcccaccaacaggctctggatgaccttcaggccgaggaggacaaggtcaacaccctgactaaggccaaagtcaagctggagcagcaagtggatgatctggaaggatccctggagcaagagaagaaggtgcgcatggacctggagcgagcgaagcggaagctggagggcgacctgaagctgacccaggagagcatcatggacctggagaatgacaagcagcagctggatgagcggctgaaaaaaaaagactttgagctgaatgctctcaacgcaaggattgaggatgaacaggccctcggcagccagctgcagaagaagctcaaggagcttcaggcacgcatcgaggagctggaggaggagctggaggccgagcgcaccgccagggctaaggtggagaagctgcgctcagacctgtctcgggagctggcggagcaggagctgattgagactagtgagcgggtgcagctgctgcattcccagaacaccagcctcatcaaccagaagaagaagatggatgctgacctgtcccagctccagactgaagtggaggaggcagtgcaggagtgcaggaatgctgaggagaaggccaagaaggccatcacggatgccgccatgatggcagaggagctgaagaaggagcaggacaccagcgcccacctggagcgcatgaagaagaacatggaacagaccattaaggacctgcagcaccggctggacgaagccgagcagatcgccctcaagggcggcaagaagcagctgcagaagctggaagcgcgggtgcgggagctggagaatgagctggaggccgagcagaagcgcaacgcagagtcggtgaagggcatgaggaagagcgagcggcgcatcaaggagctcacctaccagacggaggaggacaggaaaaacctgctgcggctgcaggacctggtagacaagctgcagctaaaggtcaaggcctacaagcgccaggccgaggaggcggaggagcaagccaacaccaacctgtccaagttccgcaaggtgcagcacgagctggatgaggcagaggagcgggcggacatcgccgagtcccaggtcaacaagctgcgggccaagagccgtgacattggcacgaagagatgcggtttcaccatgttggccaggctggtcttgaactcctgaccttgtgatccactcgcctcagcctcccaaaggcttgaatgaggagtagctttgccacatcttgatctgctcagccctggaggtgccagcaaagccccatgctggagcctgtgtaacagctccttgggaggaagcagaataaagcaattttccttgaagccga

SEQ ID NO: 734305 - DNA, 3608 bp, Homo sapiens; identical to SEQ ID NO: 447246

SEQ ID NO: 734306 - DNA, 3735 bp, Homo sapiens
gagaagactggagaaagaatagagggctgagaccagaggtgaagcgggagggacaagaaagatgacaaggactcacccaagaagaacaagggcaaggagcgccgggacctggatgacctcaagaaggaggtggctatgacagagcacaagatgtcagtggaagaggtctgccggaaatacaacacagactgtgtgcagggtttgacccacagcaaagcccaggagatcctggcccgggatgggcctaacgcactcacgccaccgcctaccaccccagagtgggtcaagttttgccggcagctcttcgggggcttctccatcctgctgtggatcggggctatcctctgcttcctggcctacggtatccaggcgggcaccgaggacgacccctctggtgacaacctgtacctgggcatcgtgctggcggccgtggtgatcatcactggctgcttctcctactaccaggaggccaagagctccaagatcatggagtccttcaagaacatggtgccccagcaagccctggtgatccgggaaggtgagaagatgcaggtgaacgctgaggaggtggtggtcggggacctggtggagatcaagggtggagaccgagtgccagctgacctgcggatcatctcagcccacggctgcaaggtggacaactcctccctgactggcgaatccgagccccagactcgctctcccgactgcacgcacgacaaccccttggagactcggaacatcaccttcttttccaccaactgtgtggaaggcacggctcggggcgtggtggtggccacgggcgaccgcactgtcatgggccgtatcgccaccctggcatcagggctggaggtgggcaagacgcccatcgccatcgagattgagcacttcatccagctcatcaccggcgtggctgtcttcctgggtgtctccttcttcatcctctccctcattctcggatacacctggcttgaggctgtcatcttcctcatcggcatcatcgtggccaatgtcccagagggtctgctggccactgtcactgtgtgtctgacgctgaccgccaagcgcatggcccggaagaactgcctggtgaagaacctggaggctgtagaaaccctgggctccacgtccaccatctgctcagataagacagggaccctcactcagaaccgcatgacagtcgcccacatgtggtttgacaaccagatccacgaggctgacaccactgaggaccagtcagggacctcatttgacaagagttcgcacacctgggtggccctgtctcacatcgctgggctctgcaatcgcgctgtcttcaagggtggtcaggacaacatccctgtgctcaagagggatgtggctggggatgcgtctgagtctgccctgctcaagtgcatcgagctgtcctctggctccgtgaagctgatgcgtgaacgcaacaagaaagtggctgagattcccttcaattccaccaacaaataccagctctccatccatgagaccgaggaccccaacgacaaccgatacctgctggtgatgaagggtgcccccgagcgcatcctggaccgctgctccaccatcctgctacagggcaaggagcagcctctggacgaggaaatgaaggaggccttccagaatgcctaccttgagctcggtggcctgggcgagcgcgtgcttggtttctgccattattacctgcccgaggagcagttccccaagggctttgccttcgactgtgatgacgtgaacttcaccacggacaacctctgctttgtgggcctcatgtccatgatcgacccaccccgggcagccgtccctgacgcggtgggcaagtgtcgcagcgcaggcatcaaggtcatcatggtcaccggcgatcaccccatcacggccaaggccattgccaagggtgtgggcatcatctctgagggcaacgagactgtggaggacatcgccgcccggctcaacattcccgtcagccaggttaacccccgggatgccaaggcctgcgtgatccacggcaccgacctcaaggacttcacctccgagcaaatcgacgagatcctgcagaatcacaccgagatcgtcttcgcccgcacatccccccagcagaagctcatcattgtggagggctgtcagagacagggtgcaattgtggctgtgaccggggatggtgtgaacgactcccccgctctgaagaaggccgacattggggtggccatgggcatcgctggctctgacgtctccaagcaggcagctgacatgatcctgctggacgacaactttgcctccatcgtcacaggggtggaggagggccgcctgatcttcgacaacctaaagaagtccattgcctacaccctgaccagcaatatcccggagatcacgcccttcctgctgttcatcatggccaacatcccgctgcccctgggcaccatcaccatcctctgcatcgatctgggcactgacatggtccctgccatctcactggcgtacgaggctgccgaaagcgacatcatgaagagacagcccaggaacccgcggacggacaaattggtcaatgagagactcatcagcatggcctacgggcagattggaatgatccaggctctcggtggcttcttctcttactttgtgatcctggcagaaaatggcttcttgcccggcaacctggtgggcatccggctgaactgggatgaccgcaccgtcaatgacctggaagacagttacgggcagcagtggacatacgagcagaggaaggtggtggagttcacctgccacacggccttctttgtgagcatcgttgtcgtccagtgggccgatctgatcatctgcaagacccggaggaactcggtcttccagcagggcatgaagaacaagatcctgatcttcgggctgtttgaggagacggccctggctgccttcctgtcctactgccccggcatggacgtggccctgcgcatgtaccctctcaagcccagctggtggttctgtgccttcccctacagtttcctcatcttcgtctacgacgaaatccgcaaactcatcctgcgcaggaacccagggggtgagggagctcggcaaggcagccgaggggggcggggggcagcagggtctcaggcagctggtcccaggctcccctcgccctgctggatggctctgccacctggttcccactcttctctctcttcccatctctccgggcacccactctgtcttctcacgggtctctgtctgtgtggtttccttgtctctctccctctctgtccctctctctgctgggcggctcgccttgcctgtctctctccatctcttactctgtctctttctttccttctttgtctctccaggttgggtggagaaggaaacctactactgacctcagccccaccacatcgcccatctcttccccgtcccgcaggcccaggaccgcccctgtcagtccccccaattttgtattctggggggaggagccctctcttcctgtggccccaccttggcccccaccccctccactatctcctgccgcccccactctggctggcttctctcccctgccccaaacctctctcctctctcttttctgtgtcagtttctctccctctcctcacccctctatccattcctcccgccccagccacctccctgggctcttttttactccccttcagccccccggctgatgccatctctggttctggacaattatcaaatatatcagtggggagagagaagcggtgtgtg

SEQ ID NO: 734307 - DNA, 3452 bp, Homo sapiens; identical to SEQ ID NO: 447247

SEQ ID NO: 734308 - DNA, 3891 bp, Homo sapiens; identical to SEQ ID NO: 447251

SEQ ID NO: 734309 - DNA, 2857 bp, Homo sapiens
gagaagactggagaaagaatagagggctgagaccagaggtgaagcgggagggacaagaaagatgacaaggactcacccaagaagaacaagggcaaggagcgccgggacctggatgacctcaagaaggaggtggctatgacagagcacaagatgtcagtggaagaggtctgccggaaatacaacacagactgtgtgcagggtttgacccacagcaaagcccaggagatcctggcccgggatgggcctaacgcactcacgccaccgcctaccaccccagagtgggtcaagttttgccggcagctcttcgggggcttctccatcctgctgtggatcggggctatcctctgcttcctggcctacggtatccaggcgggcaccgaggacgacccctctggtgacaacctgtacctgggcatcgtgctggcggccgtggtgatcatcactggctgcttctcctactaccaggaggccaagagctccaagatcatggagtccttcaagaacatggtgccccagcaagccctggtgatccgggaaggtgagaagatgcaggtgaacgctgaggaggtggtggtcggggacctggtggagatcaagggtggagaccgagtgccagctgacctgcggatcatctcagcccacggctgcaaggtggacaactcctccctgactggcgaatccgagccccagactcgctctcccgactgcacgcacgacaaccccttggagactcggaacatcaccttcttttccaccaactgtgtggaaggcacggctcggggcgtggtggtggccacgggcgaccgcactgtcatgggccgtatcgccaccctggcatcagggctggaggtgggcaagacgcccatcgccatcgagattgagcacttcatccagctcatcaccggcgtggctgtcttcctgggtgtctccttcttcatcctctccctcattctcggatacacctggcttgaggctgtcatcttcctcatcggcatcatcgtggccaatgtcccagagggtctgctggccactgtcactgtgtgtctgacgctgaccgccaagcgcatggcccggaagaactgcctggtgaagaacctggaggctgtagaaaccctgggctccacgtccaccatctgctcagataagacagggaccctcactcagaaccgcatgacagtcgcccacatgtggtttgacaaccagatccacgaggctgacaccactgaggaccagtcagggacctcatttgacaagagttcgcacacctgggtggccctgtctcacatcgctgggctctgcaatcgcgctgtcttcaagggtggtcaggacaacatccctgtgctcaagagggatgtggctggggatgcgtctgagtctgccctgctcaagtgcatcgagctgtcctctggctccgtgaagctgatgcgtgaacgcaacaagaaagtggctgagattcccttcaattccaccaacaaataccagctctccatccatgagaccgaggaccccaacgacaaccgatacctgctggtgatgaagggtgcccccgagcgcatcctggaccgctgctccaccatcctgctacagggcaaggagcagcctctggacgaggaaatgaaggaggccttccagaatgcctaccttgagctcggtggcctgggcgagcgcgtgcttggtttctgccattattacctgcccgaggagcagttccccaagggctttgccttcgactgtgatgacgtgaacttcaccacggacaacctctgctttgtgggcctcatgtccatgatcgacccaccccgggcagccgtccctgacgcggtgggcaagtgtcgcagcgcaggcatcaaggtcatcatggtcaccggcgatcaccccatcacggccaaggccattgccaagggtgtgggcatcatctctgagggcaacgagactgtggaggacatcgccgcccggctcaacattcccgtcagccaggttaacccccgggatgccaaggcctgcgtgatccacggcaccgacctcaaggacttcacctccgagcaaatcgacgagatcctgcagaatcacaccgagatcgtcttcgcccgcacatccccccagcagaagctcatcattgtggagggctgtcagagacagggtgcaattgtggctgtgaccggggatggtgtgaacgactcccccgctctgaagaaggccgacattggggtggccatgggcatcgctggctctgacgtctccaagcaggcagctgacatgatcctgctggacgacaactttgcctccatcgtcacaggggtggaggagggccgcctgatcttcgacaacctaaagaagtccattgcctacaccctgaccagcaatatcccggagatcacgcccttcctgctgttcatcatggccaacatcccgctgcccgcccagctggtggttctgtgccttcccctacagtttcctcatcttcgtctacgacgaaatccgcaaactcatcctgcgcaggaacccagggggttgggtggagaaggaaacctactactgacctcagccccaccacatcgcccatattttgtattctggggggaggagccctctcttcctgtggccccaccttggcccccaccccctccactatctcctgccgcccccactctggctggcttctctcccctgccccaaacctctctcctctctcttttctgtgtcagtttctctccctctcctcacccctctatccattcctcccgccccagccacctccctgggctcttttttactccccttcagccccccggctgatgccatctctggttctggacaattatcaaatatatcagtggggagagagaagcggtgtgtg

SEQ ID NO: 734310 - DNA, 3013 bp, Homo sapiens; identical to SEQ ID NO: 447249

SEQ ID NO: 734311 - DNA, 441 bp, Homo sapiens
gaacaaagaacagagaagctgaacatactgacatatttgttctccgttttaaagtttaacttcctcgttcgttatgcctccttgcccctagtttcattaaacaacccccttctagcctctaacacctgctttgtctttagtcattcttagtaacctgctctgtccttagtcatccttagacacctgctctgtaactgtctttcccgctgaaactactcaccctgccactccagctcatacccctgccctctttaaatagccaatctgaattggcttagagtgtgcagtccaaccctatccaatagggaaaagacacaacagtagggactagctgcgttagaaataagaacactttcccctcccttgtccggtgtgatcttgccattgctccatctgcaagaccactcttccatagaagtaaatttgccttgctgtaaaaac

SEQ ID NO: 734312 - DNA, 731 bp, Homo sapiens
gcaagctgaatgagtagaagttttccaggtaaagagtcagaaggatgatatttagcagaaggaaaatttaaccagactgtgtgtttggcagaaggaacatctgaaggaacacctgacgaggctgcacccttggcggaaagaacacctgacacggctgaaagcttggtggaaagaacacctgacgaataggatacagtgaattcctcttcaaagattttagcctgtaaacatcctttaaaattcaagaggggggaagattaagtacaatgagttctgagttcctcatcaaagaacaaatatgtcagtatgttcagcttctccgttctttgttctccgttttaaagtttaacttcctcgttcgttatgcctccttgcccctagtttcattaaacaacccccttctagcctctaacacctgctttgtctttagtcattcttagtaacctgctctgtccttagtcatccttagacacctgctctgtaactgtctttcccgctgaaactactcaccctgccactccagctcatacccctgccctctttaaatagccaatctgaattggcttagagtgtgcagtccaaccctatccaatagggaaaagacacaacagtagggactagctgcgttagaaataagaacactttcccctcccttgtccggtgtgatcttgccattgctccatctgcaagaccactcttccatagaagtaaatttgccttgctgtaaaaac

SEQ ID NO: 734313 - DNA, 778 bp, Homo sapiens
tgtaataaatttggtaaatttttttatatcagtgttaaaatagtgattttatttatttcatttttatacatagcattcatcaacaacttttggaatataaacaaaagatatctaaaaattctcaaaatagtaatccagaaggaacatctgaaggaacacctgacgaggctgcacccttggcggaaagaacacctgacacggctgaaagcttggtggaaagaacacctgacgaataggatacagtgaattcctcttcaaagattttagcctgtaaacatcctttaaaattcaagaggggggaagattaagtacaatgagttctgagttcctcatcaaagaacaaatatgtcagtatgttcagcttctccgttctttgttctccgttttaaagtttaacttcctcgttcgttatgcctccttgcccctagtttcattaaacaacccccttctagcctctaacacctgctttgtctttagtcattcttagtaacctgctctgtccttagtcatccttagacacctgctctgtaactgtctttcccgctgaaactactcaccctgccactccagctcatacccctgccctctttaaatagccaatctgaattggcttagagtgtgcagtccaaccctatccaatagggaaaagacacaacagtagggactagctgcgttagaaataagaacactttcccctcccttgtccggtgtgatcttgccattgctccatctgcaagaccactcttccatagaagtaaatttgccttgctgtaaaaac

SEQ ID NO: 734314 - DNA, 1575 bp, Homo sapiens
agcgggcgtaacggttctgctcagctgcctaaaggttctgctcaggtgcctaacggttctgctcagctgcctaacggttttgcgcagccattttctcccgggagaggttggagtgtccaaaagcttggcccgactgagatttctagtcttgtcagggcggatgcagggactgaagaagggcgagggcgagcggcggggactggggaagggcgagcagcgggaggcacgggctctctctagcaggtggctgcagccatggagaggctctctgccgcccctgtcaagggccagacgggcccagagcgcccgagccccttcagtcagctggtctacaccaacaacgactcttacgtgattcaccatggggatctcaggaagatccacaaagctgcctcccggggccaagcctggaagctggagaggatgatgaagaagacgacaatggacctgaacataagagatgcgaagaagaggactgctctatactgggcctgtgccaatggccatgcagaagtagtaacacttctggtagatagaaagtgtcagcttgacgtccttgatggtgaaaacaggaccattctgatgaaggctctgcaatgccagagggaggcttgtgcaaatattctcatagattctggtgctgatccaaatattgtagatgtgtatggcaacacagctgtccattatgctgttaacagtgagaatttgtcagtggtggcaaaattgctgtcctgtggtacagacattaaagtgaagaacaaggctggccacacaccacttttattggccataaggaaaagaagtgagcaaattgtggaatttttactgacaaaaaaatgcaaatgcaaatggagttgataagtttaaatgcattcatcaacaacttttggaatataaacaaaagatatctaaaaattctcaaaatagtaatccagaaggaacatctgaaggaacacctgacgaggctgcacccttggcggaaagaacacctgacacggctgaaagcttggtggaaagaacacctgacgaataggatacagtgaattcctcttcaaagattttagcctgtaaacatcctttaaaattcaagaggggggaagattaagtacaatgagttctgagttcctcatcaaagaacaaatatgtcagtatgttcagcttctccgttctttgttctccgttttaaagtttaacttcctcgttcgttatgcctccttgcccctagtttcattaaacaacccccttctagcctctaacacctgctttgtctttagtcattcttagtaacctgctctgtccttagtcatccttagacacctgctctgtaactgtctttcccgctgaaactactcaccctgccactccagctcatacccctgccctctttaaatagccaatctgaattggcttagagtgtgcagtccaaccctatccaatagggaaaagacacaacagtagggactagctgcgttagaaataagaacactttcccctcccttgtccggtgtgatcttgccattgctccatctgcaagaccactcttccatagaagtaaatttgccttgctgtaaaaac

SEQ ID NO: 734315 - DNA, 814 bp, Homo sapiens
ggttctgctcaggtgcctaacggttctgctcagctgcctaacggttttgcgcagccattttctcccgggagaggttggagtgtccaaaagcttggcccgactgagatttctagtcttgtcagggcggatgcagggactgaagaagggcgagggcgagcggcggggactggggaagggcgagcagcgggaggcacgggctctctctagcaggtggctgcagccatggagaggctctctgccgcccctgtcaagggccagacgggcccagagcgcccgagccccttcagtcagctggtctacaccaacaacgactcttacgtgattcaccatggggatctcaggaagatccacaaagctgcctcccggggccaagcctggaagctggagaggatgatgaagaagacgacaatggacctgaacataagagatgcgaagaagaggctctgcaatgccagagggaggcttgtgcaaatattctcatagattctggtgctgatccaaatattgtagatgtgtatggcaacacagctgtccattatgctgttaacagtgagaatttgtcagtggtggcaaaattgctgtcctgtggtacagacattaaagtgaagaacaaggctggccacacaccacttttattggccataaggaaaagaagtgagcaaattgtggaatttttactgacaaaaaaatgcaaatgcaaatggagttgataagtttaaatgcacagccctcatgcttgccatatgtcatggatcatcagagatagttggcacggttcttcagcaaaatgttgacatctgtgctgaagctacat

SEQ ID NO: 734316 - DNA, 751 bp, Homo sapiens
tgttgcttgtggatttaatctctaagtgtttacatttaaaggctagcattcatcaacaacttttggaatataaacaaaagatatctaaaaattctcaaaatagtaatccagaaggaacatctgaaggaacacctgacgaggctgcacccttggcggaaagaacacctgacacggctgaaagcttggtggaaagaacacctgacgaataggatacagtgaattcctcttcaaagattttagcctgtaaacatcctttaaaattcaagaggggggaagattaagtacaatgagttctgagttcctcatcaaagaacaaatatgtcagtatgttcagcttctccgttctttgttctccgttttaaagtttaacttcctcgttcgttatgcctccttgcccctagtttcattaaacaacccccttctagcctctaacacctgctttgtctttagtcattcttagtaacctgctctgtccttagtcatccttagacacctgctctgtaactgtctttcccgctgaaactactcaccctgccactccagctcatacccctgccctctttaaatagccaatctgaattggcttagagtgtgcagtccaaccctatccaatagggaaaagacacaacagtagggactagctgcgttagaaataagaacactttcccctcccttgtccggtgtgatcttgccattgctccatctgcaagaccactcttccatagaagtaaatttgccttgctgtaaaaac

SEQ ID NO: 734317 - DNA, 326 bp, Homo sapiens
  misc_feature (303)..(303): n is a, c, g, or t
agctcggtacccactagtccacggttggctactagtccacggttggctactagtccacggttggctactagtccacggttggctccagaaaatatatgtcttccaactaagctacgtcttccaacaaatccatgtcttcctatatctccaggtcttccagcatctccagggcttccagcatctgctcgtcttccaacatctccacgtcttccagcatctctgtgtcttccagcatcttcatgtcttccaacaactacccagtcttccatcaactggctcaattccattccagcgtactaccanacccttagccaaccgtgactagt

SEQ ID NO: 734318 - DNA, 801 bp, Homo sapiens
tccagaaaatatatgtcttccaactaagctacgtcttccaacaaatccatgtcttcctatatctccaggtcttccagcatctccagggcttccagcatctgctcgtcttccaacatctccacgtcttccagcatctctgtgtcttccagcatcttcatgtcttccaacactacccagtcttccatcaactggctcaatatccatgtcttccaacgtctccagtgtgctgatcttctgacattcaggtcttccagtgtctgcaatatccagggtttccgatggcacctgtgtcaaggtcttccaacaactccgggtcttccagcgacttcaagtcttccaataatctcaaggtcttccagataatcctgagcttccagaaaatccacatcttccagacaatccatgtcttccggacaatccatgtcttccaagaagctccaagtcttccagtaaatcaagtcttccagcaaatccagtcttccagcaattactggtcttccaccaaatccagatcttccaggaaaatccacgtcttccaggaaatccatgtcttccaataatttcaaggtcttccatcaaatacagatcttccagctaatccatgtcttccagaaaaatctgtgtcttccaccaaatccaagtcttccagtaaatctagttcttccagaaaaatctagatcttccagtcaatcagtgtcttccagaaagaaatccaggtcttccagtcaatcagtgtcttccagaaagaaatccaggtcttccagtcagacagttgcatccagagacacttgcatccagagg

SEQ ID NO: 734319 - DNA, 1880 bp, Homo sapiens
acagaggatccccggcatactggaccttctccgggtcttccagcgacttcaagtcttccaataatctcaaggtcttccagataatcctgagcttccagaaaatccacatcttccagacaatccatgtcttccggacaatccatgtcttccaagaagctccaagtcttccagtaaatcaagtcttccagcaaatccagtcttccagcaattactggtcttccaccaaatccagatcttccaggaaaatccacgtcttccaggaaatccatgtcttccaataatttcaaggtcttccatcaaatacagatcttccagctaatccatgtcttccagaaaaatctgtgtcttccaccaaatccaagtcttccagtaaatctagttcttccagaaaaatctagatcttccagtcaatcagtgtcttccagaaagaaatccaggtcttccagtcaatcagtgtcttccagaaagaaatccaggtcttccagtcagtcagtgtcttccagaaaaatctacgtcttccaccaaatccaggtcttccagtcaatccacatcttccggaaaaaatccaggtcttccagccaatatatgtcttcctgaagatccacgtcttccagaaaatccatgtcttccagaaaatccatgtcttccagtaacctcccagtcttccagaaaatccacgtcttcccaacaatccaagtcttccggataatttgggtcttcctgaaaatctacgtcttccaaaaaagccatgtcttccagaaaatccacatcttccaacaaagccatgtcttccagactatccatgtcttccagaaaatccttgtcttccctcaaatccatagcttccgaaaaatccaggtcttccaggaaatccgtgtcttccagcaaatccacgtcttccaacaaagccatgtcttccatcaaattaatgtcttccagcctacttgtgtcttccaacaaaggtacgtcttccaacaaaggtacgtcttccaacaaaggtatgtcttccaacaaaggtacgtcttccagaaaatccacgtcttccaaccaagccatgtcttccagaaaatccacgtcttccagaaaatatatgtcttccaactaagctacgtcttccaacaaatccatgtcttcctatatctccaggtcttccagcatctccagggcttccagcatctgctcgtcttccaacatctccacgtcttccagcatctctgtgtcttccagcatcttcatgtcttccaacaactacccagtcttccatcaactggctcaatatccatgtcttccaacgtctccagtgtgctgatcttctgacattcaggtcttccagtgtctgcaatatccagggtttccgatggcacctgtgtcaaggtcttccaacaactccgggtcttccagcgacttcaagtcttccaataatctcaaggtcttccagataatcctgagcttccagaaaatccacatcttccagacaatccatgtcttccggacaatccatgtcttccaagaagctccaagtcttccagtaaatcaagtcttccagcaaatccagtcttccagcaattactggtcttccaccaaatccagatcttccaggaaaatccacgtcttccaggaaatccatgtcttccaataatttcaaggtcttccatcaaatacagatcttccagctaatccatgtcttccagaaaaatctgtgtcttccaccaaatccaagtcttccagtaaatctagttcttccagaaaaatctagatcttccagtcaatcagtgtcttccagaaagaaatccaggtcttccagtcaatcagtgtcttccagaaagaaatccaggtcttccagtcagacagttgcatccagagacacttgcatccagagg

SEQ ID NO: 734320 - DNA, 2007 bp, Homo sapiens
acagaggatccccggcatactggaccttctccgggtcttccagcgacttcaagtcttccaataatctcaaggtcttccagataatcctgagcttccagaaaatccacatcttccagacaatccatgtcttccggacaatccatgtcttccaagaagctccaagtcttccagtaaatcaagtcttccagcaaatccagtcttccagcaattactggtcttccaccaaatccagatcttccaggaaaatccacgtcttccaggaaatccatgtcttccaataatttcaaggtcttccatcaaatacagatcttccagctaatccatgtcttccagaaaaatctgtgtcttccaccaaatccaagtcttccagtaaatctagttcttccagaaaaatctagatcttccagtcaatcagtgtcttccagaaagaaatccaggtcttccagtcaatcagtgtcttccagaaagaaatccaggtcttccagtcagtcagtgtcttccagaaaaatctacgtcttccaccaaatccaggtcttccagtcaatccacatcttccggaaaaaatccaggtcttccagccaatatatgtcttcctgaagatccacgtcttccagaaaatccatgtcttccagaaaatccatgtcttccagtaacctcccagtcttccagaaaatccacgtcttcccaacaatccaagtcttccggataatttgggtcttcctgaaaatctacgtcttccaaaaaagccatgtcttccagaaaatccacatcttccaatggcctccaggtcttccagactatccatgtcttccagaaaatccttgtcttcccttaaatctatagcttccaaaaaatccgggtcttccaggaaatccgtgtcttccagcaagtccacgtcttccaacaaagccatgtcttccagactatccatgtcttccagaaaatccttgtcttccctcaaatccatagcttccgaaaaatccaggtcttccaggaaatccgtgtcttccagcaaatccacgtcttccaacaaagccatgtcttccatcaaattaatgtcttccagcctacttgtgtcttccaacaaaggtacgtcttccaacaaaggtacgtcttccaacaaaggtatgtcttccaacaaaggtacgtcttccagaaaatccacgtcttccaaccaagccatgtcttccagaaaatccacgtcttccagaaaatatatgtcttccaactaagctacgtcttccaacaaatccatgtcttcctatatctccaggtcttccagcatctccagggcttccagcatctgctcgtcttccaacatctccacgtcttccagcatctctgtgtcttccagcatcttcatgtcttccaacaactacccagtcttccatcaactggctcaatatccatgtcttccaacgtctccagtgtgctgatcttctgacattcaggtcttccagtgtctgcaatatccagggtttccgatggcacctgtgtcaaggtcttccaacaactccgggtcttccagcgacttcaagtcttccaataatctcaaggtcttccagataatcctgagcttccagaaaatccacatcttccagacaatccatgtcttccggacaatccatgtcttccaagaagctccaagtcttccagtaaatcaagtcttccagcaaatccagtcttccagcaattactggtcttccaccaaatccagatcttccaggaaaatccacgtcttccaggaaatccatgtcttccaataatttcaaggtcttccatcaaatacagatcttccagctaatccatgtcttccagaaaaatctgtgtcttccaccaaatccaagtcttccagtaaatctagttcttccagaaaaatctagatcttccagtcaatcagtgtcttccagaaagaaatccaggtcttccagtcaatcagtgtcttccagaaagaaatccaggtcttccagtcagacagttgcatccagagacacttgcatccagagg

SEQ ID NO: 734321 - DNA, 1823 bp, Homo sapiens
acagaggatccccggcatactggaccttctccgggtcttccagcgacttcaagtcttccaataatctcaaggtcttccagataatcctgagcttccagaaaatccacatcttccagacaatccatgtcttccggacaatccatgtcttccaagaagctccaagtcttccagtaaatcaagtcttccagcaaatccagtcttccagcaattactggtcttccaccaaatccagatcttccaggaaaatccacgtcttccaggaaatccatgtcttccaataatttcaaggtcttccatcaaatacagatcttccagctaatccatgtcttccagaaaaatctgtgtcttccaccaaatccaagtcttccagtaaatctagttcttccagaaaaatctagatcttccagtcaatcagtgtcttccagaaagaaatccaggtcttccagtcaatcagtgtcttccagaaagaaatccaggtcttccagtcagtcagtgtcttccagaaaaatctacgtcttccaccaaatccaggtcttccagtcaatccacatcttccggaaaaaatccaggtcttccagccaatatatgtcttcctgaagatccacgtcttccagaaaatccatgtcttccagaaaatccatgtcttccagtaacctcccagtcttccagaaaatccacgtcttcccaacaatccaagtcttccggataatttgggtcttcctgaaaatctacgtcttccaaaaaagccatgtcttccagaaaatccacatcttccaatggcctccaggtcttccagactatccatgtcttccagaaaatccttgtcttcccttaaatctatagcttccaaaaaatccgggtcttccaggaaatccgtgtcttccagcaagtccacgtcttccaacaaagccatgtcttccagactatccatgtcttccagaaaatccttgtcttccctcaaatccatagcttccgaaaaatccaggtcttccaggaaatccgtgtcttccagcaaatccacgtcttccaacaaagccatgtcttccatcaaattaatgtcttccagcctacttgtgtcttccaacaaaggtcttccagcatctccagggcttccagcatctgctcgtcttccaacatctccacgtcttccagcatctctgtgtcttccagcatcttcatgtcttccaacaactacccagtcttccatcaactggctcaatatccatgtcttccaacgtctccagtgtgctgatcttctgacattcaggtcttccagtgtctgcaatatccagggtttccgatggcacctgtgtcaaggtcttccaacaactccgggtcttccagcgacttcaagtcttccaataatctcaaggtcttccagataatcctgagcttccagaaaatccacatcttccagacaatccatgtcttccggacaatccatgtcttccaagaagctccaagtcttccagtaaatcaagtcttccagcaaatccagtcttccagcaattactggtcttccaccaaatccagatcttccaggaaaatccacgtcttccaggaaatccatgtcttccaataatttcaaggtcttccatcaaatacagatcttccagctaatccatgtcttccagaaaaatctgtgtcttccaccaaatccaagtcttccagtaaatctagttcttccagaaaaatctagatcttccagtcaatcagtgtcttccagaaagaaatccaggtcttccagtcaatcagtgtcttccagaaagaaatccaggtcttccagtcagacagttgcatccagagacacttgcatccagagg

SEQ ID NO: 734322 - DNA, 1696 bp, Homo sapiens
acagaggatccccggcatactggaccttctccgggtcttccagcgacttcaagtcttccaataatctcaaggtcttccagataatcctgagcttccagaaaatccacatcttccagacaatccatgtcttccggacaatccatgtcttccaagaagctccaagtcttccagtaaatcaagtcttccagcaaatccagtcttccagcaattactggtcttccaccaaatccagatcttccaggaaaatccacgtcttccaggaaatccatgtcttccaataatttcaaggtcttccatcaaatacagatcttccagctaatccatgtcttccagaaaaatctgtgtcttccaccaaatccaagtcttccagtaaatctagttcttccagaaaaatctagatcttccagtcaatcagtgtcttccagaaagaaatccaggtcttccagtcaatcagtgtcttccagaaagaaatccaggtcttccagtcagtcagtgtcttccagaaaaatctacgtcttccaccaaatccaggtcttccagtcaatccacatcttccggaaaaaatccaggtcttccagccaatatatgtcttcctgaagatccacgtcttccagaaaatccatgtcttccagaaaatccatgtcttccagtaacctcccagtcttccagaaaatccacgtcttcccaacaatccaagtcttccggataatttgggtcttcctgaaaatctacgtcttccaaaaaagccatgtcttccagaaaatccacatcttccaacaaagccatgtcttccagactatccatgtcttccagaaaatccttgtcttccctcaaatccatagcttccgaaaaatccaggtcttccaggaaatccgtgtcttccagcaaatccacgtcttccaacaaagccatgtcttccatcaaattaatgtcttccagcctacttgtgtcttccaacaaaggtcttccagcatctccagggcttccagcatctgctcgtcttccaacatctccacgtcttccagcatctctgtgtcttccagcatcttcatgtcttccaacaactacccagtcttccatcaactggctcaatatccatgtcttccaacgtctccagtgtgctgatcttctgacattcaggtcttccagtgtctgcaatatccagggtttccgatggcacctgtgtcaaggtcttccaacaactccgggtcttccagcgacttcaagtcttccaataatctcaaggtcttccagataatcctgagcttccagaaaatccacatcttccagacaatccatgtcttccggacaatccatgtcttccaagaagctccaagtcttccagtaaatcaagtcttccagcaaatccagtcttccagcaattactggtcttccaccaaatccagatcttccaggaaaatccacgtcttccaggaaatccatgtcttccaataatttcaaggtcttccatcaaatacagatcttccagctaatccatgtcttccagaaaaatctgtgtcttccaccaaatccaagtcttccagtaaatctagttcttccagaaaaatctagatcttccagtcaatcagtgtcttccagaaagaaatccaggtcttccagtcaatcagtgtcttccagaaagaaatccaggtcttccagtcagacagttgcatccagagacacttgcatccagagg

SEQ ID NO: 734323 - DNA, 1518 bp, Homo sapiens
tcttccagtaaatctagttcttccagaaaaatctagatcttccagtcaatcagtgtcttccagaaagaaatccaggtcttccagtcaatcagtgtcttccagaaagaaatccaggtcttccagtcagtcagtgtcttccagaaaaatctacgtcttccaccaaatccaggtcttccagtcaatccacatcttccggaaaaaatccaggtcttccagccaatatatgtcttcctgaagatccacgtcttccagaaaatccatgtcttccagaaaatccatgtcttccagtaacctcccagtcttccagaaaatccacgtcttcccaacaatccaagtcttccggataatttgggtcttcctgaaaatctacgtcttccaaaaaagccatgtcttccagaaaatccacatcttccaacaaagccatgtcttccagactatccatgtcttccagaaaatccttgtcttccctcaaatccatagcttccgaaaaatccaggtcttccaggaaatccgtgtcttccagcaaatccacgtcttccaacaaagccatgtcttccatcaaattaatgtcttccagcctacttgtgtcttccaacaaaggtacgtcttccaacaaaggtacgtcttccaacaaaggtatgtcttccaacaaaggtacgtcttccagaaaatccacgtcttccaaccaagccatgtcttccagaaaatccacgtcttccagaaaatatatgtcttccaactaagctacgtcttccaacaaatccatgtcttcctatatctccaggtcttccagcatctccagggcttccagcatctgctcgtcttccaacatctccacgtcttccagcatctctgtgtcttccagcatcttcatgtcttccaacaactacccagtcttccatcaactggctcaatatccatgtcttccaacgtctccagtgtgctgatcttctgacattcaggtcttccagtgtctgcaatatccagggtttccgatggcacctgtgtcaaggtcttccaacaactccgggtcttccagcgacttcaagtcttccaataatctcaaggtcttccagataatcctgagcttccagaaaatccacatcttccagacaatccatgtcttccggacaatccatgtcttccaagaagctccaagtcttccagtaaatcaagtcttccagcaaatccagtcttccagcaattactggtcttccaccaaatccagatcttccaggaaaatccacgtcttccaggaaatccatgtcttccaataatttcaaggtcttccatcaaatacagatcttccagctaatccatgtcttccagaaaaatctgtgtcttccaccaaatccaagtcttccagtaaatctagttcttccagaaaaatctagatcttccagtcaatcagtgtcttccagaaagaaatccaggtcttccagtcaatcagtgtcttccagaaagaaatccaggtcttccagtcagacagttgcatccagagacacttgcatccagagg

SEQ ID NO: 734324 - DNA, 1334 bp, Homo sapiens
tcttccagtaaatctagttcttccagaaaaatctagatcttccagtcaatcagtgtcttccagaaagaaatccaggtcttccagtcaatcagtgtcttccagaaagaaatccaggtcttccagtcagtcagtgtcttccagaaaaatctacgtcttccaccaaatccaggtcttccagtcaatccacatcttccggaaaaaatccaggtcttccagccaatatatgtcttcctgaagatccacgtcttccagaaaatccatgtcttccagaaaatccatgtcttccagtaacctcccagtcttccagaaaatccacgtcttcccaacaatccaagtcttccggataatttgggtcttcctgaaaatctacgtcttccaaaaaagccatgtcttccagaaaatccacatcttccaacaaagccatgtcttccagactatccatgtcttccagaaaatccttgtcttccctcaaatccatagcttccgaaaaatccaggtcttccaggaaatccgtgtcttccagcaaatccacgtcttccaacaaagccatgtcttccatcaaattaatgtcttccagcctacttgtgtcttccaacaaaggtcttccagcatctccagggcttccagcatctgctcgtcttccaacatctccacgtcttccagcatctctgtgtcttccagcatcttcatgtcttccaacaactacccagtcttccatcaactggctcaatatccatgtcttccaacgtctccagtgtgctgatcttctgacattcaggtcttccagtgtctgcaatatccagggtttccgatggcacctgtgtcaaggtcttccaacaactccgggtcttccagcgacttcaagtcttccaataatctcaaggtcttccagataatcctgagcttccagaaaatccacatcttccagacaatccatgtcttccggacaatccatgtcttccaagaagctccaagtcttccagtaaatcaagtcttccagcaaatccagtcttccagcaattactggtcttccaccaaatccagatcttccaggaaaatccacgtcttccaggaaatccatgtcttccaataatttcaaggtcttccatcaaatacagatcttccagctaatccatgtcttccagaaaaatctgtgtcttccaccaaatccaagtcttccagtaaatctagttcttccagaaaaatctagatcttccagtcaatcagtgtcttccagaaagaaatccaggtcttccagtcaatcagtgtcttccagaaagaaatccaggtcttccagtcagacagttgcatccagagacacttgcatccagagg

SEQ ID NO: 734325 - DNA, 2160 bp, Homo sapiens
tccagaaaatatatgtcttccaactaagctacgtcttccaacaaatccatgtcttcctatatctccaggtcttccagcatctccagggcttccagcatctgctcgtcttccaacatctccacgtcttccagcatctctgtgtcttccagcatcttcatgtcttccaacaactacccagtcttccatcaactggctcaatatccatgtcttccaacgtctccagtgtgctgatcttctgacattcaggtcttccagtgtctgcaatatccagggtttccgatggcacctgtgtcaaggtcttccaacaactccgggtcttccagcgacttcaagtcttccaataatctcaaggtcttccagataatcctgagcttccagaaaatccacatcttccagacaatccatgtcttccggacaatccatgtcttccaagaagctccaagtcttccagtaaatcaagtcttccagcaaatccagtcttccagcaattactggtcttccaccaaatccagatcttccaggaaaatccacgtcttccaggaaatccatgtcttccaataatttcaaggtcttccatcaaatacagatcttccagctaatccatgtcttccagaaaaatctgtgtcttccaccaaatccaagtcttccagtaaatctagttcttccagaaaaatctagatcttccagtcaatcagtgtcttccagaaagaaatccaggtcttccagtcaatcagtgtcttccagaaagaaatccaggtcttccagtcagtcagtgtcttccagaaaaatctacgtcttccaccaaatccaggtcttccagtcaatccacatcttccggaaaaaatccaggtcttccagccaatatatgtcttcctgaagatccacgtcttccagaaaatccatgtcttccagaaaatccatgtcttccagtaacctcccagtcttccagaaaatccacgtcttcccaacaatccaagtcttccggataatttgggtcttcctgaaaatctacgtcttccaaaaaagccatgtcttccagaaaatccacatcttccaacaaagccatgtcttccagactatccatgtcttccagaaaatccttgtcttccctcaaatccatagcttccgaaaaatccaggtcttccaggaaatccgtgtcttccagcaaatccacgtcttccaacaaagccatgtcttccatcaaattaatgtcttccagcctacttgtgtcttccaacaaaggtacgtcttccaacaaaggtacgtcttccaacaaaggtatgtcttccaacaaaggtacgtcttccagaaaatccacgtcttccaaccaagccatgtcttccagaaaatccacgtcttccagaaaatatatgtcttccaactaagctacgtcttccaacaaatccatgtcttcctatatctccaggtcttccagcatctccagggcttccagcatctgctcgtcttccaacatctccacgtcttccagcatctctgtgtcttccagcatcttcatgtcttccaacaactacccagtcttccatcaactggctcaatatccatgtcttccaacgtctccagtgtgctgatcttctgacattcaggtcttccagtgtctgcaatatccagggtttccgatggcacctgtgtcaaggtcttccaacaactccgggtcttccagcgacttcaagtcttccaataatctcaaggtcttccagataatcctgagcttccagaaaatccacatcttccagacaatccatgtcttccggacaatccatgtcttccaagaagctccaagtcttccagtaaatcaagtcttccagcaaatccagtcttccagcaattactggtcttccaccaaatccagatcttccaggaaaatccacgtcttccaggaaatccatgtcttccaataatttcaaggtcttccatcaaatacagatcttccagctaatccatgtcttccagaaaaatctgtgtcttccaccaaatccaagtcttccagtaaatctagttcttccagaaaaatctagatcttccagtcaatcagtgtcttccagaaagaaatccaggtcttccagtcaatcagtgtcttccagaaagaaatccaggtcttccagtcagacagttgcatccagagacacttgcatccagagg

SEQ ID NO: 734326 - DNA, 2287 bp, Homo sapiens
tccagaaaatatatgtcttccaactaagctacgtcttccaacaaatccatgtcttcctatatctccaggtcttccagcatctccagggcttccagcatctgctcgtcttccaacatctccacgtcttccagcatctctgtgtcttccagcatcttcatgtcttccaacaactacccagtcttccatcaactggctcaatatccatgtcttccaacgtctccagtgtgctgatcttctgacattcaggtcttccagtgtctgcaatatccagggtttccgatggcacctgtgtcaaggtcttccaacaactccgggtcttccagcgacttcaagtcttccaataatctcaaggtcttccagataatcctgagcttccagaaaatccacatcttccagacaatccatgtcttccggacaatccatgtcttccaagaagctccaagtcttccagtaaatcaagtcttccagcaaatccagtcttccagcaattactggtcttccaccaaatccagatcttccaggaaaatccacgtcttccaggaaatccatgtcttccaataatttcaaggtcttccatcaaatacagatcttccagctaatccatgtcttccagaaaaatctgtgtcttccaccaaatccaagtcttccagtaaatctagttcttccagaaaaatctagatcttccagtcaatcagtgtcttccagaaagaaatccaggtcttccagtcaatcagtgtcttccagaaagaaatccaggtcttccagtcagtcagtgtcttccagaaaaatctacgtcttccaccaaatccaggtcttccagtcaatccacatcttccggaaaaaatccaggtcttccagccaatatatgtcttcctgaagatccacgtcttccagaaaatccatgtcttccagaaaatccatgtcttccagtaacctcccagtcttccagaaaatccacgtcttcccaacaatccaagtcttccggataatttgggtcttcctgaaaatctacgtcttccaaaaaagccatgtcttccagaaaatccacatcttccaatggcctccaggtcttccagactatccatgtcttccagaaaatccttgtcttcccttaaatctatagcttccaaaaaatccgggtcttccaggaaatccgtgtcttccagcaagtccacgtcttccaacaaagccatgtcttccagactatccatgtcttccagaaaatccttgtcttccctcaaatccatagcttccgaaaaatccaggtcttccaggaaatccgtgtcttccagcaaatccacgtcttccaacaaagccatgtcttccatcaaattaatgtcttccagcctacttgtgtcttccaacaaaggtacgtcttccaacaaaggtacgtcttccaacaaaggtatgtcttccaacaaaggtacgtcttccagaaaatccacgtcttccaaccaagccatgtcttccagaaaatccacgtcttccagaaaatatatgtcttccaactaagctacgtcttccaacaaatccatgtcttcctatatctccaggtcttccagcatctccagggcttccagcatctgctcgtcttccaacatctccacgtcttccagcatctctgtgtcttccagcatcttcatgtcttccaacaactacccagtcttccatcaactggctcaatatccatgtcttccaacgtctccagtgtgctgatcttctgacattcaggtcttccagtgtctgcaatatccagggtttccgatggcacctgtgtcaaggtcttccaacaactccgggtcttccagcgacttcaagtcttccaataatctcaaggtcttccagataatcctgagcttccagaaaatccacatcttccagacaatccatgtcttccggacaatccatgtcttccaagaagctccaagtcttccagtaaatcaagtcttccagcaaatccagtcttccagcaattactggtcttccaccaaatccagatcttccaggaaaatccacgtcttccaggaaatccatgtcttccaataatttcaaggtcttccatcaaatacagatcttccagctaatccatgtcttccagaaaaatctgtgtcttccaccaaatccaagtcttccagtaaatctagttcttccagaaaaatctagatcttccagtcaatcagtgtcttccagaaagaaatccaggtcttccagtcaatcagtgtcttccagaaagaaatccaggtcttccagtcagacagttgcatccagagacacttgcatccagagg

SEQ ID NO: 734327 - DNA, 2103 bp, Homo sapiens
tccagaaaatatatgtcttccaactaagctacgtcttccaacaaatccatgtcttcctatatctccaggtcttccagcatctccagggcttccagcatctgctcgtcttccaacatctccacgtcttccagcatctctgtgtcttccagcatcttcatgtcttccaacaactacccagtcttccatcaactggctcaatatccatgtcttccaacgtctccagtgtgctgatcttctgacattcaggtcttccagtgtctgcaatatccagggtttccgatggcacctgtgtcaaggtcttccaacaactccgggtcttccagcgacttcaagtcttccaataatctcaaggtcttccagataatcctgagcttccagaaaatccacatcttccagacaatccatgtcttccggacaatccatgtcttccaagaagctccaagtcttccagtaaatcaagtcttccagcaaatccagtcttccagcaattactggtcttccaccaaatccagatcttccaggaaaatccacgtcttccaggaaatccatgtcttccaataatttcaaggtcttccatcaaatacagatcttccagctaatccatgtcttccagaaaaatctgtgtcttccaccaaatccaagtcttccagtaaatctagttcttccagaaaaatctagatcttccagtcaatcagtgtcttccagaaagaaatccaggtcttccagtcaatcagtgtcttccagaaagaaatccaggtcttccagtcagtcagtgtcttccagaaaaatctacgtcttccaccaaatccaggtcttccagtcaatccacatcttccggaaaaaatccaggtcttccagccaatatatgtcttcctgaagatccacgtcttccagaaaatccatgtcttccagaaaatccatgtcttccagtaacctcccagtcttccagaaaatccacgtcttcccaacaatccaagtcttccggataatttgggtcttcctgaaaatctacgtcttccaaaaaagccatgtcttccagaaaatccacatcttccaatggcctccaggtcttccagactatccatgtcttccagaaaatccttgtcttcccttaaatctatagcttccaaaaaatccgggtcttccaggaaatccgtgtcttccagcaagtccacgtcttccaacaaagccatgtcttccagactatccatgtcttccagaaaatccttgtcttccctcaaatccatagcttccgaaaaatccaggtcttccaggaaatccgtgtcttccagcaaatccacgtcttccaacaaagccatgtcttccatcaaattaatgtcttccagcctacttgtgtcttccaacaaaggtcttccagcatctccagggcttccagcatctgctcgtcttccaacatctccacgtcttccagcatctctgtgtcttccagcatcttcatgtcttccaacaactacccagtcttccatcaactggctcaatatccatgtcttccaacgtctccagtgtgctgatcttctgacattcaggtcttccagtgtctgcaatatccagggtttccgatggcacctgtgtcaaggtcttccaacaactccgggtcttccagcgacttcaagtcttccaataatctcaaggtcttccagataatcctgagcttccagaaaatccacatcttccagacaatccatgtcttccggacaatccatgtcttccaagaagctccaagtcttccagtaaatcaagtcttccagcaaatccagtcttccagcaattactggtcttccaccaaatccagatcttccaggaaaatccacgtcttccaggaaatccatgtcttccaataatttcaaggtcttccatcaaatacagatcttccagctaatccatgtcttccagaaaaatctgtgtcttccaccaaatccaagtcttccagtaaatctagttcttccagaaaaatctagatcttccagtcaatcagtgtcttccagaaagaaatccaggtcttccagtcaatcagtgtcttccagaaagaaatccaggtcttccagtcagacagttgcatccagagacacttgcatccagagg

SEQ ID NO: 734328 - DNA, 1976 bp, Homo sapiens
tccagaaaatatatgtcttccaactaagctacgtcttccaacaaatccatgtcttcctatatctccaggtcttccagcatctccagggcttccagcatctgctcgtcttccaacatctccacgtcttccagcatctctgtgtcttccagcatcttcatgtcttccaacaactacccagtcttccatcaactggctcaatatccatgtcttccaacgtctccagtgtgctgatcttctgacattcaggtcttccagtgtctgcaatatccagggtttccgatggcacctgtgtcaaggtcttccaacaactccgggtcttccagcgacttcaagtcttccaataatctcaaggtcttccagataatcctgagcttccagaaaatccacatcttccagacaatccatgtcttccggacaatccatgtcttccaagaagctccaagtcttccagtaaatcaagtcttccagcaaatccagtcttccagcaattactggtcttccaccaaatccagatcttccaggaaaatccacgtcttccaggaaatccatgtcttccaataatttcaaggtcttccatcaaatacagatcttccagctaatccatgtcttccagaaaaatctgtgtcttccaccaaatccaagtcttccagtaaatctagttcttccagaaaaatctagatcttccagtcaatcagtgtcttccagaaagaaatccaggtcttccagtcaatcagtgtcttccagaaagaaatccaggtcttccagtcagtcagtgtcttccagaaaaatctacgtcttccaccaaatccaggtcttccagtcaatccacatcttccggaaaaaatccaggtcttccagccaatatatgtcttcctgaagatccacgtcttccagaaaatccatgtcttccagaaaatccatgtcttccagtaacctcccagtcttccagaaaatccacgtcttcccaacaatccaagtcttccggataatttgggtcttcctgaaaatctacgtcttccaaaaaagccatgtcttccagaaaatccacatcttccaacaaagccatgtcttccagactatccatgtcttccagaaaatccttgtcttccctcaaatccatagcttccgaaaaatccaggtcttccaggaaatccgtgtcttccagcaaatccacgtcttccaacaaagccatgtcttccatcaaattaatgtcttccagcctacttgtgtcttccaacaaaggtcttccagcatctccagggcttccagcatctgctcgtcttccaacatctccacgtcttccagcatctctgtgtcttccagcatcttcatgtcttccaacaactacccagtcttccatcaactggctcaatatccatgtcttccaacgtctccagtgtgctgatcttctgacattcaggtcttccagtgtctgcaatatccagggtttccgatggcacctgtgtcaaggtcttccaacaactccgggtcttccagcgacttcaagtcttccaataatctcaaggtcttccagataatcctgagcttccagaaaatccacatcttccagacaatccatgtcttccggacaatccatgtcttccaagaagctccaagtcttccagtaaatcaagtcttccagcaaatccagtcttccagcaattactggtcttccaccaaatccagatcttccaggaaaatccacgtcttccaggaaatccatgtcttccaataatttcaaggtcttccatcaaatacagatcttccagctaatccatgtcttccagaaaaatctgtgtcttccaccaaatccaagtcttccagtaaatctagttcttccagaaaaatctagatcttccagtcaatcagtgtcttccagaaagaaatccaggtcttccagtcaatcagtgtcttccagaaagaaatccaggtcttccagtcagacagttgcatccagagacacttgcatccagagg

SEQ ID NO: 734329 - DNA, 2113 bp, Homo sapiens
tccagaaaatatatgtcttccaactaagctacgtcttccaacaaatccatgtcttcctatatctccaggtcttccagcatctccagggcttccagcatctgctcgtcttccaacatctccacgtcttccagcatctctgtgtcttccagcatcttcatgtcttccaacaactacccagtcttccatcaactggctcaatatccatgtcttccaacgtctccagtgtgctgatcttctgacattcaggtcttccagtgtctgcaatatccagggtttccgatggcacctgtgtcaaggtcttccaacaactccgggtcttccagcgacttcaagtcttccaataatctcaaggtcttccagataatcctgagcttccagaaaatccacatcttccagacaatccatgtcttccggacaatccatgtcttccaagaagctccaagtcttccagtaaatcaagtcttccagcaaatccagtcttccagcaattactggtcttccaccaaatccagatcttccaggaaaatccacgtcttccaggaaatccatgtcttccaataatttcaaggtcttccatcaaatacagatcttccagctaatccatgtcttccagaaaaatctgtgtcttccaccaaatccaagaatcagtgtcttccagaaagaaatccaggtcttccagtcaatcagtgtcttccagaaagaaatccaggtcttccagtcagtcagtgtcttccagaaaaatctacgtcttccaccaaatccaggtcttccagtcaatccacatcttccggaaaaaatccaggtcttccagccaatatatgtcttcctgaagatccacgtcttccagaaaatccatgtcttccagaaaatccatgtcttccagtaacctcccagtcttccagaaaatccacgtcttcccaacaatccaagtcttccggataatttgggtcttcctgaaaatctacgtcttccaaaaaagccatgtcttccagaaaatccacatcttccaacaaagccatgtcttccagactatccatgtcttccagaaaatccttgtcttccctcaaatccatagcttccgaaaaatccaggtcttccaggaaatccgtgtcttccagcaaatccacgtcttccaacaaagccatgtcttccatcaaattaatgtcttccagcctacttgtgtcttccaacaaaggtacgtcttccaacaaaggtacgtcttccaacaaaggtatgtcttccaacaaaggtacgtcttccagaaaatccacgtcttccaaccaagccatgtcttccagaaaatccacgtcttccagaaaatatatgtcttccaactaagctacgtcttccaacaaatccatgtcttcctatatctccaggtcttccagcatctccagggcttccagcatctgctcgtcttccaacatctccacgtcttccagcatctctgtgtcttccagcatcttcatgtcttccaacaactacccagtcttccatcaactggctcaatatccatgtcttccaacgtctccagtgtgctgatcttctgacattcaggtcttccagtgtctgcaatatccagggtttccgatggcacctgtgtcaaggtcttccaacaactccgggtcttccagcgacttcaagtcttccaataatctcaaggtcttccagataatcctgagcttccagaaaatccacatcttccagacaatccatgtcttccggacaatccatgtcttccaagaagctccaagtcttccagtaaatcaagtcttccagcaaatccagtcttccagcaattactggtcttccaccaaatccagatcttccaggaaaatccacgtcttccaggaaatccatgtcttccaataatttcaaggtcttccatcaaatacagatcttccagctaatccatgtcttccagaaaaatctgtgtcttccaccaaatccaagtcttccagtaaatctagttcttccagaaaaatctagatcttccagtcaatcagtgtcttccagaaagaaatccaggtcttccagtcaatcagtgtcttccagaaagaaatccaggtcttccagtcagacagttgcatccagagacacttgcatccagagg

SEQ ID NO: 734330 - DNA, 2240 bp, Homo sapiens
tccagaaaatatatgtcttccaactaagctacgtcttccaacaaatccatgtcttcctatatctccaggtcttccagcatctccagggcttccagcatctgctcgtcttccaacatctccacgtcttccagcatctctgtgtcttccagcatcttcatgtcttccaacaactacccagtcttccatcaactggctcaatatccatgtcttccaacgtctccagtgtgctgatcttctgacattcaggtcttccagtgtctgcaatatccagggtttccgatggcacctgtgtcaaggtcttccaacaactccgggtcttccagcgacttcaagtcttccaataatctcaaggtcttccagataatcctgagcttccagaaaatccacatcttccagacaatccatgtcttccggacaatccatgtcttccaagaagctccaagtcttccagtaaatcaagtcttccagcaaatccagtcttccagcaattactggtcttccaccaaatccagatcttccaggaaaatccacgtcttccaggaaatccatgtcttccaataatttcaaggtcttccatcaaatacagatcttccagctaatccatgtcttccagaaaaatctgtgtcttccaccaaatccaagaatcagtgtcttccagaaagaaatccaggtcttccagtcaatcagtgtcttccagaaagaaatccaggtcttccagtcagtcagtgtcttccagaaaaatctacgtcttccaccaaatccaggtcttccagtcaatccacatcttccggaaaaaatccaggtcttccagccaatatatgtcttcctgaagatccacgtcttccagaaaatccatgtcttccagaaaatccatgtcttccagtaacctcccagtcttccagaaaatccacgtcttcccaacaatccaagtcttccggataatttgggtcttcctgaaaatctacgtcttccaaaaaagccatgtcttccagaaaatccacatcttccaatggcctccaggtcttccagactatccatgtcttccagaaaatccttgtcttcccttaaatctatagcttccaaaaaatccgggtcttccaggaaatccgtgtcttccagcaagtccacgtcttccaacaaagccatgtcttccagactatccatgtcttccagaaaatccttgtcttccctcaaatccatagcttccgaaaaatccaggtcttccaggaaatccgtgtcttccagcaaatccacgtcttccaacaaagccatgtcttccatcaaattaatgtcttccagcctacttgtgtcttccaacaaaggtacgtcttccaacaaaggtacgtcttccaacaaaggtatgtcttccaacaaaggtacgtcttccagaaaatccacgtcttccaaccaagccatgtcttccagaaaatccacgtcttccagaaaatatatgtcttccaactaagctacgtcttccaacaaatccatgtcttcctatatctccaggtcttccagcatctccagggcttccagcatctgctcgtcttccaacatctccacgtcttccagcatctctgtgtcttccagcatcttcatgtcttccaacaactacccagtcttccatcaactggctcaatatccatgtcttccaacgtctccagtgtgctgatcttctgacattcaggtcttccagtgtctgcaatatccagggtttccgatggcacctgtgtcaaggtcttccaacaactccgggtcttccagcgacttcaagtcttccaataatctcaaggtcttccagataatcctgagcttccagaaaatccacatcttccagacaatccatgtcttccggacaatccatgtcttccaagaagctccaagtcttccagtaaatcaagtcttccagcaaatccagtcttccagcaattactggtcttccaccaaatccagatcttccaggaaaatccacgtcttccaggaaatccatgtcttccaataatttcaaggtcttccatcaaatacagatcttccagctaatccatgtcttccagaaaaatctgtgtcttccaccaaatccaagtcttccagtaaatctagttcttccagaaaaatctagatcttccagtcaatcagtgtcttccagaaagaaatccaggtcttccagtcaatcagtgtcttccagaaagaaatccaggtcttccagtcagacagttgcatccagagacacttgcatccagagg

SEQ ID NO: 734331 - DNA, 2056 bp, Homo sapiens
tccagaaaatatatgtcttccaactaagctacgtcttccaacaaatccatgtcttcctatatctccaggtcttccagcatctccagggcttccagcatctgctcgtcttccaacatctccacgtcttccagcatctctgtgtcttccagcatcttcatgtcttccaacaactacccagtcttccatcaactggctcaatatccatgtcttccaacgtctccagtgtgctgatcttctgacattcaggtcttccagtgtctgcaatatccagggtttccgatggcacctgtgtcaaggtcttccaacaactccgggtcttccagcgacttcaagtcttccaataatctcaaggtcttccagataatcctgagcttccagaaaatccacatcttccagacaatccatgtcttccggacaatccatgtcttccaagaagctccaagtcttccagtaaatcaagtcttccagcaaatccagtcttccagcaattactggtcttccaccaaatccagatcttccaggaaaatccacgtcttccaggaaatccatgtcttccaataatttcaaggtcttccatcaaatacagatcttccagctaatccatgtcttccagaaaaatctgtgtcttccaccaaatccaagaatcagtgtcttccagaaagaaatccaggtcttccagtcaatcagtgtcttccagaaagaaatccaggtcttccagtcagtcagtgtcttccagaaaaatctacgtcttccaccaaatccaggtcttccagtcaatccacatcttccggaaaaaatccaggtcttccagccaatatatgtcttcctgaagatccacgtcttccagaaaatccatgtcttccagaaaatccatgtcttccagtaacctcccagtcttccagaaaatccacgtcttcccaacaatccaagtcttccggataatttgggtcttcctgaaaatctacgtcttccaaaaaagccatgtcttccagaaaatccacatcttccaatggcctccaggtcttccagactatccatgtcttccagaaaatccttgtcttcccttaaatctatagcttccaaaaaatccgggtcttccaggaaatccgtgtcttccagcaagtccacgtcttccaacaaagccatgtcttccagactatccatgtcttccagaaaatccttgtcttccctcaaatccatagcttccgaaaaatccaggtcttccaggaaatccgtgtcttccagcaaatccacgtcttccaacaaagccatgtcttccatcaaattaatgtcttccagcctacttgtgtcttccaacaaaggtcttccagcatctccagggcttccagcatctgctcgtcttccaacatctccacgtcttccagcatctctgtgtcttccagcatcttcatgtcttccaacaactacccagtcttccatcaactggctcaatatccatgtcttccaacgtctccagtgtgctgatcttctgacattcaggtcttccagtgtctgcaatatccagggtttccgatggcacctgtgtcaaggtcttccaacaactccgggtcttccagcgacttcaagtcttccaataatctcaaggtcttccagataatcctgagcttccagaaaatccacatcttccagacaatccatgtcttccggacaatccatgtcttccaagaagctccaagtcttccagtaaatcaagtcttccagcaaatccagtcttccagcaattactggtcttccaccaaatccagatcttccaggaaaatccacgtcttccaggaaatccatgtcttccaataatttcaaggtcttccatcaaatacagatcttccagctaatccatgtcttccagaaaaatctgtgtcttccaccaaatccaagtcttccagtaaatctagttcttccagaaaaatctagatcttccagtcaatcagtgtcttccagaaagaaatccaggtcttccagtcaatcagtgtcttccagaaagaaatccaggtcttccagtcagacagttgcatccagagacacttgcatccagagg

SEQ ID NO: 734332 - DNA, 1929 bp, Homo sapiens
tccagaaaatatatgtcttccaactaagctacgtcttccaacaaatccatgtcttcctatatctccaggtcttccagcatctccagggcttccagcatctgctcgtcttccaacatctccacgtcttccagcatctctgtgtcttccagcatcttcatgtcttccaacaactacccagtcttccatcaactggctcaatatccatgtcttccaacgtctccagtgtgctgatcttctgacattcaggtcttccagtgtctgcaatatccagggtttccgatggcacctgtgtcaaggtcttccaacaactccgggtcttccagcgacttcaagtcttccaataatctcaaggtcttccagataatcctgagcttccagaaaatccacatcttccagacaatccatgtcttccggacaatccatgtcttccaagaagctccaagtcttccagtaaatcaagtcttccagcaaatccagtcttccagcaattactggtcttccaccaaatccagatcttccaggaaaatccacgtcttccaggaaatccatgtcttccaataatttcaaggtcttccatcaaatacagatcttccagctaatccatgtcttccagaaaaatctgtgtcttccaccaaatccaagaatcagtgtcttccagaaagaaatccaggtcttccagtcaatcagtgtcttccagaaagaaatccaggtcttccagtcagtcagtgtcttccagaaaaatctacgtcttccaccaaatccaggtcttccagtcaatccacatcttccggaaaaaatccaggtcttccagccaatatatgtcttcctgaagatccacgtcttccagaaaatccatgtcttccagaaaatccatgtcttccagtaacctcccagtcttccagaaaatccacgtcttcccaacaatccaagtcttccggataatttgggtcttcctgaaaatctacgtcttccaaaaaagccatgtcttccagaaaatccacatcttccaacaaagccatgtcttccagactatccatgtcttccagaaaatccttgtcttccctcaaatccatagcttccgaaaaatccaggtcttccaggaaatccgtgtcttccagcaaatccacgtcttccaacaaagccatgtcttccatcaaattaatgtcttccagcctacttgtgtcttccaacaaaggtcttccagcatctccagggcttccagcatctgctcgtcttccaacatctccacgtcttccagcatctctgtgtcttccagcatcttcatgtcttccaacaactacccagtcttccatcaactggctcaatatccatgtcttccaacgtctccagtgtgctgatcttctgacattcaggtcttccagtgtctgcaatatccagggtttccgatggcacctgtgtcaaggtcttccaacaactccgggtcttccagcgacttcaagtcttccaataatctcaaggtcttccagataatcctgagcttccagaaaatccacatcttccagacaatccatgtcttccggacaatccatgtcttccaagaagctccaagtcttccagtaaatcaagtcttccagcaaatccagtcttccagcaattactggtcttccaccaaatccagatcttccaggaaaatccacgtcttccaggaaatccatgtcttccaataatttcaaggtcttccatcaaatacagatcttccagctaatccatgtcttccagaaaaatctgtgtcttccaccaaatccaagtcttccagtaaatctagttcttccagaaaaatctagatcttccagtcaatcagtgtcttccagaaagaaatccaggtcttccagtcaatcagtgtcttccagaaagaaatccaggtcttccagtcagacagttgcatccagagacacttgcatccagagg

SEQ ID NO: 734333 - DNA, 768 bp, Homo sapiens
tccagaaaatatatgtcttccaactaagctacgtcttccaacaaatccatgtcttcctatatctccaggtcttccagcatctccagggcttccagcatctgctcgtcttccaacatctccacgtcttccagcatctctgtgtcttccagcatcttcatgtcttccaacaactacccagtcttccatcaactggctcaatatccatgtcttccaacgtctccagtgtgctgatcttctgacattcaggtcttccagtgtctgcaatatccagggtttccgatggcacctgtgtcaaggtcttccaacaactccgggtcttccagcgacttcaagtcttccaataatctcaaggtcttccagataatcctgagcttccagaaaatccacatcttccagacaatccatgtcttccggacaatccatgtcttccaagaagctccaagtcttccagtaaatcaagtcttccagcaaatccagtcttccagcaattactggtcttccaccaaatccagatcttccaggaaaatccacgtcttccaggaaatccatgtcttccaataatttcaaggtcttccatcaaatacagatcttccagctaatccatgtcttccagaaaaatctgtgtcttccaccaaatccaagaaatccaagtcttccagtaaatctagttcttccagaaaaatctagatcttccagtcaatcagtgtcttccagaaagaaatccaggtcttccagtcaatcagtgtcttccagaaagaaatccaggtc

SEQ ID NO: 734334 - DNA, 2287 bp, Homo sapiens; identical to SEQ ID NO: 734326

SEQ ID NO: 734335 - DNA, 2103 bp, Homo sapiens; identical to SEQ ID NO: 734327

SEQ ID NO: 734336 - DNA, 1833 bp, Homo sapiens
acagaggatccccggcatactggaccttctccgggtcttccagcgacttcaagtcttccaataatctcaaggtcttccagataatcctgagcttccagaaaatccacatcttccagacaatccatgtcttccggacaatccatgtcttccaagaagctccaagtcttccagtaaatcaagtcttccagcaaatccagtcttccagcaattactggtcttccaccaaatccagatcttccaggaaaatccacgtcttccaggaaatccatgtcttccaataatttcaaggtcttccatcaaatacagatcttccagctaatccatgtcttccagaaaaatctgtgtcttccaccaaatccaagaatcagtgtcttccagaaagaaatccaggtcttccagtcaatcagtgtcttccagaaagaaatccaggtcttccagtcagtcagtgtcttccagaaaaatctacgtcttccaccaaatccaggtcttccagtcaatccacatcttccggaaaaaatccaggtcttccagccaatatatgtcttcctgaagatccacgtcttccagaaaatccatgtcttccagaaaatccatgtcttccagtaacctcccagtcttccagaaaatccacgtcttcccaacaatccaagtcttccggataatttgggtcttcctgaaaatctacgtcttccaaaaaagccatgtcttccagaaaatccacatcttccaacaaagccatgtcttccagactatccatgtcttccagaaaatccttgtcttccctcaaatccatagcttccgaaaaatccaggtcttccaggaaatccgtgtcttccagcaaatccacgtcttccaacaaagccatgtcttccatcaaattaatgtcttccagcctacttgtgtcttccaacaaaggtacgtcttccaacaaaggtacgtcttccaacaaaggtatgtcttccaacaaaggtacgtcttccagaaaatccacgtcttccaaccaagccatgtcttccagaaaatccacgtcttccagaaaatatatgtcttccaactaagctacgtcttccaacaaatccatgtcttcctatatctccaggtcttccagcatctccagggcttccagcatctgctcgtcttccaacatctccacgtcttccagcatctctgtgtcttccagcatcttcatgtcttccaacaactacccagtcttccatcaactggctcaatatccatgtcttccaacgtctccagtgtgctgatcttctgacattcaggtcttccagtgtctgcaatatccagggtttccgatggcacctgtgtcaaggtcttccaacaactccgggtcttccagcgacttcaagtcttccaataatctcaaggtcttccagataatcctgagcttccagaaaatccacatcttccagacaatccatgtcttccggacaatccatgtcttccaagaagctccaagtcttccagtaaatcaagtcttccagcaaatccagtcttccagcaattactggtcttccaccaaatccagatcttccaggaaaatccacgtcttccaggaaatccatgtcttccaataatttcaaggtcttccatcaaatacagatcttccagctaatccatgtcttccagaaaaatctgtgtcttccaccaaatccaagtcttccagtaaatctagttcttccagaaaaatctagatcttccagtcaatcagtgtcttccagaaagaaatccaggtcttccagtcaatcagtgtcttccagaaagaaatccaggtcttccagtcagacagttgcatccagagacacttgcatccagagg

SEQ ID NO: 734337 - DNA, 1960 bp, Homo sapiens
acagaggatccccggcatactggaccttctccgggtcttccagcgacttcaagtcttccaataatctcaaggtcttccagataatcctgagcttccagaaaatccacatcttccagacaatccatgtcttccggacaatccatgtcttccaagaagctccaagtcttccagtaaatcaagtcttccagcaaatccagtcttccagcaattactggtcttccaccaaatccagatcttccaggaaaatccacgtcttccaggaaatccatgtcttccaataatttcaaggtcttccatcaaatacagatcttccagctaatccatgtcttccagaaaaatctgtgtcttccaccaaatccaagaatcagtgtcttccagaaagaaatccaggtcttccagtcaatcagtgtcttccagaaagaaatccaggtcttccagtcagtcagtgtcttccagaaaaatctacgtcttccaccaaatccaggtcttccagtcaatccacatcttccggaaaaaatccaggtcttccagccaatatatgtcttcctgaagatccacgtcttccagaaaatccatgtcttccagaaaatccatgtcttccagtaacctcccagtcttccagaaaatccacgtcttcccaacaatccaagtcttccggataatttgggtcttcctgaaaatctacgtcttccaaaaaagccatgtcttccagaaaatccacatcttccaatggcctccaggtcttccagactatccatgtcttccagaaaatccttgtcttcccttaaatctatagcttccaaaaaatccgggtcttccaggaaatccgtgtcttccagcaagtccacgtcttccaacaaagccatgtcttccagactatccatgtcttccagaaaatccttgtcttccctcaaatccatagcttccgaaaaatccaggtcttccaggaaatccgtgtcttccagcaaatccacgtcttccaacaaagccatgtcttccatcaaattaatgtcttccagcctacttgtgtcttccaacaaaggtacgtcttccaacaaaggtacgtcttccaacaaaggtatgtcttccaacaaaggtacgtcttccagaaaatccacgtcttccaaccaagccatgtcttccagaaaatccacgtcttccagaaaatatatgtcttccaactaagctacgtcttccaacaaatccatgtcttcctatatctccaggtcttccagcatctccagggcttccagcatctgctcgtcttccaacatctccacgtcttccagcatctctgtgtcttccagcatcttcatgtcttccaacaactacccagtcttccatcaactggctcaatatccatgtcttccaacgtctccagtgtgctgatcttctgacattcaggtcttccagtgtctgcaatatccagggtttccgatggcacctgtgtcaaggtcttccaacaactccgggtcttccagcgacttcaagtcttccaataatctcaaggtcttccagataatcctgagcttccagaaaatccacatcttccagacaatccatgtcttccggacaatccatgtcttccaagaagctccaagtcttccagtaaatcaagtcttccagcaaatccagtcttccagcaattactggtcttccaccaaatccagatcttccaggaaaatccacgtcttccaggaaatccatgtcttccaataatttcaaggtcttccatcaaatacagatcttccagctaatccatgtcttccagaaaaatctgtgtcttccaccaaatccaagtcttccagtaaatctagttcttccagaaaaatctagatcttccagtcaatcagtgtcttccagaaagaaatccaggtcttccagtcaatcagtgtcttccagaaagaaatccaggtcttccagtcagacagttgcatccagagacacttgcatccagagg

SEQ ID NO: 734338 - DNA, 1776 bp, Homo sapiens
acagaggatccccggcatactggaccttctccgggtcttccagcgacttcaagtcttccaataatctcaaggtcttccagataatcctgagcttccagaaaatccacatcttccagacaatccatgtcttccggacaatccatgtcttccaagaagctccaagtcttccagtaaatcaagtcttccagcaaatccagtcttccagcaattactggtcttccaccaaatccagatcttccaggaaaatccacgtcttccaggaaatccatgtcttccaataatttcaaggtcttccatcaaatacagatcttccagctaatccatgtcttccagaaaaatctgtgtcttccaccaaatccaagaatcagtgtcttccagaaagaaatccaggtcttccagtcaatcagtgtcttccagaaagaaatccaggtcttccagtcagtcagtgtcttccagaaaaatctacgtcttccaccaaatccaggtcttccagtcaatccacatcttccggaaaaaatccaggtcttccagccaatatatgtcttcctgaagatccacgtcttccagaaaatccatgtcttccagaaaatccatgtcttccagtaacctcccagtcttccagaaaatccacgtcttcccaacaatccaagtcttccggataatttgggtcttcctgaaaatctacgtcttccaaaaaagccatgtcttccagaaaatccacatcttccaatggcctccaggtcttccagactatccatgtcttccagaaaatccttgtcttcccttaaatctatagcttccaaaaaatccgggtcttccaggaaatccgtgtcttccagcaagtccacgtcttccaacaaagccatgtcttccagactatccatgtcttccagaaaatccttgtcttccctcaaatccatagcttccgaaaaatccaggtcttccaggaaatccgtgtcttccagcaaatccacgtcttccaacaaagccatgtcttccatcaaattaatgtcttccagcctacttgtgtcttccaacaaaggtcttccagcatctccagggcttccagcatctgctcgtcttccaacatctccacgtcttccagcatctctgtgtcttccagcatcttcatgtcttccaacaactacccagtcttccatcaactggctcaatatccatgtcttccaacgtctccagtgtgctgatcttctgacattcaggtcttccagtgtctgcaatatccagggtttccgatggcacctgtgtcaaggtcttccaacaactccgggtcttccagcgacttcaagtcttccaataatctcaaggtcttccagataatcctgagcttccagaaaatccacatcttccagacaatccatgtcttccggacaatccatgtcttccaagaagctccaagtcttccagtaaatcaagtcttccagcaaatccagtcttccagcaattactggtcttccaccaaatccagatcttccaggaaaatccacgtcttccaggaaatccatgtcttccaataatttcaaggtcttccatcaaatacagatcttccagctaatccatgtcttccagaaaaatctgtgtcttccaccaaatccaagtcttccagtaaatctagttcttccagaaaaatctagatcttccagtcaatcagtgtcttccagaaagaaatccaggtcttccagtcaatcagtgtcttccagaaagaaatccaggtcttccagtcagacagttgcatccagagacacttgcatccagagg

SEQ ID NO: 734339 - DNA, 1649 bp, Homo sapiens
acagaggatccccggcatactggaccttctccgggtcttccagcgacttcaagtcttccaataatctcaaggtcttccagataatcctgagcttccagaaaatccacatcttccagacaatccatgtcttccggacaatccatgtcttccaagaagctccaagtcttccagtaaatcaagtcttccagcaaatccagtcttccagcaattactggtcttccaccaaatccagatcttccaggaaaatccacgtcttccaggaaatccatgtcttccaataatttcaaggtcttccatcaaatacagatcttccagctaatccatgtcttccagaaaaatctgtgtcttccaccaaatccaagaatcagtgtcttccagaaagaaatccaggtcttccagtcaatcagtgtcttccagaaagaaatccaggtcttccagtcagtcagtgtcttccagaaaaatctacgtcttccaccaaatccaggtcttccagtcaatccacatcttccggaaaaaatccaggtcttccagccaatatatgtcttcctgaagatccacgtcttccagaaaatccatgtcttccagaaaatccatgtcttccagtaacctcccagtcttccagaaaatccacgtcttcccaacaatccaagtcttccggataatttgggtcttcctgaaaatctacgtcttccaaaaaagccatgtcttccagaaaatccacatcttccaacaaagccatgtcttccagactatccatgtcttccagaaaatccttgtcttccctcaaatccatagcttccgaaaaatccaggtcttccaggaaatccgtgtcttccagcaaatccacgtcttccaacaaagccatgtcttccatcaaattaatgtcttccagcctacttgtgtcttccaacaaaggtcttccagcatctccagggcttccagcatctgctcgtcttccaacatctccacgtcttccagcatctctgtgtcttccagcatcttcatgtcttccaacaactacccagtcttccatcaactggctcaatatccatgtcttccaacgtctccagtgtgctgatcttctgacattcaggtcttccagtgtctgcaatatccagggtttccgatggcacctgtgtcaaggtcttccaacaactccgggtcttccagcgacttcaagtcttccaataatctcaaggtcttccagataatcctgagcttccagaaaatccacatcttccagacaatccatgtcttccggacaatccatgtcttccaagaagctccaagtcttccagtaaatcaagtcttccagcaaatccagtcttccagcaattactggtcttccaccaaatccagatcttccaggaaaatccacgtcttccaggaaatccatgtcttccaataatttcaaggtcttccatcaaatacagatcttccagctaatccatgtcttccagaaaaatctgtgtcttccaccaaatccaagtcttccagtaaatctagttcttccagaaaaatctagatcttccagtcaatcagtgtcttccagaaagaaatccaggtcttccagtcaatcagtgtcttccagaaagaaatccaggtcttccagtcagacagttgcatccagagacacttgcatccagagg

SEQ ID NO: 734340 - DNA, 488 bp, Homo sapiens
acagaggatccccggcatactggaccttctccgggtcttccagcgacttcaagtcttccaataatctcaaggtcttccagataatcctgagcttccagaaaatccacatcttccagacaatccatgtcttccggacaatccatgtcttccaagaagctccaagtcttccagtaaatcaagtcttccagcaaatccagtcttccagcaattactggtcttccaccaaatccagatcttccaggaaaatccacgtcttccaggaaatccatgtcttccaataatttcaaggtcttccatcaaatacagatcttccagctaatccatgtcttccagaaaaatctgtgtcttccaccaaatccaagaaatccaagtcttccagtaaatctagttcttccagaaaaatctagatcttccagtcaatcagtgtcttccagaaagaaatccaggtcttccagtcaatcagtgtcttccagaaagaaatccaggtc

SEQ ID NO: 734341 - DNA, 2007 bp, Homo sapiens; identical to SEQ ID NO: 734320

SEQ ID NO: 734342 - DNA, 1823 bp, Homo sapiens; identical to SEQ ID NO: 734321

SEQ ID NO: 734343 - DNA, 1173 bp, Homo sapiens
  misc_feature (31)..(31): n is a, c, g, or t
actagtccacggttggctagtccgggtcttncaggaaatccgtgtcttccagcaagtccacgtcttccaacaaagccatgtcttccagactatccatgtcttccagaaaatccttgtcttccctcaaatccatagcttccgaaaaatccaggtcttccaggaaatccgtgtcttccagcaaatccacgtcttccaacaaagccatgtcttccatcaaattaatgtcttccagcctacttgtgtcttccaacaaaggtacgtcttccaacaaaggtacgtcttccaacaaaggtatgtcttccaacaaaggtacgtcttccagaaaatccacgtcttccaaccaagccatgtcttccagaaaatccacgtcttccagaaaatatatgtcttccaactaagctacgtcttccaacaaatccatgtcttcctatatctccaggtcttccagcatctccagggcttccagcatctgctcgtcttccaacatctccacgtcttccagcatctctgtgtcttccagcatcttcatgtcttccaacaactacccagtcttccatcaactggctcaatatccatgtcttccaacgtctccagtgtgctgatcttctgacattcaggtcttccagtgtctgcaatatccagggtttccgatggcacctgtgtcaaggtcttccaacaactccgggtcttccagcgacttcaagtcttccaataatctcaaggtcttccagataatcctgagcttccagaaaatccacatcttccagacaatccatgtcttccggacaatccatgtcttccaagaagctccaagtcttccagtaaatcaagtcttccagcaaatccagtcttccagcaattactggtcttccaccaaatccagatcttccaggaaaatccacgtcttccaggaaatccatgtcttccaataatttcaaggtcttccatcaaatacagatcttccagctaatccatgtcttccagaaaaatctgtgtcttccaccaaatccaagtcttccagtaaatctagttcttccagaaaaatctagatcttccagtcaatcagtgtcttccagaaagaaatccaggtcttccagtcaatcagtgtcttccagaaagaaatccaggtcttccagtcagacagttgcatccagagacacttgcatccagagg

SEQ ID NO: 734344 - DNA, 989 bp, Homo sapiens
  misc_feature (31)..(31): n is a, c, g, or t
actagtccacggttggctagtccgggtcttncaggaaatccgtgtcttccagcaagtccacgtcttccaacaaagccatgtcttccagactatccatgtcttccagaaaatccttgtcttccctcaaatccatagcttccgaaaaatccaggtcttccaggaaatccgtgtcttccagcaaatccacgtcttccaacaaagccatgtcttccatcaaattaatgtcttccagcctacttgtgtcttccaacaaaggtcttccagcatctccagggcttccagcatctgctcgtcttccaacatctccacgtcttccagcatctctgtgtcttccagcatcttcatgtcttccaacaactacccagtcttccatcaactggctcaatatccatgtcttccaacgtctccagtgtgctgatcttctgacattcaggtcttccagtgtctgcaatatccagggtttccgatggcacctgtgtcaaggtcttccaacaactccgggtcttccagcgacttcaagtcttccaataatctcaaggtcttccagataatcctgagcttccagaaaatccacatcttccagacaatccatgtcttccggacaatccatgtcttccaagaagctccaagtcttccagtaaatcaagtcttccagcaaatccagtcttccagcaattactggtcttccaccaaatccagatcttccaggaaaatccacgtcttccaggaaatccatgtcttccaataatttcaaggtcttccatcaaatacagatcttccagctaatccatgtcttccagaaaaatctgtgtcttccaccaaatccaagtcttccagtaaatctagttcttccagaaaaatctagatcttccagtcaatcagtgtcttccagaaagaaatccaggtcttccagtcaatcagtgtcttccagaaagaaatccaggtcttccagtcagacagttgcatccagagacacttgcatccagagg

SEQ ID NO: 734345 - DNA, 1511 bp, Homo sapiens
  misc_feature (39)..(39): n is a, c, g, or t
gacgaatcatagcttccagaaaaatctagatcttccagncaatcagtgtcttccagaaagaaatccaggtcttccagtcaatcagtgtcttccagaaagaaatccaggtcttccagtcagtcagtgtcttccagaaaaatctacgtcttccaccaaatccaggtcttccagtcaatccacatcttccggaaaaaatccaggtcttccagccaatatatgtcttcctgaagatccacgtcttccagaaaatccatgtcttccagaaaatccatgtcttccagtaacctcccagtcttccagaaaatccacgtcttcccaacaatccaagtcttccggataatttgggtcttcctgaaaatctacgtcttccaaaaaagccatgtcttccagaaaatccacatcttccaacaaagccatgtcttccagactatccatgtcttccagaaaatccttgtcttccctcaaatccatagcttccgaaaaatccaggtcttccaggaaatccgtgtcttccagcaaatccacgtcttccaacaaagccatgtcttccatcaaattaatgtcttccagcctacttgtgtcttccaacaaaggtacgtcttccaacaaaggtacgtcttccaacaaaggtatgtcttccaacaaaggtacgtcttccagaaaatccacgtcttccaaccaagccatgtcttccagaaaatccacgtcttccagaaaatatatgtcttccaactaagctacgtcttccaacaaatccatgtcttcctatatctccaggtcttccagcatctccagggcttccagcatctgctcgtcttccaacatctccacgtcttccagcatctctgtgtcttccagcatcttcatgtcttccaacaactacccagtcttccatcaactggctcaatatccatgtcttccaacgtctccagtgtgctgatcttctgacattcaggtcttccagtgtctgcaatatccagggtttccgatggcacctgtgtcaaggtcttccaacaactccgggtcttccagcgacttcaagtcttccaataatctcaaggtcttccagataatcctgagcttccagaaaatccacatcttccagacaatccatgtcttccggacaatccatgtcttccaagaagctccaagtcttccagtaaatcaagtcttccagcaaatccagtcttccagcaattactggtcttccaccaaatccagatcttccaggaaaatccacgtcttccaggaaatccatgtcttccaataatttcaaggtcttccatcaaatacagatcttccagctaatccatgtcttccagaaaaatctgtgtcttccaccaaatccaagtcttccagtaaatctagttcttccagaaaaatctagatcttccagtcaatcagtgtcttccagaaagaaatccaggtcttccagtcaatcagtgtcttccagaaagaaatccaggtcttccagtcagacagttgcatccagagacacttgcatccagagg

SEQ ID NO: 734346 - DNA, 1638 bp, Homo sapiens
  misc_feature (39)..(39): n is a, c, g, or t
gacgaatcatagcttccagaaaaatctagatcttccagncaatcagtgtcttccagaaagaaatccaggtcttccagtcaatcagtgtcttccagaaagaaatccaggtcttccagtcagtcagtgtcttccagaaaaatctacgtcttccaccaaatccaggtcttccagtcaatccacatcttccggaaaaaatccaggtcttccagccaatatatgtcttcctgaagatccacgtcttccagaaaatccatgtcttccagaaaatccatgtcttccagtaacctcccagtcttccagaaaatccacgtcttcccaacaatccaagtcttccggataatttgggtcttcctgaaaatctacgtcttccaaaaaagccatgtcttccagaaaatccacatcttccaatggcctccaggtcttccagactatccatgtcttccagaaaatccttgtcttcccttaaatctatagcttccaaaaaatccgggtcttccaggaaatccgtgtcttccagcaagtccacgtcttccaacaaagccatgtcttccagactatccatgtcttccagaaaatccttgtcttccctcaaatccatagcttccgaaaaatccaggtcttccaggaaatccgtgtcttccagcaaatccacgtcttccaacaaagccatgtcttccatcaaattaatgtcttccagcctacttgtgtcttccaacaaaggtacgtcttccaacaaaggtacgtcttccaacaaaggtatgtcttccaacaaaggtacgtcttccagaaaatccacgtcttccaaccaagccatgtcttccagaaaatccacgtcttccagaaaatatatgtcttccaactaagctacgtcttccaacaaatccatgtcttcctatatctccaggtcttccagcatctccagggcttccagcatctgctcgtcttccaacatctccacgtcttccagcatctctgtgtcttccagcatcttcatgtcttccaacaactacccagtcttccatcaactggctcaatatccatgtcttccaacgtctccagtgtgctgatcttctgacattcaggtcttccagtgtctgcaatatccagggtttccgatggcacctgtgtcaaggtcttccaacaactccgggtcttccagcgacttcaagtcttccaataatctcaaggtcttccagataatcctgagcttccagaaaatccacatcttccagacaatccatgtcttccggacaatccatgtcttccaagaagctccaagtcttccagtaaatcaagtcttccagcaaatccagtcttccagcaattactggtcttccaccaaatccagatcttccaggaaaatccacgtcttccaggaaatccatgtcttccaataatttcaaggtcttccatcaaatacagatcttccagctaatccatgtcttccagaaaaatctgtgtcttccaccaaatccaagtcttccagtaaatctagttcttccagaaaaatctagatcttccagtcaatcagtgtcttccagaaagaaatccaggtcttccagtcaatcagtgtcttccagaaagaaatccaggtcttccagtcagacagttgcatccagagacacttgcatccagagg

SEQ ID NO: 734347 - DNA, 1454 bp, Homo sapiens
  misc_feature (39)..(39): n is a, c, g, or t
gacgaatcatagcttccagaaaaatctagatcttccagncaatcagtgtcttccagaaagaaatccaggtcttccagtcaatcagtgtcttccagaaagaaatccaggtcttccagtcagtcagtgtcttccagaaaaatctacgtcttccaccaaatccaggtcttccagtcaatccacatcttccggaaaaaatccaggtcttccagccaatatatgtcttcctgaagatccacgtcttccagaaaatccatgtcttccagaaaatccatgtcttccagtaacctcccagtcttccagaaaatccacgtcttcccaacaatccaagtcttccggataatttgggtcttcctgaaaatctacgtcttccaaaaaagccatgtcttccagaaaatccacatcttccaatggcctccaggtcttccagactatccatgtcttccagaaaatccttgtcttcccttaaatctatagcttccaaaaaatccgggtcttccaggaaatccgtgtcttccagcaagtccacgtcttccaacaaagccatgtcttccagactatccatgtcttccagaaaatccttgtcttccctcaaatccatagcttccgaaaaatccaggtcttccaggaaatccgtgtcttccagcaaatccacgtcttccaacaaagccatgtcttccatcaaattaatgtcttccagcctacttgtgtcttccaacaaaggtcttccagcatctccagggcttccagcatctgctcgtcttccaacatctccacgtcttccagcatctctgtgtcttccagcatcttcatgtcttccaacaactacccagtcttccatcaactggctcaatatccatgtcttccaacgtctccagtgtgctgatcttctgacattcaggtcttccagtgtctgcaatatccagggtttccgatggcacctgtgtcaaggtcttccaacaactccgggtcttccagcgacttcaagtcttccaataatctcaaggtcttccagataatcctgagcttccagaaaatccacatcttccagacaatccatgtcttccggacaatccatgtcttccaagaagctccaagtcttccagtaaatcaagtcttccagcaaatccagtcttccagcaattactggtcttccaccaaatccagatcttccaggaaaatccacgtcttccaggaaatccatgtcttccaataatttcaaggtcttccatcaaatacagatcttccagctaatccatgtcttccagaaaaatctgtgtcttccaccaaatccaagtcttccagtaaatctagttcttccagaaaaatctagatcttccagtcaatcagtgtcttccagaaagaaatccaggtcttccagtcaatcagtgtcttccagaaagaaatccaggtcttccagtcagacagttgcatccagagacacttgcatccagagg

SEQ ID NO: 734348 - DNA, 1327 bp, Homo sapiens
  misc_feature (39)..(39): n is a, c, g, or t
gacgaatcatagcttccagaaaaatctagatcttccagncaatcagtgtcttccagaaagaaatccaggtcttccagtcaatcagtgtcttccagaaagaaatccaggtcttccagtcagtcagtgtcttccagaaaaatctacgtcttccaccaaatccaggtcttccagtcaatccacatcttccggaaaaaatccaggtcttccagccaatatatgtcttcctgaagatccacgtcttccagaaaatccatgtcttccagaaaatccatgtcttccagtaacctcccagtcttccagaaaatccacgtcttcccaacaatccaagtcttccggataatttgggtcttcctgaaaatctacgtcttccaaaaaagccatgtcttccagaaaatccacatcttccaacaaagccatgtcttccagactatccatgtcttccagaaaatccttgtcttccctcaaatccatagcttccgaaaaatccaggtcttccaggaaatccgtgtcttccagcaaatccacgtcttccaacaaagccatgtcttccatcaaattaatgtcttccagcctacttgtgtcttccaacaaaggtcttccagcatctccagggcttccagcatctgctcgtcttccaacatctccacgtcttccagcatctctgtgtcttccagcatcttcatgtcttccaacaactacccagtcttccatcaactggctcaatatccatgtcttccaacgtctccagtgtgctgatcttctgacattcaggtcttccagtgtctgcaatatccagggtttccgatggcacctgtgtcaaggtcttccaacaactccgggtcttccagcgacttcaagtcttccaataatctcaaggtcttccagataatcctgagcttccagaaaatccacatcttccagacaatccatgtcttccggacaatccatgtcttccaagaagctccaagtcttccagtaaatcaagtcttccagcaaatccagtcttccagcaattactggtcttccaccaaatccagatcttccaggaaaatccacgtcttccaggaaatccatgtcttccaataatttcaaggtcttccatcaaatacagatcttccagctaatccatgtcttccagaaaaatctgtgtcttccaccaaatccaagtcttccagtaaatctagttcttccagaaaaatctagatcttccagtcaatcagtgtcttccagaaagaaatccaggtcttccagtcaatcagtgtcttccagaaagaaatccaggtcttccagtcagacagttgcatccagagacacttgcatccagagg

SEQ ID NO: 734349 - DNA, 466 bp, Homo sapiens
  misc_feature (39)..(39): n is a, c, g, or t
gacgaatcatagcttccagaaaaatctagatcttccagncaatcagtgtcttccagaaagaaatccaggtcttccagtcaatcagtgtcttccagaaagaaatccaggtcttccagtcagtcagtgtcttccagaaaaatctacgtcttccaccaaatccaggtcttccagtcaatccacatcttccggaaaaaatccaggtcttccagccaatatatgtcttcctgaagatccacgtcttccagaaaatccatgtcttccagaaaatccatgtcttccagtaacctcccagtcttccagaaaatccacgtcttcccaacaatccaagtcttccggataatttgggtcttcctgaaaatctacgtcttccaaaaaagccatgtcttccagaaaatccacatcttccaatggcctccagtcttccagacatcgattgcggttactaggtactctagtacagctagcg

SEQ ID NO: 734350 - DNA, 1115 bp, Homo sapiens
tccagaaaatatatgtcttccaactaagctacgtcttccaacaaatccatgtcttcctatatctccaggtcttccagcatctccagggcttccagcatctgctcgtcttccaacatctccacgtcttccagcatctctgtgtcttccagcatcttcatgtcttccaacaactacccagtcttccatcaactggctcaatatccatgtcttccaacgtctccagtgtgctgatcttctgacattcaggtcttccagtgtctgcaatatccagggtttccgatggcacctgtgtcaaggtcttccaacaactccgggtcttccagcgacttcaagtcttccaataatctcaaggtcttccagataatcctgagcttccagaaaatccacatcttccagacaatccatgtcttccggacaatccatgtcttccaagaagctccaagtcttccagtaaatcaagtcttccagcaaatccagtcttccagcaattactggtcttccaccaaatccagatcttccaggaaaatccacgtcttccaggaaatccatgtcttccaataatttcaaggtcttccatcaaatacagatcttccagctaatccatgtcttccagaaaaatctgtgtcttccaccaaatccaagtcttccagtaaatctagttcttccagaaaaatctagatcttccagtcaatcagtgtcttccagaaagaaatccaggtcttccagtcaatcagtgtcttccagaaagaaatccaggtcttccagtcagtcagtgtcttccagaaaaatctacgtcttccaccaaatccaggtcttccagtcaatccacatcttccggaaaaaatccaggtcttccagccaatatatgtcttcctgaagatccacgtcttccagaaaatccatgtcttccagaaaatccatgtcttccagtaacctcccagtcttccagaaaatccacgtcttcccaacaatccaagtcttccggataatttgggtcttcctgaaaatctacgtcttccaaaaaagccatgtcttccagaaaatccacatcttccaatggcctccagtcttccagacatcgattgcggttactaggtactctagtacagctagcg

SEQ ID NO: 734351 - DNA, 1068 bp, Homo sapiens
tccagaaaatatatgtcttccaactaagctacgtcttccaacaaatccatgtcttcctatatctccaggtcttccagcatctccagggcttccagcatctgctcgtcttccaacatctccacgtcttccagcatctctgtgtcttccagcatcttcatgtcttccaacaactacccagtcttccatcaactggctcaatatccatgtcttccaacgtctccagtgtgctgatcttctgacattcaggtcttccagtgtctgcaatatccagggtttccgatggcacctgtgtcaaggtcttccaacaactccgggtcttccagcgacttcaagtcttccaataatctcaaggtcttccagataatcctgagcttccagaaaatccacatcttccagacaatccatgtcttccggacaatccatgtcttccaagaagctccaagtcttccagtaaatcaagtcttccagcaaatccagtcttccagcaattactggtcttccaccaaatccagatcttccaggaaaatccacgtcttccaggaaatccatgtcttccaataatttcaaggtcttccatcaaatacagatcttccagctaatccatgtcttccagaaaaatctgtgtcttccaccaaatccaagaatcagtgtcttccagaaagaaatccaggtcttccagtcaatcagtgtcttccagaaagaaatccaggtcttccagtcagtcagtgtcttccagaaaaatctacgtcttccaccaaatccaggtcttccagtcaatccacatcttccggaaaaaatccaggtcttccagccaatatatgtcttcctgaagatccacgtcttccagaaaatccatgtcttccagaaaatccatgtcttccagtaacctcccagtcttccagaaaatccacgtcttcccaacaatccaagtcttccggataatttgggtcttcctgaaaatctacgtcttccaaaaaagccatgtcttccagaaaatccacatcttccaatggcctccagtcttccagacatcgattgcggttactaggtactctagtacagctagcg

SEQ ID NO: 734352 - DNA, 865 bp, Homo sapiens
  misc_feature (713)..(713): n is a, c, g, or t
tccagaaaatatatgtcttccaactaagctacgtcttccaacaaatccatgtcttcctatatctccaggtcttccagcatctccagggcttccagcatctgctcgtcttccaacatctccacgtcttccagcatctctgtgtcttccagcatcttcatgtcttccaacaactacccagtcttccatcaactggctcaatatccatgtcttccaacgtctccagtgtgctgatcttctgacattcaggtcttccagtgtctgcaatatccagggtttccgatggcacctgtgtcaaggtcttccaacaactccgggtcttccagcgacttcaagtcttccaataatctcaaggtcttccagataatcctgagcttccagaaaatccacatcttccagacaatccatgtcttccggacaatccatgtcttccaagaagctccaagtcttccagtaaatcaagtcttccagcaaatccagtcttccagcaattactggtcttccaccaaatccagatcttccaggaaaatccacgtcttccaggaaatccatgtcttccaataatttcaaggtcttccatcaaatacagatcttccagctaatccatgtcttccagaaaaatctgtgtcttccaccaaatccaagtcttccagtaaatctagttcttccagaaaaatctagatcttccagtctgacattcaggtcttccagtgtcngcaatatccagggtttccgatggcacctgtgtcaaggtcttccaacaactccgggtcttccagcgacttcaagtcttccaataatctcaaggtcttccagataatcctgagcttccagaaaatccacatcttccagacaaggtagagccgag

SEQ ID NO: 734353 - DNA, 835 bp, Homo sapiens
acagaggatccccggcatactggaccttctccgggtcttccagcgacttcaagtcttccaataatctcaaggtcttccagataatcctgagcttccagaaaatccacatcttccagacaatccatgtcttccggacaatccatgtcttccaagaagctccaagtcttccagtaaatcaagtcttccagcaaatccagtcttccagcaattactggtcttccaccaaatccagatcttccaggaaaatccacgtcttccaggaaatccatgtcttccaataatttcaaggtcttccatcaaatacagatcttccagctaatccatgtcttccagaaaaatctgtgtcttccaccaaatccaagtcttccagtaaatctagttcttccagaaaaatctagatcttccagtcaatcagtgtcttccagaaagaaatccaggtcttccagtcaatcagtgtcttccagaaagaaatccaggtcttccagtcagtcagtgtcttccagaaaaatctacgtcttccaccaaatccaggtcttccagtcaatccacatcttccggaaaaaatccaggtcttccagccaatatatgtcttcctgaagatccacgtcttccagaaaatccatgtcttccagaaaatccatgtcttccagtaacctcccagtcttccagaaaatccacgtcttcccaacaatccaagtcttccggataatttgggtcttcctgaaaatctacgtcttccaaaaaagccatgtcttccagaaaatccacatcttccaatggcctccagtcttccagacatcgattgcggttactaggtactctagtacagctagcg

SEQ ID NO: 734354 - DNA, 788 bp, Homo sapiens
acagaggatccccggcatactggaccttctccgggtcttccagcgacttcaagtcttccaataatctcaaggtcttccagataatcctgagcttccagaaaatccacatcttccagacaatccatgtcttccggacaatccatgtcttccaagaagctccaagtcttccagtaaatcaagtcttccagcaaatccagtcttccagcaattactggtcttccaccaaatccagatcttccaggaaaatccacgtcttccaggaaatccatgtcttccaataatttcaaggtcttccatcaaatacagatcttccagctaatccatgtcttccagaaaaatctgtgtcttccaccaaatccaagaatcagtgtcttccagaaagaaatccaggtcttccagtcaatcagtgtcttccagaaagaaatccaggtcttccagtcagtcagtgtcttccagaaaaatctacgtcttccaccaaatccaggtcttccagtcaatccacatcttccggaaaaaatccaggtcttccagccaatatatgtcttcctgaagatccacgtcttccagaaaatccatgtcttccagaaaatccatgtcttccagtaacctcccagtcttccagaaaatccacgtcttcccaacaatccaagtcttccggataatttgggtcttcctgaaaatctacgtcttccaaaaaagccatgtcttccagaaaatccacatcttccaatggcctccagtcttccagacatcgattgcggttactaggtactctagtacagctagcg

SEQ ID NO: 734355 - DNA, 585 bp, Homo sapiens
  misc_feature (433)..(433): n is a, c, g, or t
acagaggatccccggcatactggaccttctccgggtcttccagcgacttcaagtcttccaataatctcaaggtcttccagataatcctgagcttccagaaaatccacatcttccagacaatccatgtcttccggacaatccatgtcttccaagaagctccaagtcttccagtaaatcaagtcttccagcaaatccagtcttccagcaattactggtcttccaccaaatccagatcttccaggaaaatccacgtcttccaggaaatccatgtcttccaataatttcaaggtcttccatcaaatacagatcttccagctaatccatgtcttccagaaaaatctgtgtcttccaccaaatccaagtcttccagtaaatctagttcttccagaaaaatctagatcttccagtctgacattcaggtcttccagtgtcngcaatatccagggtttccgatggcacctgtgtcaaggtcttccaacaactccgggtcttccagcgacttcaagtcttccaataatctcaaggtcttccagataatcctgagcttccagaaaatccacatcttccagacaaggtagagccgag

SEQ ID NO: 734356 - DNA, 564 bp, Homo sapiens
  misc_feature (313)..(315): n is a, c, g, or t
  misc_feature (318)..(318): n is a, c, g, or t
  misc_feature (321)..(321): n is a, c, g, or t
  misc_feature (336)..(336): n is a, c, g, or t
  misc_feature (338)..(338): n is a, c, g, or t
  misc_feature (352)..(352): n is a, c, g, or t
  misc_feature (358)..(358): n is a, c, g, or t
acagaggatccccggcatactggaccttttccagtaacctcccagtcttccagaaaatccacgtcttcccaacaatccaagtcttccggataatttgggtcttcctgaaaatctacgtcttccaaaaaagccatgtcttccagaaaatccacatcttccaatggcctccaggtcttccagactatccatgtcttccagaaaatccttgtcttcccttaaatctatagcttccaaaaaatccgggtcttccaggaaatccgtgtcttccagcaagtccacgtcttccaacaaagccatgtcttccagaaagctnnntantcnggaagacatggcttngntggaagacgtgganttgctngaagacacggatttcctggaatccccggtcttccaggaaatccaagtcttccagtaaatctagttcttccagaaaaatctagatcttccagtcaatcagtgtcttccagaaagaaatccaggtcttccagtcaatcagtgtcttccagaaagaaatccaggtcttccagtcagacagttgcatccagagacacttgcatccagagg

SEQ ID NO: 734357 - DNA, 1985 bp, Homo sapiens
tccagaaaatatatgtcttccaactaagctacgtcttccaacaaatccatgtcttcctatatctccaggtcttccagcatctccagggcttccagcatctgctcgtcttccaacatctccacgtcttccagcatctctgtgtcttccagcatcttcatgtcttccaacaactacccagtcttccatcaactggctcaatatccatgtcttccaacgtctccagtgtgctgatcttctgacattcaggtcttccagtgtctgcaatatccagggtttccgatggcacctgtgtcaaggtcttccaacaactccgggtcttccagcgacttcaagtcttccaataatctcaaggtcttccagataatcctgagcttccagaaaatccacatcttccagacaatccatgtcttccggacaatccatgtcttccaagaagctccaagtcttccagtaaatcaagtcttccagcaaatccagtcttccagcaattactggtcttccaccaaatccagatcttccaggaaaatccacgtcttccaggaaatccatgtcttccaataatttcaaggtcttccatcaaatacagatcttccagctaatccatgtcttccagaaaaatctgtgtcttccaccaaatccaagtcttccagtaaatctagttcttccagaaaaatctagatcttccagtcaatcagtgtcttccagaaagaaatccaggtcttccagtcaatcagtgtcttccagaaatcttccaatggcctccaggtcttccagactatccatgtcttccagaaaatccttgtcttcccttaaatctatagcttccaaaaaatccgggtcttccaggaaatccgtgtcttccagcaagtccacgtcttccaacaaagccatgtcttccagactatccatgtcttccagaaaatccttgtcttccctcaaatccatagcttccgaaaaatccaggtcttccaggaaatccgtgtcttccagcaaatccacgtcttccaacaaagccatgtcttccatcaaattaatgtcttccagcctacttgtgtcttccaacaaaggtacgtcttccaacaaaggtacgtcttccaacaaaggtatgtcttccaacaaaggtacgtcttccagaaaatccacgtcttccaaccaagccatgtcttccagaaaatccacgtcttccagaaaatatatgtcttccaactaagctacgtcttccaacaaatccatgtcttcctatatctccaggtcttccagcatctccagggcttccagcatctgctcgtcttccaacatctccacgtcttccagcatctctgtgtcttccagcatcttcatgtcttccaacaactacccagtcttccatcaactggctcaatatccatgtcttccaacgtctccagtgtgctgatcttctgacattcaggtcttccagtgtctgcaatatccagggtttccgatggcacctgtgtcaaggtcttccaacaactccgggtcttccagcgacttcaagtcttccaataatctcaaggtcttccagataatcctgagcttccagaaaatccacatcttccagacaatccatgtcttccggacaatccatgtcttccaagaagctccaagtcttccagtaaatcaagtcttccagcaaatccagtcttccagcaattactggtcttccaccaaatccagatcttccaggaaaatccacgtcttccaggaaatccatgtcttccaataatttcaaggtcttccatcaaatacagatcttccagctaatccatgtcttccagaaaaatctgtgtcttccaccaaatccaagtcttccagtaaatctagttcttccagaaaaatctagatcttccagtcaatcagtgtcttccagaaagaaatccaggtcttccagtcaatcagtgtcttccagaaagaaatccaggtcttccagtcagacagttgcatccagagacacttgcatccagagg

SEQ ID NO: 734358 - DNA, 1801 bp, Homo sapiens
tccagaaaatatatgtcttccaactaagctacgtcttccaacaaatccatgtcttcctatatctccaggtcttccagcatctccagggcttccagcatctgctcgtcttccaacatctccacgtcttccagcatctctgtgtcttccagcatcttcatgtcttccaacaactacccagtcttccatcaactggctcaatatccatgtcttccaacgtctccagtgtgctgatcttctgacattcaggtcttccagtgtctgcaatatccagggtttccgatggcacctgtgtcaaggtcttccaacaactccgggtcttccagcgacttcaagtcttccaataatctcaaggtcttccagataatcctgagcttccagaaaatccacatcttccagacaatccatgtcttccggacaatccatgtcttccaagaagctccaagtcttccagtaaatcaagtcttccagcaaatccagtcttccagcaattactggtcttccaccaaatccagatcttccaggaaaatccacgtcttccaggaaatccatgtcttccaataatttcaaggtcttccatcaaatacagatcttccagctaatccatgtcttccagaaaaatctgtgtcttccaccaaatccaagtcttccagtaaatctagttcttccagaaaaatctagatcttccagtcaatcagtgtcttccagaaagaaatccaggtcttccagtcaatcagtgtcttccagaaatcttccaatggcctccaggtcttccagactatccatgtcttccagaaaatccttgtcttcccttaaatctatagcttccaaaaaatccgggtcttccaggaaatccgtgtcttccagcaagtccacgtcttccaacaaagccatgtcttccagactatccatgtcttccagaaaatccttgtcttccctcaaatccatagcttccgaaaaatccaggtcttccaggaaatccgtgtcttccagcaaatccacgtcttccaacaaagccatgtcttccatcaaattaatgtcttccagcctacttgtgtcttccaacaaaggtcttccagcatctccagggcttccagcatctgctcgtcttccaacatctccacgtcttccagcatctctgtgtcttccagcatcttcatgtcttccaacaactacccagtcttccatcaactggctcaatatccatgtcttccaacgtctccagtgtgctgatcttctgacattcaggtcttccagtgtctgcaatatccagggtttccgatggcacctgtgtcaaggtcttccaacaactccgggtcttccagcgacttcaagtcttccaataatctcaaggtcttccagataatcctgagcttccagaaaatccacatcttccagacaatccatgtcttccggacaatccatgtcttccaagaagctccaagtcttccagtaaatcaagtcttccagcaaatccagtcttccagcaattactggtcttccaccaaatccagatcttccaggaaaatccacgtcttccaggaaatccatgtcttccaataatttcaaggtcttccatcaaatacagatcttccagctaatccatgtcttccagaaaaatctgtgtcttccaccaaatccaagtcttccagtaaatctagttcttccagaaaaatctagatcttccagtcaatcagtgtcttccagaaagaaatccaggtcttccagtcaatcagtgtcttccagaaagaaatccaggtcttccagtcagacagttgcatccagagacacttgcatccagagg

SEQ ID NO: 734359 - DNA, 960 bp, Homo sapiens
tccagaaaatatatgtcttccaactaagctacgtcttccaacaaatccatgtcttcctatatctccaggtcttccagcatctccagggcttccagcatctgctcgtcttccaacatctccacgtcttccagcatctctgtgtcttccagcatcttcatgtcttccaacaactacccagtcttccatcaactggctcaatatccatgtcttccaacgtctccagtgtgctgatcttctgacattcaggtcttccagtgtctgcaatatccagggtttccgatggcacctgtgtcaaggtcttccaacaactccgggtcttccagcgacttcaagtcttccaataatctcaaggtcttccagataatcctgagcttccagaaaatccacatcttccagacaatccatgtcttccggacaatccatgtcttccaagaagctccaagtcttccagtaaatcaagtcttccagcaaatccagtcttccagcaattactggtcttccaccaaatccagatcttccaggaaaatccacgtcttccaggaaatccatgtcttccaataatttcaaggtcttccatcaaatacagatcttccagctaatccatgtcttccagaaaaatctgtgtcttccaccaaatccaagaatcagtgtcttccagaaagaaatccaggtcttccagtcaatcagtgtcttccagaaagaaatccaggtcttccagtcagtcagtgtcttccagaaaaatctacgtcttccagtcttcctatatctccaggtcttccagcatctccagggcttccagcatctgctcgtcttccaacatctccacgtcttccagcatctctgtgtcttccagcatcttcatgtcttccaacaactacccagtcttccatcaactggctcaatatccatgtcttccaacgtctccagtgtgctgatcttctgacattcaggtcttccagt

SEQ ID NO: 734360 - DNA, 1243 bp, Homo sapiens
tccagaaaatatatgtcttccaactaagctacgtcttccaacaaatccatgtcttcctatatctccaggtcttccagcatctccagggcttccagcatctgctcgtcttccaacatctccacgtcttccagcatctctgtgtcttccagcatcttcatgtcttccaacaactacccagtcttccatcaactggctcaatatccatgtcttccaacgtctccagtgtgctgatcttctgacattcaggtcttccagtgtctgcaatatccagggtttccgatggcacctgtgtcaaggtcttccaacaactccgggtcttccagcgacttcaagtcttccaataatctcaaggtcttccagataatcctgagcttccagaaaatccacatcttccagacaatccatgtcttccggacaatccatgtcttccaagaagctccaagtcttccagtaaatcaagtcttccatcaaattaatgtcttccagcctacttgtgtcttccaacaaaggtcttccagcatctccagggcttccagcatctgctcgtcttccaacatctccacgtcttccagcatctctgtgtcttccagcatcttcatgtcttccaacaactacccagtcttccatcaactggctcaatatccatgtcttccaacgtctccagtgtgctgatcttctgacattcaggtcttccagtgtctgcaatatccagggtttccgatggcacctgtgtcaaggtcttccaacaactccgggtcttccagcgacttcaagtcttccaataatctcaaggtcttccagataatcctgagcttccagaaaatccacatcttccagacaatccatgtcttccggacaatccatgtcttccaagaagctccaagtcttccagtaaatcaagtcttccagcaaatccagtcttccagcaattactggtcttccaccaaatccagatcttccaggaaaatccacgtcttccaggaaatccatgtcttccaataatttcaaggtcttccatcaaatacagatcttccagctaatccatgtcttccagaaaaatctgtgtcttccaccaaatccaagtcttccagtaaatctagttcttccagaaaaatctagatcttccagtcaatcagtgtcttccagaaagaaatccaggtcttccagtcaatcagtgtcttccagaaagaaatccaggtcttccagtcagacagttgcatccagagacacttgcatccagagg

SEQ ID NO: 734361 - DNA, 1705 bp, Homo sapiens
acagaggatccccggcatactggaccttctccgggtcttccagcgacttcaagtcttccaataatctcaaggtcttccagataatcctgagcttccagaaaatccacatcttccagacaatccatgtcttccggacaatccatgtcttccaagaagctccaagtcttccagtaaatcaagtcttccagcaaatccagtcttccagcaattactggtcttccaccaaatccagatcttccaggaaaatccacgtcttccaggaaatccatgtcttccaataatttcaaggtcttccatcaaatacagatcttccagctaatccatgtcttccagaaaaatctgtgtcttccaccaaatccaagtcttccagtaaatctagttcttccagaaaaatctagatcttccagtcaatcagtgtcttccagaaagaaatccaggtcttccagtcaatcagtgtcttccagaaatcttccaatggcctccaggtcttccagactatccatgtcttccagaaaatccttgtcttcccttaaatctatagcttccaaaaaatccgggtcttccaggaaatccgtgtcttccagcaagtccacgtcttccaacaaagccatgtcttccagactatccatgtcttccagaaaatccttgtcttccctcaaatccatagcttccgaaaaatccaggtcttccaggaaatccgtgtcttccagcaaatccacgtcttccaacaaagccatgtcttccatcaaattaatgtcttccagcctacttgtgtcttccaacaaaggtacgtcttccaacaaaggtacgtcttccaacaaaggtatgtcttccaacaaaggtacgtcttccagaaaatccacgtcttccaaccaagccatgtcttccagaaaatccacgtcttccagaaaatatatgtcttccaactaagctacgtcttccaacaaatccatgtcttcctatatctccaggtcttccagcatctccagggcttccagcatctgctcgtcttccaacatctccacgtcttccagcatctctgtgtcttccagcatcttcatgtcttccaacaactacccagtcttccatcaactggctcaatatccatgtcttccaacgtctccagtgtgctgatcttctgacattcaggtcttccagtgtctgcaatatccagggtttccgatggcacctgtgtcaaggtcttccaacaactccgggtcttccagcgacttcaagtcttccaataatctcaaggtcttccagataatcctgagcttccagaaaatccacatcttccagacaatccatgtcttccggacaatccatgtcttccaagaagctccaagtcttccagtaaatcaagtcttccagcaaatccagtcttccagcaattactggtcttccaccaaatccagatcttccaggaaaatccacgtcttccaggaaatccatgtcttccaataatttcaaggtcttccatcaaatacagatcttccagctaatccatgtcttccagaaaaatctgtgtcttccaccaaatccaagtcttccagtaaatctagttcttccagaaaaatctagatcttccagtcaatcagtgtcttccagaaagaaatccaggtcttccagtcaatcagtgtcttccagaaagaaatccaggtcttccagtcagacagttgcatccagagacacttgcatccagagg

SEQ ID NO: 734362 - DNA, 1521 bp, Homo sapiens
acagaggatccccggcatactggaccttctccgggtcttccagcgacttcaagtcttccaataatctcaaggtcttccagataatcctgagcttccagaaaatccacatcttccagacaatccatgtcttccggacaatccatgtcttccaagaagctccaagtcttccagtaaatcaagtcttccagcaaatccagtcttccagcaattactggtcttccaccaaatccagatcttccaggaaaatccacgtcttccaggaaatccatgtcttccaataatttcaaggtcttccatcaaatacagatcttccagctaatccatgtcttccagaaaaatctgtgtcttccaccaaatccaagtcttccagtaaatctagttcttccagaaaaatctagatcttccagtcaatcagtgtcttccagaaagaaatccaggtcttccagtcaatcagtgtcttccagaaatcttccaatggcctccaggtcttccagactatccatgtcttccagaaaatccttgtcttcccttaaatctatagcttccaaaaaatccgggtcttccaggaaatccgtgtcttccagcaagtccacgtcttccaacaaagccatgtcttccagactatccatgtcttccagaaaatccttgtcttccctcaaatccatagcttccgaaaaatccaggtcttccaggaaatccgtgtcttccagcaaatccacgtcttccaacaaagccatgtcttccatcaaattaatgtcttccagcctacttgtgtcttccaacaaaggtcttccagcatctccagggcttccagcatctgctcgtcttccaacatctccacgtcttccagcatctctgtgtcttccagcatcttcatgtcttccaacaactacccagtcttccatcaactggctcaatatccatgtcttccaacgtctccagtgtgctgatcttctgacattcaggtcttccagtgtctgcaatatccagggtttccgatggcacctgtgtcaaggtcttccaacaactccgggtcttccagcgacttcaagtcttccaataatctcaaggtcttccagataatcctgagcttccagaaaatccacatcttccagacaatccatgtcttccggacaatccatgtcttccaagaagctccaagtcttccagtaaatcaagtcttccagcaaatccagtcttccagcaattactggtcttccaccaaatccagatcttccaggaaaatccacgtcttccaggaaatccatgtcttccaataatttcaaggtcttccatcaaatacagatcttccagctaatccatgtcttccagaaaaatctgtgtcttccaccaaatccaagtcttccagtaaatctagttcttccagaaaaatctagatcttccagtcaatcagtgtcttccagaaagaaatccaggtcttccagtcaatcagtgtcttccagaaagaaatccaggtcttccagtcagacagttgcatccagagacacttgcatccagagg

SEQ ID NO: 734363 - DNA, 680 bp, Homo sapiens
acagaggatccccggcatactggaccttctccgggtcttccagcgacttcaagtcttccaataatctcaaggtcttccagataatcctgagcttccagaaaatccacatcttccagacaatccatgtcttccggacaatccatgtcttccaagaagctccaagtcttccagtaaatcaagtcttccagcaaatccagtcttccagcaattactggtcttccaccaaatccagatcttccaggaaaatccacgtcttccaggaaatccatgtcttccaataatttcaaggtcttccatcaaatacagatcttccagctaatccatgtcttccagaaaaatctgtgtcttccaccaaatccaagaatcagtgtcttccagaaagaaatccaggtcttccagtcaatcagtgtcttccagaaagaaatccaggtcttccagtcagtcagtgtcttccagaaaaatctacgtcttccagtcttcctatatctccaggtcttccagcatctccagggcttccagcatctgctcgtcttccaacatctccacgtcttccagcatctctgtgtcttccagcatcttcatgtcttccaacaactacccagtcttccatcaactggctcaatatccatgtcttccaacgtctccagtgtgctgatcttctgacattcaggtcttccagt

SEQ ID NO: 734364 - DNA, 963 bp, Homo sapiens
acagaggatccccggcatactggaccttctccgggtcttccagcgacttcaagtcttccaataatctcaaggtcttccagataatcctgagcttccagaaaatccacatcttccagacaatccatgtcttccggacaatccatgtcttccaagaagctccaagtcttccagtaaatcaagtcttccatcaaattaatgtcttccagcctacttgtgtcttccaacaaaggtcttccagcatctccagggcttccagcatctgctcgtcttccaacatctccacgtcttccagcatctctgtgtcttccagcatcttcatgtcttccaacaactacccagtcttccatcaactggctcaatatccatgtcttccaacgtctccagtgtgctgatcttctgacattcaggtcttccagtgtctgcaatatccagggtttccgatggcacctgtgtcaaggtcttccaacaactccgggtcttccagcgacttcaagtcttccaataatctcaaggtcttccagataatcctgagcttccagaaaatccacatcttccagacaatccatgtcttccggacaatccatgtcttccaagaagctccaagtcttccagtaaatcaagtcttccagcaaatccagtcttccagcaattactggtcttccaccaaatccagatcttccaggaaaatccacgtcttccaggaaatccatgtcttccaataatttcaaggtcttccatcaaatacagatcttccagctaatccatgtcttccagaaaaatctgtgtcttccaccaaatccaagtcttccagtaaatctagttcttccagaaaaatctagatcttccagtcaatcagtgtcttccagaaagaaatccaggtcttccagtcaatcagtgtcttccagaaagaaatccaggtcttccagtcagacagttgcatccagagacacttgcatccagagg

SEQ ID NO: 734365 - DNA, 1735 bp, Homo sapiens
acagaggatccccggcatactggaccttctccgggtcttccagcgacttcaagtcttccaataatctcaaggtcttccagataatcctgagcttccagaaaatccacatcttccagacaatccatgtcttccggacaatccatgtcttccaagaagctccaagtcttccagtaaatcaagtcttccagcaaatccagtcttccagcaattactggtcttccaccaaatccagatcttccaggaaaatccacgtcttccaggaaatccatgtcttccaataatttcaaggtcttccatcaaatacagatcttccagctaatccatgtcttccagaaaaatctgtgtcttccaccaaatccaagtcttccagtaaatctagttcttccagaaaaatctagatcttccagtcaatcagtgtcttccagaaagaaatccaggtcttccagtcaatcagtgtcttccagaaagaaatccaggtcttccagtcagtcagtgtcttccagaaaaatctacgtcttccaccaaatccaggtcttccagtcaatccacatcttccggaaaaaatccaggtcttccagccaatatatgtcttcctgaagatccacgtcttccagaaaatccatgtcttccagaaaatccatgtcttccagtaacctcccagtcttccagaaaatccacgtcttcccaacaatccaagtcttccggataatttgggtcttcctgaaaatctacgtcttccaaaaaagccatgtcttccagaaaatccacatcttccaacaaagccatgtcttccagactatccatgtcttccagaaaatccttgtcttccctcaaatccatagcttccgaaaaatccaggtcttccaggaaatccgtgtcttccagcaaatccacgtcttccaacaaagccatgtcttccatcaaattaatgtcttccagcctacttgtgtcttccaacaaaggtacgtcttccaacaaaggtacgtcttccaacaaaggtatgtcttccaacaaaggtacgtcttccagaaaatccacgtcttccaaccaagccatgtcttccagaaaatccacgtcttccagaaaatatatgtcttccaacactacccagtcttccatcaactggctcaatatccatgtcttccaacgtctccagtgtgctgatcttctgacattcaggtcttccagtgtctgcaatatccagggtttccgatggcacctgtgtcaaggtcttccaacaactccgggtcttccagcgacttcaagtcttccaataatctcaaggtcttccagataatcctgagcttccagaaaatccacatcttccagacaatccatgtcttccggacaatccatgtcttccaagaagctccaagtcttccagtaaatcaagtcttccagcaaatccagtcttccagcaattactggtcttccaccaaatccagatcttccaggaaaatccacgtcttccaggaaatccatgtcttccaataatttcaaggtcttccatcaaatacagatcttccagctaatccatgtcttccagaaaaatctgtgtcttccaccaaatccaagtcttccagtaaatctagttcttccagaaaaatctagatcttccagtcaatcagtgtcttccagaaagaaatccaggtcttccagtcaatcagtgtcttccagaaagaaatccaggtcttccagtcagacagttgcatccagagacacttgcatccagagg

SEQ ID NO: 734366 - DNA, 1862 bp, Homo sapiens
acagaggatccccggcatactggaccttctccgggtcttccagcgacttcaagtcttccaataatctcaaggtcttccagataatcctgagcttccagaaaatccacatcttccagacaatccatgtcttccggacaatccatgtcttccaagaagctccaagtcttccagtaaatcaagtcttccagcaaatccagtcttccagcaattactggtcttccaccaaatccagatcttccaggaaaatccacgtcttccaggaaatccatgtcttccaataatttcaaggtcttccatcaaatacagatcttccagctaatccatgtcttccagaaaaatctgtgtcttccaccaaatccaagtcttccagtaaatctagttcttccagaaaaatctagatcttccagtcaatcagtgtcttccagaaagaaatccaggtcttccagtcaatcagtgtcttccagaaagaaatccaggtcttccagtcagtcagtgtcttccagaaaaatctacgtcttccaccaaatccaggtcttccagtcaatccacatcttccggaaaaaatccaggtcttccagccaatatatgtcttcctgaagatccacgtcttccagaaaatccatgtcttccagaaaatccatgtcttccagtaacctcccagtcttccagaaaatccacgtcttcccaacaatccaagtcttccggataatttgggtcttcctgaaaatctacgtcttccaaaaaagccatgtcttccagaaaatccacatcttccaatggcctccaggtcttccagactatccatgtcttccagaaaatccttgtcttcccttaaatctatagcttccaaaaaatccgggtcttccaggaaatccgtgtcttccagcaagtccacgtcttccaacaaagccatgtcttccagactatccatgtcttccagaaaatccttgtcttccctcaaatccatagcttccgaaaaatccaggtcttccaggaaatccgtgtcttccagcaaatccacgtcttccaacaaagccatgtcttccatcaaattaatgtcttccagcctacttgtgtcttccaacaaaggtacgtcttccaacaaaggtacgtcttccaacaaaggtatgtcttccaacaaaggtacgtcttccagaaaatccacgtcttccaaccaagccatgtcttccagaaaatccacgtcttccagaaaatatatgtcttccaacactacccagtcttccatcaactggctcaatatccatgtcttccaacgtctccagtgtgctgatcttctgacattcaggtcttccagtgtctgcaatatccagggtttccgatggcacctgtgtcaaggtcttccaacaactccgggtcttccagcgacttcaagtcttccaataatctcaaggtcttccagataatcctgagcttccagaaaatccacatcttccagacaatccatgtcttccggacaatccatgtcttccaagaagctccaagtcttccagtaaatcaagtcttccagcaaatccagtcttccagcaattactggtcttccaccaaatccagatcttccaggaaaatccacgtcttccaggaaatccatgtcttccaataatttcaaggtcttccatcaaatacagatcttccagctaatccatgtcttccagaaaaatctgtgtcttccaccaaatccaagtcttccagtaaatctagttcttccagaaaaatctagatcttccagtcaatcagtgtcttccagaaagaaatccaggtcttccagtcaatcagtgtcttccagaaagaaatccaggtcttccagtcagacagttgcatccagagacacttgcatccagagg

SEQ ID NO: 734367 - DNA, 1373 bp, Homo sapiens
tcttccagtaaatctagttcttccagaaaaatctagatcttccagtcaatcagtgtcttccagaaagaaatccaggtcttccagtcaatcagtgtcttccagaaagaaatccaggtcttccagtcagtcagtgtcttccagaaaaatctacgtcttccaccaaatccaggtcttccagtcaatccacatcttccggaaaaaatccaggtcttccagccaatatatgtcttcctgaagatccacgtcttccagaaaatccatgtcttccagaaaatccatgtcttccagtaacctcccagtcttccagaaaatccacgtcttcccaacaatccaagtcttccggataatttgggtcttcctgaaaatctacgtcttccaaaaaagccatgtcttccagaaaatccacatcttccaacaaagccatgtcttccagactatccatgtcttccagaaaatccttgtcttccctcaaatccatagcttccgaaaaatccaggtcttccaggaaatccgtgtcttccagcaaatccacgtcttccaacaaagccatgtcttccatcaaattaatgtcttccagcctacttgtgtcttccaacaaaggtacgtcttccaacaaaggtacgtcttccaacaaaggtatgtcttccaacaaaggtacgtcttccagaaaatccacgtcttccaaccaagccatgtcttccagaaaatccacgtcttccagaaaatatatgtcttccaacactacccagtcttccatcaactggctcaatatccatgtcttccaacgtctccagtgtgctgatcttctgacattcaggtcttccagtgtctgcaatatccagggtttccgatggcacctgtgtcaaggtcttccaacaactccgggtcttccagcgacttcaagtcttccaataatctcaaggtcttccagataatcctgagcttccagaaaatccacatcttccagacaatccatgtcttccggacaatccatgtcttccaagaagctccaagtcttccagtaaatcaagtcttccagcaaatccagtcttccagcaattactggtcttccaccaaatccagatcttccaggaaaatccacgtcttccaggaaatccatgtcttccaataatttcaaggtcttccatcaaatacagatcttccagctaatccatgtcttccagaaaaatctgtgtcttccaccaaatccaagtcttccagtaaatctagttcttccagaaaaatctagatcttccagtcaatcagtgtcttccagaaagaaatccaggtcttccagtcaatcagtgtcttccagaaagaaatccaggtcttccagtcagacagttgcatccagagacacttgcatccagagg

SEQ ID NO: 734368 - DNA, 2015 bp, Homo sapiens
tccagaaaatatatgtcttccaactaagctacgtcttccaacaaatccatgtcttcctatatctccaggtcttccagcatctccagggcttccagcatctgctcgtcttccaacatctccacgtcttccagcatctctgtgtcttccagcatcttcatgtcttccaacaactacccagtcttccatcaactggctcaatatccatgtcttccaacgtctccagtgtgctgatcttctgacattcaggtcttccagtgtctgcaatatccagggtttccgatggcacctgtgtcaaggtcttccaacaactccgggtcttccagcgacttcaagtcttccaataatctcaaggtcttccagataatcctgagcttccagaaaatccacatcttccagacaatccatgtcttccggacaatccatgtcttccaagaagctccaagtcttccagtaaatcaagtcttccagcaaatccagtcttccagcaattactggtcttccaccaaatccagatcttccaggaaaatccacgtcttccaggaaatccatgtcttccaataatttcaaggtcttccatcaaatacagatcttccagctaatccatgtcttccagaaaaatctgtgtcttccaccaaatccaagtcttccagtaaatctagttcttccagaaaaatctagatcttccagtcaatcagtgtcttccagaaagaaatccaggtcttccagtcaatcagtgtcttccagaaagaaatccaggtcttccagtcagtcagtgtcttccagaaaaatctacgtcttccaccaaatccaggtcttccagtcaatccacatcttccggaaaaaatccaggtcttccagccaatatatgtcttcctgaagatccacgtcttccagaaaatccatgtcttccagaaaatccatgtcttccagtaacctcccagtcttccagaaaatccacgtcttcccaacaatccaagtcttccggataatttgggtcttcctgaaaatctacgtcttccaaaaaagccatgtcttccagaaaatccacatcttccaacaaagccatgtcttccagactatccatgtcttccagaaaatccttgtcttccctcaaatccatagcttccgaaaaatccaggtcttccaggaaatccgtgtcttccagcaaatccacgtcttccaacaaagccatgtcttccatcaaattaatgtcttccagcctacttgtgtcttccaacaaaggtacgtcttccaacaaaggtacgtcttccaacaaaggtatgtcttccaacaaaggtacgtcttccagaaaatccacgtcttccaaccaagccatgtcttccagaaaatccacgtcttccagaaaatatatgtcttccaacactacccagtcttccatcaactggctcaatatccatgtcttccaacgtctccagtgtgctgatcttctgacattcaggtcttccagtgtctgcaatatccagggtttccgatggcacctgtgtcaaggtcttccaacaactccgggtcttccagcgacttcaagtcttccaataatctcaaggtcttccagataatcctgagcttccagaaaatccacatcttccagacaatccatgtcttccggacaatccatgtcttccaagaagctccaagtcttccagtaaatcaagtcttccagcaaatccagtcttccagcaattactggtcttccaccaaatccagatcttccaggaaaatccacgtcttccaggaaatccatgtcttccaataatttcaaggtcttccatcaaatacagatcttccagctaatccatgtcttccagaaaaatctgtgtcttccaccaaatccaagtcttccagtaaatctagttcttccagaaaaatctagatcttccagtcaatcagtgtcttccagaaagaaatccaggtcttccagtcaatcagtgtcttccagaaagaaatccaggtcttccagtcagacagttgcatccagagacacttgcatccagagg

SEQ ID NO: 734369 - DNA, 2142 bp, Homo sapiens
tccagaaaatatatgtcttccaactaagctacgtcttccaacaaatccatgtcttcctatatctccaggtcttccagcatctccagggcttccagcatctgctcgtcttccaacatctccacgtcttccagcatctctgtgtcttccagcatcttcatgtcttccaacaactacccagtcttccatcaactggctcaatatccatgtcttccaacgtctccagtgtgctgatcttctgacattcaggtcttccagtgtctgcaatatccagggtttccgatggcacctgtgtcaaggtcttccaacaactccgggtcttccagcgacttcaagtcttccaataatctcaaggtcttccagataatcctgagcttccagaaaatccacatcttccagacaatccatgtcttccggacaatccatgtcttccaagaagctccaagtcttccagtaaatcaagtcttccagcaaatccagtcttccagcaattactggtcttccaccaaatccagatcttccaggaaaatccacgtcttccaggaaatccatgtcttccaataatttcaaggtcttccatcaaatacagatcttccagctaatccatgtcttccagaaaaatctgtgtcttccaccaaatccaagtcttccagtaaatctagttcttccagaaaaatctagatcttccagtcaatcagtgtcttccagaaagaaatccaggtcttccagtcaatcagtgtcttccagaaagaaatccaggtcttccagtcagtcagtgtcttccagaaaaatctacgtcttccaccaaatccaggtcttccagtcaatccacatcttccggaaaaaatccaggtcttccagccaatatatgtcttcctgaagatccacgtcttccagaaaatccatgtcttccagaaaatccatgtcttccagtaacctcccagtcttccagaaaatccacgtcttcccaacaatccaagtcttccggataatttgggtcttcctgaaaatctacgtcttccaaaaaagccatgtcttccagaaaatccacatcttccaatggcctccaggtcttccagactatccatgtcttccagaaaatccttgtcttcccttaaatctatagcttccaaaaaatccgggtcttccaggaaatccgtgtcttccagcaagtccacgtcttccaacaaagccatgtcttccagactatccatgtcttccagaaaatccttgtcttccctcaaatccatagcttccgaaaaatccaggtcttccaggaaatccgtgtcttccagcaaatccacgtcttccaacaaagccatgtcttccatcaaattaatgtcttccagcctacttgtgtcttccaacaaaggtacgtcttccaacaaaggtacgtcttccaacaaaggtatgtcttccaacaaaggtacgtcttccagaaaatccacgtcttccaaccaagccatgtcttccagaaaatccacgtcttccagaaaatatatgtcttccaacactacccagtcttccatcaactggctcaatatccatgtcttccaacgtctccagtgtgctgatcttctgacattcaggtcttccagtgtctgcaatatccagggtttccgatggcacctgtgtcaaggtcttccaacaactccgggtcttccagcgacttcaagtcttccaataatctcaaggtcttccagataatcctgagcttccagaaaatccacatcttccagacaatccatgtcttccggacaatccatgtcttccaagaagctccaagtcttccagtaaatcaagtcttccagcaaatccagtcttccagcaattactggtcttccaccaaatccagatcttccaggaaaatccacgtcttccaggaaatccatgtcttccaataatttcaaggtcttccatcaaatacagatcttccagctaatccatgtcttccagaaaaatctgtgtcttccaccaaatccaagtcttccagtaaatctagttcttccagaaaaatctagatcttccagtcaatcagtgtcttccagaaagaaatccaggtcttccagtcaatcagtgtcttccagaaagaaatccaggtcttccagtcagacagttgcatccagagacacttgcatccagagg

SEQ ID NO: 734370 - DNA, 1968 bp, Homo sapiens
tccagaaaatatatgtcttccaactaagctacgtcttccaacaaatccatgtcttcctatatctccaggtcttccagcatctccagggcttccagcatctgctcgtcttccaacatctccacgtcttccagcatctctgtgtcttccagcatcttcatgtcttccaacaactacccagtcttccatcaactggctcaatatccatgtcttccaacgtctccagtgtgctgatcttctgacattcaggtcttccagtgtctgcaatatccagggtttccgatggcacctgtgtcaaggtcttccaacaactccgggtcttccagcgacttcaagtcttccaataatctcaaggtcttccagataatcctgagcttccagaaaatccacatcttccagacaatccatgtcttccggacaatccatgtcttccaagaagctccaagtcttccagtaaatcaagtcttccagcaaatccagtcttccagcaattactggtcttccaccaaatccagatcttccaggaaaatccacgtcttccaggaaatccatgtcttccaataatttcaaggtcttccatcaaatacagatcttccagctaatccatgtcttccagaaaaatctgtgtcttccaccaaatccaagaatcagtgtcttccagaaagaaatccaggtcttccagtcaatcagtgtcttccagaaagaaatccaggtcttccagtcagtcagtgtcttccagaaaaatctacgtcttccaccaaatccaggtcttccagtcaatccacatcttccggaaaaaatccaggtcttccagccaatatatgtcttcctgaagatccacgtcttccagaaaatccatgtcttccagaaaatccatgtcttccagtaacctcccagtcttccagaaaatccacgtcttcccaacaatccaagtcttccggataatttgggtcttcctgaaaatctacgtcttccaaaaaagccatgtcttccagaaaatccacatcttccaacaaagccatgtcttccagactatccatgtcttccagaaaatccttgtcttccctcaaatccatagcttccgaaaaatccaggtcttccaggaaatccgtgtcttccagcaaatccacgtcttccaacaaagccatgtcttccatcaaattaatgtcttccagcctacttgtgtcttccaacaaaggtacgtcttccaacaaaggtacgtcttccaacaaaggtatgtcttccaacaaaggtacgtcttccagaaaatccacgtcttccaaccaagccatgtcttccagaaaatccacgtcttccagaaaatatatgtcttccaacactacccagtcttccatcaactggctcaatatccatgtcttccaacgtctccagtgtgctgatcttctgacattcaggtcttccagtgtctgcaatatccagggtttccgatggcacctgtgtcaaggtcttccaacaactccgggtcttccagcgacttcaagtcttccaataatctcaaggtcttccagataatcctgagcttccagaaaatccacatcttccagacaatccatgtcttccggacaatccatgtcttccaagaagctccaagtcttccagtaaatcaagtcttccagcaaatccagtcttccagcaattactggtcttccaccaaatccagatcttccaggaaaatccacgtcttccaggaaatccatgtcttccaataatttcaaggtcttccatcaaatacagatcttccagctaatccatgtcttccagaaaaatctgtgtcttccaccaaatccaagtcttccagtaaatctagttcttccagaaaaatctagatcttccagtcaatcagtgtcttccagaaagaaatccaggtcttccagtcaatcagtgtcttccagaaagaaatccaggtcttccagtcagacagttgcatccagagacacttgcatccagagg

SEQ ID NO: 734371 - DNA, 2095 bp, Homo sapiens
tccagaaaatatatgtcttccaactaagctacgtcttccaacaaatccatgtcttcctatatctccaggtcttccagcatctccagggcttccagcatctgctcgtcttccaacatctccacgtcttccagcatctctgtgtcttccagcatcttcatgtcttccaacaactacccagtcttccatcaactggctcaatatccatgtcttccaacgtctccagtgtgctgatcttctgacattcaggtcttccagtgtctgcaatatccagggtttccgatggcacctgtgtcaaggtcttccaacaactccgggtcttccagcgacttcaagtcttccaataatctcaaggtcttccagataatcctgagcttccagaaaatccacatcttccagacaatccatgtcttccggacaatccatgtcttccaagaagctccaagtcttccagtaaatcaagtcttccagcaaatccagtcttccagcaattactggtcttccaccaaatccagatcttccaggaaaatccacgtcttccaggaaatccatgtcttccaataatttcaaggtcttccatcaaatacagatcttccagctaatccatgtcttccagaaaaatctgtgtcttccaccaaatccaagaatcagtgtcttccagaaagaaatccaggtcttccagtcaatcagtgtcttccagaaagaaatccaggtcttccagtcagtcagtgtcttccagaaaaatctacgtcttccaccaaatccaggtcttccagtcaatccacatcttccggaaaaaatccaggtcttccagccaatatatgtcttcctgaagatccacgtcttccagaaaatccatgtcttccagaaaatccatgtcttccagtaacctcccagtcttccagaaaatccacgtcttcccaacaatccaagtcttccggataatttgggtcttcctgaaaatctacgtcttccaaaaaagccatgtcttccagaaaatccacatcttccaatggcctccaggtcttccagactatccatgtcttccagaaaatccttgtcttcccttaaatctatagcttccaaaaaatccgggtcttccaggaaatccgtgtcttccagcaagtccacgtcttccaacaaagccatgtcttccagactatccatgtcttccagaaaatccttgtcttccctcaaatccatagcttccgaaaaatccaggtcttccaggaaatccgtgtcttccagcaaatccacgtcttccaacaaagccatgtcttccatcaaattaatgtcttccagcctacttgtgtcttccaacaaaggtacgtcttccaacaaaggtacgtcttccaacaaaggtatgtcttccaacaaaggtacgtcttccagaaaatccacgtcttccaaccaagccatgtcttccagaaaatccacgtcttccagaaaatatatgtcttccaacactacccagtcttccatcaactggctcaatatccatgtcttccaacgtctccagtgtgctgatcttctgacattcaggtcttccagtgtctgcaatatccagggtttccgatggcacctgtgtcaaggtcttccaacaactccgggtcttccagcgacttcaagtcttccaataatctcaaggtcttccagataatcctgagcttccagaaaatccacatcttccagacaatccatgtcttccggacaatccatgtcttccaagaagctccaagtcttccagtaaatcaagtcttccagcaaatccagtcttccagcaattactggtcttccaccaaatccagatcttccaggaaaatccacgtcttccaggaaatccatgtcttccaataatttcaaggtcttccatcaaatacagatcttccagctaatccatgtcttccagaaaaatctgtgtcttccaccaaatccaagtcttccagtaaatctagttcttccagaaaaatctagatcttccagtcaatcagtgtcttccagaaagaaatccaggtcttccagtcaatcagtgtcttccagaaagaaatccaggtcttccagtcagacagttgcatccagagacacttgcatccagagg

SEQ ID NO: 734372 - DNA, 2142 bp, Homo sapiens; identical to SEQ ID NO: 734369

SEQ ID NO: 734373 - DNA, 1688 bp, Homo sapiens
acagaggatccccggcatactggaccttctccgggtcttccagcgacttcaagtcttccaataatctcaaggtcttccagataatcctgagcttccagaaaatccacatcttccagacaatccatgtcttccggacaatccatgtcttccaagaagctccaagtcttccagtaaatcaagtcttccagcaaatccagtcttccagcaattactggtcttccaccaaatccagatcttccaggaaaatccacgtcttccaggaaatccatgtcttccaataatttcaaggtcttccatcaaatacagatcttccagctaatccatgtcttccagaaaaatctgtgtcttccaccaaatccaagaatcagtgtcttccagaaagaaatccaggtcttccagtcaatcagtgtcttccagaaagaaatccaggtcttccagtcagtcagtgtcttccagaaaaatctacgtcttccaccaaatccaggtcttccagtcaatccacatcttccggaaaaaatccaggtcttccagccaatatatgtcttcctgaagatccacgtcttccagaaaatccatgtcttccagaaaatccatgtcttccagtaacctcccagtcttccagaaaatccacgtcttcccaacaatccaagtcttccggataatttgggtcttcctgaaaatctacgtcttccaaaaaagccatgtcttccagaaaatccacatcttccaacaaagccatgtcttccagactatccatgtcttccagaaaatccttgtcttccctcaaatccatagcttccgaaaaatccaggtcttccaggaaatccgtgtcttccagcaaatccacgtcttccaacaaagccatgtcttccatcaaattaatgtcttccagcctacttgtgtcttccaacaaaggtacgtcttccaacaaaggtacgtcttccaacaaaggtatgtcttccaacaaaggtacgtcttccagaaaatccacgtcttccaaccaagccatgtcttccagaaaatccacgtcttccagaaaatatatgtcttccaacactacccagtcttccatcaactggctcaatatccatgtcttccaacgtctccagtgtgctgatcttctgacattcaggtcttccagtgtctgcaatatccagggtttccgatggcacctgtgtcaaggtcttccaacaactccgggtcttccagcgacttcaagtcttccaataatctcaaggtcttccagataatcctgagcttccagaaaatccacatcttccagacaatccatgtcttccggacaatccatgtcttccaagaagctccaagtcttccagtaaatcaagtcttccagcaaatccagtcttccagcaattactggtcttccaccaaatccagatcttccaggaaaatccacgtcttccaggaaatccatgtcttccaataatttcaaggtcttccatcaaatacagatcttccagctaatccatgtcttccagaaaaatctgtgtcttccaccaaatccaagtcttccagtaaatctagttcttccagaaaaatctagatcttccagtcaatcagtgtcttccagaaagaaatccaggtcttccagtcaatcagtgtcttccagaaagaaatccaggtcttccagtcagacagttgcatccagagacacttgcatccagagg

SEQ ID NO: 734374 - DNA, 1815 bp, Homo sapiens
acagaggatccccggcatactggaccttctccgggtcttccagcgacttcaagtcttccaataatctcaaggtcttccagataatcctgagcttccagaaaatccacatcttccagacaatccatgtcttccggacaatccatgtcttccaagaagctccaagtcttccagtaaatcaagtcttccagcaaatccagtcttccagcaattactggtcttccaccaaatccagatcttccaggaaaatccacgtcttccaggaaatccatgtcttccaataatttcaaggtcttccatcaaatacagatcttccagctaatccatgtcttccagaaaaatctgtgtcttccaccaaatccaagaatcagtgtcttccagaaagaaatccaggtcttccagtcaatcagtgtcttccagaaagaaatccaggtcttccagtcagtcagtgtcttccagaaaaatctacgtcttccaccaaatccaggtcttccagtcaatccacatcttccggaaaaaatccaggtcttccagccaatatatgtcttcctgaagatccacgtcttccagaaaatccatgtcttccagaaaatccatgtcttccagtaacctcccagtcttccagaaaatccacgtcttcccaacaatccaagtcttccggataatttgggtcttcctgaaaatctacgtcttccaaaaaagccatgtcttccagaaaatccacatcttccaatggcctccaggtcttccagactatccatgtcttccagaaaatccttgtcttcccttaaatctatagcttccaaaaaatccgggtcttccaggaaatccgtgtcttccagcaagtccacgtcttccaacaaagccatgtcttccagactatccatgtcttccagaaaatccttgtcttccctcaaatccatagcttccgaaaaatccaggtcttccaggaaatccgtgtcttccagcaaatccacgtcttccaacaaagccatgtcttccatcaaattaatgtcttccagcctacttgtgtcttccaacaaaggtacgtcttccaacaaaggtacgtcttccaacaaaggtatgtcttccaacaaaggtacgtcttccagaaaatccacgtcttccaaccaagccatgtcttccagaaaatccacgtcttccagaaaatatatgtcttccaacactacccagtcttccatcaactggctcaatatccatgtcttccaacgtctccagtgtgctgatcttctgacattcaggtcttccagtgtctgcaatatccagggtttccgatggcacctgtgtcaaggtcttccaacaactccgggtcttccagcgacttcaagtcttccaataatctcaaggtcttccagataatcctgagcttccagaaaatccacatcttccagacaatccatgtcttccggacaatccatgtcttccaagaagctccaagtcttccagtaaatcaagtcttccagcaaatccagtcttccagcaattactggtcttccaccaaatccagatcttccaggaaaatccacgtcttccaggaaatccatgtcttccaataatttcaaggtcttccatcaaatacagatcttccagctaatccatgtcttccagaaaaatctgtgtcttccaccaaatccaagtcttccagtaaatctagttcttccagaaaaatctagatcttccagtcaatcagtgtcttccagaaagaaatccaggtcttccagtcaatcagtgtcttccagaaagaaatccaggtcttccagtcagacagttgcatccagagacacttgcatccagagg

SEQ ID NO: 734375 - DNA, 1862 bp, Homo sapiens; identical to SEQ ID NO: 734366

SEQ ID NO: 734376 - DNA, 1028 bp, Homo sapiens
  misc_feature (31)..(31): n is a, c, g, or t
actagtccacggttggctagtccgggtcttncaggaaatccgtgtcttccagcaagtccacgtcttccaacaaagccatgtcttccagactatccatgtcttccagaaaatccttgtcttccctcaaatccatagcttccgaaaaatccaggtcttccaggaaatccgtgtcttccagcaaatccacgtcttccaacaaagccatgtcttccatcaaattaatgtcttccagcctacttgtgtcttccaacaaaggtacgtcttccaacaaaggtacgtcttccaacaaaggtatgtcttccaacaaaggtacgtcttccagaaaatccacgtcttccaaccaagccatgtcttccagaaaatccacgtcttccagaaaatatatgtcttccaacactacccagtcttccatcaactggctcaatatccatgtcttccaacgtctccagtgtgctgatcttctgacattcaggtcttccagtgtctgcaatatccagggtttccgatggcacctgtgtcaaggtcttccaacaactccgggtcttccagcgacttcaagtcttccaataatctcaaggtcttccagataatcctgagcttccagaaaatccacatcttccagacaatccatgtcttccggacaatccatgtcttccaagaagctccaagtcttccagtaaatcaagtcttccagcaaatccagtcttccagcaattactggtcttccaccaaatccagatcttccaggaaaatccacgtcttccaggaaatccatgtcttccaataatttcaaggtcttccatcaaatacagatcttccagctaatccatgtcttccagaaaaatctgtgtcttccaccaaatccaagtcttccagtaaatctagttcttccagaaaaatctagatcttccagtcaatcagtgtcttccagaaagaaatccaggtcttccagtcaatcagtgtcttccagaaagaaatccaggtcttccagtcagacagttgcatccagagacacttgcatccagagg

SEQ ID NO: 734377 - DNA, 1366 bp, Homo sapiens
  misc_feature (39)..(39): n is a, c, g, or t
gacgaatcatagcttccagaaaaatctagatcttccagncaatcagtgtcttccagaaagaaatccaggtcttccagtcaatcagtgtcttccagaaagaaatccaggtcttccagtcagtcagtgtcttccagaaaaatctacgtcttccaccaaatccaggtcttccagtcaatccacatcttccggaaaaaatccaggtcttccagccaatatatgtcttcctgaagatccacgtcttccagaaaatccatgtcttccagaaaatccatgtcttccagtaacctcccagtcttccagaaaatccacgtcttcccaacaatccaagtcttccggataatttgggtcttcctgaaaatctacgtcttccaaaaaagccatgtcttccagaaaatccacatcttccaacaaagccatgtcttccagactatccatgtcttccagaaaatccttgtcttccctcaaatccatagcttccgaaaaatccaggtcttccaggaaatccgtgtcttccagcaaatccacgtcttccaacaaagccatgtcttccatcaaattaatgtcttccagcctacttgtgtcttccaacaaaggtacgtcttccaacaaaggtacgtcttccaacaaaggtatgtcttccaacaaaggtacgtcttccagaaaatccacgtcttccaaccaagccatgtcttccagaaaatccacgtcttccagaaaatatatgtcttccaacactacccagtcttccatcaactggctcaatatccatgtcttccaacgtctccagtgtgctgatcttctgacattcaggtcttccagtgtctgcaatatccagggtttccgatggcacctgtgtcaaggtcttccaacaactccgggtcttccagcgacttcaagtcttccaataatctcaaggtcttccagataatcctgagcttccagaaaatccacatcttccagacaatccatgtcttccggacaatccatgtcttccaagaagctccaagtcttccagtaaatcaagtcttccagcaaatccagtcttccagcaattactggtcttccaccaaatccagatcttccaggaaaatccacgtcttccaggaaatccatgtcttccaataatttcaaggtcttccatcaaatacagatcttccagctaatccatgtcttccagaaaaatctgtgtcttccaccaaatccaagtcttccagtaaatctagttcttccagaaaaatctagatcttccagtcaatcagtgtcttccagaaagaaatccaggtcttccagtcaatcagtgtcttccagaaagaaatccaggtcttccagtcagacagttgcatccagagacacttgcatccagagg

SEQ ID NO: 734378 - DNA, 1493 bp, Homo sapiens
  misc_feature (39)..(39): n is a, c, g, or t
gacgaatcatagcttccagaaaaatctagatcttccagncaatcagtgtcttccagaaagaaatccaggtcttccagtcaatcagtgtcttccagaaagaaatccaggtcttccagtcagtcagtgtcttccagaaaaatctacgtcttccaccaaatccaggtcttccagtcaatccacatcttccggaaaaaatccaggtcttccagccaatatatgtcttcctgaagatccacgtcttccagaaaatccatgtcttccagaaaatccatgtcttccagtaacctcccagtcttccagaaaatccacgtcttcccaacaatccaagtcttccggataatttgggtcttcctgaaaatctacgtcttccaaaaaagccatgtcttccagaaaatccacatcttccaatggcctccaggtcttccagactatccatgtcttccagaaaatccttgtcttcccttaaatctatagcttccaaaaaatccgggtcttccaggaaatccgtgtcttccagcaagtccacgtcttccaacaaagccatgtcttccagactatccatgtcttccagaaaatccttgtcttccctcaaatccatagcttccgaaaaatccaggtcttccaggaaatccgtgtcttccagcaaatccacgtcttccaacaaagccatgtcttccatcaaattaatgtcttccagcctacttgtgtcttccaacaaaggtacgtcttccaacaaaggtacgtcttccaacaaaggtatgtcttccaacaaaggtacgtcttccagaaaatccacgtcttccaaccaagccatgtcttccagaaaatccacgtcttccagaaaatatatgtcttccaacactacccagtcttccatcaactggctcaatatccatgtcttccaacgtctccagtgtgctgatcttctgacattcaggtcttccagtgtctgcaatatccagggtttccgatggcacctgtgtcaaggtcttccaacaactccgggtcttccagcgacttcaagtcttccaataatctcaaggtcttccagataatcctgagcttccagaaaatccacatcttccagacaatccatgtcttccggacaatccatgtcttccaagaagctccaagtcttccagtaaatcaagtcttccagcaaatccagtcttccagcaattactggtcttccaccaaatccagatcttccaggaaaatccacgtcttccaggaaatccatgtcttccaataatttcaaggtcttccatcaaatacagatcttccagctaatccatgtcttccagaaaaatctgtgtcttccaccaaatccaagtcttccagtaaatctagttcttccagaaaaatctagatcttccagtcaatcagtgtcttccagaaagaaatccaggtcttccagtcaatcagtgtcttccagaaagaaatccaggtcttccagtcagacagttgcatccagagacacttgcatccagagg

SEQ ID NO: 734379 - DNA, 473 bp, Homo sapiens
tcttccagtaaatctagttcttccagaaaaatctagatcttccagtcaatcagtgtcttccagaaagaaatccaggtcttccagtcaatcagtgtcttccagaaagaaatccaggtcttccagtcagtcagtgtcttccagaaaaatctacgtcttccaccaaatccaggtcttccagtcaatccacatcttccggaaaaaatccaggtcttccagccaatatatgtcttcctgaagatccacgtcttccagaaaatccatgtcttccagaaaatccatgtcttccagtaacctcccagtcttccagaaaatccacgtcttcccaacaatccaagtcttccggataatttgggtcttcctgaaaatctacgtcttccaaaaaagccatgtcttccagaaaatccacatcttccaatggcctccagtcttccagacatcgattgcggttactaggtactctagtacagctagcg

SEQ ID NO: 734380 - DNA, 1840 bp, Homo sapiens
tccagaaaatatatgtcttccaactaagctacgtcttccaacaaatccatgtcttcctatatctccaggtcttccagcatctccagggcttccagcatctgctcgtcttccaacatctccacgtcttccagcatctctgtgtcttccagcatcttcatgtcttccaacaactacccagtcttccatcaactggctcaatatccatgtcttccaacgtctccagtgtgctgatcttctgacattcaggtcttccagtgtctgcaatatccagggtttccgatggcacctgtgtcaaggtcttccaacaactccgggtcttccagcgacttcaagtcttccaataatctcaaggtcttccagataatcctgagcttccagaaaatccacatcttccagacaatccatgtcttccggacaatccatgtcttccaagaagctccaagtcttccagtaaatcaagtcttccagcaaatccagtcttccagcaattactggtcttccaccaaatccagatcttccaggaaaatccacgtcttccaggaaatccatgtcttccaataatttcaaggtcttccatcaaatacagatcttccagctaatccatgtcttccagaaaaatctgtgtcttccaccaaatccaagtcttccagtaaatctagttcttccagaaaaatctagatcttccagtcaatcagtgtcttccagaaagaaatccaggtcttccagtcaatcagtgtcttccagaaatcttccaatggcctccaggtcttccagactatccatgtcttccagaaaatccttgtcttcccttaaatctatagcttccaaaaaatccgggtcttccaggaaatccgtgtcttccagcaagtccacgtcttccaacaaagccatgtcttccagactatccatgtcttccagaaaatccttgtcttccctcaaatccatagcttccgaaaaatccaggtcttccaggaaatccgtgtcttccagcaaatccacgtcttccaacaaagccatgtcttccatcaaattaatgtcttccagcctacttgtgtcttccaacaaaggtacgtcttccaacaaaggtacgtcttccaacaaaggtatgtcttccaacaaaggtacgtcttccagaaaatccacgtcttccaaccaagccatgtcttccagaaaatccacgtcttccagaaaatatatgtcttccaacactacccagtcttccatcaactggctcaatatccatgtcttccaacgtctccagtgtgctgatcttctgacattcaggtcttccagtgtctgcaatatccagggtttccgatggcacctgtgtcaaggtcttccaacaactccgggtcttccagcgacttcaagtcttccaataatctcaaggtcttccagataatcctgagcttccagaaaatccacatcttccagacaatccatgtcttccggacaatccatgtcttccaagaagctccaagtcttccagtaaatcaagtcttccagcaaatccagtcttccagcaattactggtcttccaccaaatccagatcttccaggaaaatccacgtcttccaggaaatccatgtcttccaataatttcaaggtcttccatcaaatacagatcttccagctaatccatgtcttccagaaaaatctgtgtcttccaccaaatccaagtcttccagtaaatctagttcttccagaaaaatctagatcttccagtcaatcagtgtcttccagaaagaaatccaggtcttccagtcaatcagtgtcttccagaaagaaatccaggtcttccagtcagacagttgcatccagagacacttgcatccagagg

SEQ ID NO: 734381 - DNA, 1560 bp, Homo sapiens
acagaggatccccggcatactggaccttctccgggtcttccagcgacttcaagtcttccaataatctcaaggtcttccagataatcctgagcttccagaaaatccacatcttccagacaatccatgtcttccggacaatccatgtcttccaagaagctccaagtcttccagtaaatcaagtcttccagcaaatccagtcttccagcaattactggtcttccaccaaatccagatcttccaggaaaatccacgtcttccaggaaatccatgtcttccaataatttcaaggtcttccatcaaatacagatcttccagctaatccatgtcttccagaaaaatctgtgtcttccaccaaatccaagtcttccagtaaatctagttcttccagaaaaatctagatcttccagtcaatcagtgtcttccagaaagaaatccaggtcttccagtcaatcagtgtcttccagaaatcttccaatggcctccaggtcttccagactatccatgtcttccagaaaatccttgtcttcccttaaatctatagcttccaaaaaatccgggtcttccaggaaatccgtgtcttccagcaagtccacgtcttccaacaaagccatgtcttccagactatccatgtcttccagaaaatccttgtcttccctcaaatccatagcttccgaaaaatccaggtcttccaggaaatccgtgtcttccagcaaatccacgtcttccaacaaagccatgtcttccatcaaattaatgtcttccagcctacttgtgtcttccaacaaaggtacgtcttccaacaaaggtacgtcttccaacaaaggtatgtcttccaacaaaggtacgtcttccagaaaatccacgtcttccaaccaagccatgtcttccagaaaatccacgtcttccagaaaatatatgtcttccaacactacccagtcttccatcaactggctcaatatccatgtcttccaacgtctccagtgtgctgatcttctgacattcaggtcttccagtgtctgcaatatccagggtttccgatggcacctgtgtcaaggtcttccaacaactccgggtcttccagcgacttcaagtcttccaataatctcaaggtcttccagataatcctgagcttccagaaaatccacatcttccagacaatccatgtcttccggacaatccatgtcttccaagaagctccaagtcttccagtaaatcaagtcttccagcaaatccagtcttccagcaattactggtcttccaccaaatccagatcttccaggaaaatccacgtcttccaggaaatccatgtcttccaataatttcaaggtcttccatcaaatacagatcttccagctaatccatgtcttccagaaaaatctgtgtcttccaccaaatccaagtcttccagtaaatctagttcttccagaaaaatctagatcttccagtcaatcagtgtcttccagaaagaaatccaggtcttccagtcaatcagtgtcttccagaaagaaatccaggtcttccagtcagacagttgcatccagagacacttgcatccagagg

SEQ ID NO: 734382 - DNA, 416 bp, Homo sapiens
ctccaatatcctgtgcttacaatgtttccaatgtccagggtttccgatggcacctgtgtcaaggtcttccaacaactccgggtcttccagcgacttcaagtcttccaataatctcaaggtcttccagataatcctgagcttccagaaaatccacatcttccagacaatccatgtcttccggacaatccatgtcttccaagaagctccaagtcttccagtaaatcaagtcttccagcaaatccagtcttccagcaattactggtcttccaccaaatccagatcttccaggaaaatccacgtcttccaggaaatccatgtcttccaataatttcaaggtcttccatcaaatacagatcttccagctaatccatgtcttccagaaaaatctgtgtcttccaccaaatccaagtcttcca

SEQ ID NO: 734383 - DNA, 484 bp, Homo sapiens
  misc_feature (31)..(31): n is a, c, g, or t
  misc_feature (221)..(221): n is a, c, g, or t
  misc_feature (291)..(291): n is a, c, g, or t
  misc_feature (301)..(301): n is a, c, g, or t
  misc_feature (306)..(306): n is a, c, g, or t
  misc_feature (308)..(308): n is a, c, g, or t
  misc_feature (437)..(437): n is a, c, g, or t
ggaggaatgccaatggggaccctgtctgcantgcctgtgggctctactacaagcttcacaatattaacagacccctgactatgaagaaggaaggcatccagaccagaaaccgaaaaatgtctagcaaatccaaaaagtgcaaaaaagtgcatgactcactggaggacttccccaagaacagctcgtttaacccggccgccctctccagacacatgtcctcnctgagccacatctcgcccttcagccacatgtcctccctgagccacatctcgcccttcagccactccagcnacatgctgcnacgcncncgccgatgcacccgccatccagcctgtcctttggaccacaccacccctccagcatggtcaccgccatgggttagagccctgctcgatgctcacagggcccccagcgagagtccctgcagtcctttcganttgcatttttgcaggagcagtattcatggaaggcttaaacgcgatgg

SEQ ID NO: 734384 - DNA, 1813 bp, Homo sapiens
tggccgaggctcaagagagcgtggcgtcgcattgccgtttttgctcagaatcgcgactaaggctttttttttttctccctctgaacggttaggctatggctgcgataaaggccgtcaactccaaggctgaggtggcgcgggcccaggcagctttggctgtcaatatatgcgccgcccgagggctgcaggatgtgctgcggaccaacttgggtcctaaaggcaccatgaaaatgcttgtttctggtgcaggtgacatcaaactcaccaaagatggcaatgtgctgctcgatgagatgcaaattcaacatccaacagcttccttgatagcaaaagtagcaacagctcaggatgacgtcacaggagatggtactacttcaaatgttctaattattggagagttattaaaacaagctgacctgtacatttctgagggcctgcaccctagaataatagctgaaggatttgaagctgcaaagataaaagcacttgaagttttggaggaagttaaagtgacaaaggagatgaaaagaaaaatcctcttagatgtagctagaacatcattacaaactaaagttcatgctgaactggctgatgtcttaacagaggttgtggtggattctgttttggctgttagaagaccaggttaccctattgatctcttcatggtagaaataatggagatgaagcataaattaggaacagatacaaagttgatccaaggattagttttggatcatggtgcccgtcatccagatatgaagaagcgagtagaagatgcatttatccttatttgcaacgtttcactggaatatgaaaaaacagaggtgaactctgctttcttttataagactgcagaagagaaagagaaattggtaaaagctgaaagaaaatttattgaagatagagtacaaaaaataatagacctgaaggacaaagtctgtgctcagtcaaataaaggatttgtcgtcattaatcaaaagggaattgatccattttccttagattctcttgcaaaacatggaatagtagctcttcgcagagcaaaaagaagaaatatggaaagactctctcttgcttgtggtggaatggccgtgaattcttttgaagatctcactgtagattgcttgggacatgctggtcttgtgtatgagtatacattaggtgaagaaaagttcacttttattgaggagtgtgttaacccttgctctgttaccttgttggttaaaggaccaaataagcatactctcacacaagtcaaggatgccataagagatggacttcgtgctatcaaaaatgccattgaagatggttgtatggttcctggagctggtgcaattgaagtggcaatggctgaagctcttgttacatataagaacagtataaaaggaagagctcgtcttggagtccaagcttttgctgatgccttactcattattcccaaggttcttgctcagaatgctggttatgacccacaggaaacattagtaaaagttcaggctgagcatgtcgagtcaaaacaacttgtgggcgtagatttgaatacaggtgagccaatggtagcagcagatgcaggagtttgggataattattgtgtaaaaaaacaacttcttcactcttgcacagtgattgccaccaacattctcctggttgatgaaattatgcgagctgggatgtcttctctcaaatgatgattgaattcaaaatcaacccttctagaagatgaaatttagtacactttacatctgactactattgtgtagcctgagccattctgaatttctacacaataaatgcagtttatgtcttttgggtc

SEQ ID NO: 734385 - DNA, 672 bp, Homo sapiens
ggacgcaggcgggaagtgatcaaggctccctgagtcccacccgagcgctcccggttcagcgcaggaggacgcacgccgggccaggggcctgcaccctagaataatagctgaagttaaagtgacaaaggagatgaaaagaaaaatcctcttagatgtagctagaacatcattacaaactaaagttcatgctgaactggctgatgtcttaacagaggttgtggtggattctgttttggctgttagaagaccaggttaccctattgatctcttcatggtagaaataatggagatgaagcataaattaggaacagatacaaagttgatccaaggattagttttggatcatggtgcccgtcatccagatatgaagaagcgagtagaagatgcatttatccttatttgcaacgtttcactggaatatgaaaaaacagaggtgaactctgctttcttttataagactgcagaagagaaagagaaattggtaaaagctgaaagaaaatttattgaagatagagtacaaaaaataatagacctgaaggacaaagtctgtgctcagtcaaataaaggatttgtcgtcattaatcaaaagggaattgatccattttccttagattctcttgcaaaacatggaatagtagctcttcgcagagcaaaaagaagaaatatggaaag

SEQ ID NO: 734386 - DNA, 816 bp, Homo sapiens
actctctcttgcttgtggtggaatggccgtgaattcttttgaagatctcactgtagattgcttgggacatgctggtcttgtgtatgagtatacattaggtgaagaaaagttcacttttattgaggagtgtgttaacccttgctctgttaccttgttggttaaaggaccaaataagcatactctcacacaagtcaaggatgccataagagatggacttcgtgctatcaaaaatgccattgaagatggttgtatggttcctggagctggtgcaattgaagtggcaatggctgaagctcttgttacatataagaacagtataaaaggaagagctcgtcttggagtccaagcttttgctgatgccttactcattattcccaaggttcttgctcagaatgctggttatgacccacaggaaacattagtaaaagttcaggctgagcatgtcgagtcaaaacaacttgtgggcgtagatttgaatacaggtgagccaatggtagcagcagatgcaggagtttgggataattattgtgtaaaaaaacaacttcttcactcttgcacagtgattgccaccaacattctcctggttgatgaaattatgcgagctgggatgtcttctctcaaatgatgattgaattcaaaatcaacccttctagaagatgaaatttagtacactttacatctgactactattgtgtagcctgagccattctgaatttctacacaataaatgcagtttatgtcttttgggtcttaatagtctcaaaaatatttcatcaaggtataaagaacacaataaatacttttacagtaaaggaa

SEQ ID NO: 734387 - DNA, 498 bp, Homo sapiens
ccatctgccaccctacactctcaatccctaagtaaaacggattctctggggagacgcagcacatcgcctggctctgcagcccccaccacattgtagcgtacacccgtggaggagtttggggtcacacacttaccggcatggtggctgcctggctgagcccggggacagcatgtactcatccgaagaggggacccatgaccgtggtgtgcacagtacaagagctcgcttgggatctctgataaaggaagtccaccatgcagggttgagctgaaccacagaagcccagcctgggagcagggctccaggactccccaaggatcagaaacctcaatgataaatttccgactggatgatacacactacacctgttcttcagcgatgatgtatggtgtgtctaacatctgcctattagcagctgaattcccttctatgacgtgatacataatgtatggtgtgacacagctgggtaataaacaatgtcagctgcgtcctaaaaaa

SEQ ID NO: 734388 - DNA, 484 bp, Homo sapiens; identical to SEQ ID NO: 48193

SEQ ID NO: 734389 - DNA, 729 bp, Homo sapiens
agagaacttctccaccgaccccgtcacctggattggatcaccgacctctcccaagaggggcctggcttcctcctcgctggggaaacggtagggagctcccctaggtaaagcctctagggagagtggccaggagccgggtcaggaaaggctctggtgcccaaagggctgcccgcagaggctgaggtccctgcaagtgcacagggaggagaggtgagatcagattccagccgagtcaggcttccatgtcagactgcgtgtgtttatgcagaggtgcaactcaggaattactgaggagaaagtacagggccaatttaacctcctctgagagacctctaaccctgctcatcaccactcctcgctaaaaagggccctctccagggaagaacccagagggagagcgggaattctcctccccttggaggaagagtgcttcctctacccttaatgtatcaactgacaacaattcaaacagaaggaaactaggatgtgacaaataaaggaagccttttcatgctctatgtccactggcgtcgggcaagccccggtggaagtccaaggaaaagagtctaagacccaaacagatggtttgcgccaaagttctgaagtgtatcagacgtgaataaaggtatgttaattctaaaaggaactaaaatagaaacatgatgtggtttagactcaggtattaaaaaatgagccatctcagaagtggagaccaactgaatatcttcc

SEQ ID NO: 734390 - DNA, 987 bp, Homo sapiens
agagaacttctccaccgaccccgtcacctggattggatcaccgacctctcccaagaggggcctggcttcctcctcgctggggaaacggtagggagctcccctaggtaaagcctctagggagagtggccaggagccgggtcaggaaaggctctggtgcccaaagggctgcccgcagaggctgaggtccctgcaagtgcacagggaggagaggtgagatcagattccagccgagtcaggcttccatgtcagactgcgtgtgtttatgcagaggtgcaactcaggaattactgaggagaaagtacagggccaatttaacctcctctgagagacctctaaccctgctcatcaccactcctcgctaaaaagggccctctccagggaagaacccagagggagagcgggaattctcctccccttggaggaagagtgcttcctctacccttaatgtatcaactgacaacaattcaaacagaaggaaactaggatgtgacaaataaaggaagccttttcatgctctatgtccactggcgtcgggcaagccccggtggaagtccaaggaaaagagtctaagacccaaacagatggtttgcgccaaagttctgaagtgtatcagacgtgaataaaggtatggttttcgattccctgccccctgcccgaggacctgcctcctccctgcccgaggaccaagcttcagaagaactgcacatgggaggaaataccaaccgcttaacttcttcagagacaacctctaacccggctcaccaccacgctagctaaaaaagggccctctcccagggaagatcccggaggaagagtgggaattcaccctccccttgggggaggagtgctttctctacccttaatttatgaactgagaaaaatcctaacaagcctactatgaaataaagatgcccttaacccatttatgcctagtgttccattattggaacgctaagcttgtgggagttatttatatcctactgctca

SEQ ID NO: 734391 - DNA, 956 bp, Homo sapiens
agagaacttctccaccgaccccgtcacctggattggatcaccgacctctcccaagaggggcctggcttcctcctcgctggggaaacggtagggagctcccctaggtaaagcctctagggagagtggccaggagccgggtcaggaaaggctctggtgcccaaagggctgcccgcagaggctgaggtccctgcaagtgcacagggaggagaggtgagatcagattccagccgagtcaggcttccatgtcagactgcgtgtgtttatgcagaggtgcaactcaggaattactgaggagaaagtacagggccaatttaacctcctctgagagacctctaaccctgctcatcaccactcctcgctaaaaagggccctctccagggaagaacccagagggagagcgggaattctcctccccttggaggaagagtgcttcctctacccttaatgtatcaactgacaacaattcaaacagaaggaaactaggatgtgacaaataaaggaagccttttcatgctctatgtccactggcgtcgggcaagccccggtggaagtccaaggaaaagagtctaagacccaaacagatggtttgcgccaaagttctgaagtgtatcagacgtgaataaaggtatgctgcctcctccctgcccgaggaccaagcttcagaagaactgcacatgggaggaaataccaaccgcttaacttcttcagagacaacctctaacccggctcaccaccacgctagctaaaaaagggccctctcccagggaagatcccggaggaagagtgggaattcaccctccccttgggggaggagtgctttctctacccttaatttatgaactgagaaaaatcctaacaagcctactatgaaataaagatgcccttaacccatttatgcctagtgttccattattggaacgctaagcttgtgggagttatttatatcctactgctca

SEQ ID NO: 734392 - DNA, 1789 bp, Homo sapiens; identical to SEQ ID NO: 304023

SEQ ID NO: 734393 - DNA, 637 bp, Homo sapiens; identical to SEQ ID NO: 304022

SEQ ID NO: 734394 - DNA, 941 bp, Homo sapiens; identical to SEQ ID NO: 304027

SEQ ID NO: 734395 - DNA, 1475 bp, Homo sapiens
accggccactgtacgggcctttctggacttggactccttgggagtcgtttctcggccatttgacccgtgggacttgtgggttttgtgctgctttttctttctttcttccccttttccaacttcagcaatacacccagatgttagtcgagtcacgtcccgccgccctctgcccttgaaatgctggcaagtacgcagccccgcgatcgtcacgtgacgccggggttcagcgtatccttgctgggcaaccgtcttagagaccagcactgctggctgcaccatgaatgtgatctacccactggcagtccccaaggggcgcagactctgctgtgaggtgtgcgaagccccagccgagcgggtgtgcgcggcctgcacagtcacttattactggtctgggccgaatcgttcaggctgaagaatatctattccaagcccagtggacagtcctcaaatcaactgactgtagtaatgccacccactctttactgcatcggaatctgggacttctctatatagctaagaaaaactatgaagaggcccgttatcatctggccaatgatatttattttgccagttgtgcatttggaacagaggacattaggacttcaggaggctacttccacctggctaatatattctatgaccttaaaaagttggacctggcagacacattgtacaccaaggtctctgagatctggcatgcatatttgaacaatcactatcaagtcctctcacaggctcacatccaacaaatggatttactgggcaaactatttgagaatgacactggcttggatgaagcccaagaagcagaagccattcgcatcctgacttcaatcttgaacattcgagaatctacatctgacaaagccccccaaaaaaccatctttgttctgaagatcctggtcatgctttactacctgatgatgaattcttcaaaggcacaggaatatggcatgagggccctcagtctagccaaagaacaacagcttgatgtccatgagcaaagcaccattcaagagttattaagtctcatttcaactgaagaccatcccattacttagtgacccatgagctctgcatcaagggttattccaggggctactgaagatctaatatattccagccttgcacaactgctttgaggtactgtagactgctgaagtttccaccctcttcccctgggattgcacacatagctgttatttttttcttacacagcatattaagggaatataaagctttaggcatagaaatcactaaaaactgtgtttgtcatgacctttgtacttgatttatcatgactttgtatgactgagtaatatgtagtcagatcactaatatggtatttgtaattaaactacaaatagtttgtcatttcccagaagtcttccaacgatgcatgtttcatacacttttgctaaaggaggggtaaaggagggggtagggaataaagctatattggaacaaaaaaaaaa

SEQ ID NO: 734396 - DNA, 425 bp, Homo sapiens; identical to SEQ ID NO: 64622

SEQ ID NO: 734397 - DNA, 944 bp, Homo sapiens
attcttgacatattgttcgcaatttgcagctcagctagaagaagcacttaaagaagaacaaaatgtatgtattctttttcttaaagtggtttcagtggcaggtcaatcagatggaagaaataagtaaagatcaaactcttttacaagcagagcctccaaaacctgacaaaacagtcattttaaatattgcagaaatagtaaggcttgtacaaagatttgaagaactgaagaatcgccttaaacagaggtctaaatcctccgtgaaagtcatgttgtctaaaactatggataaagaaaatcgaccagaagcagtgaaaagttgtgaagctctggcacagaaaattgaagaattcttagaagcccactcaactgatgaatttaaagatgtttctgcaacagaaccacaaactgctcattcaatgactaatcgatttaatgccatgttgaaagtatttgaaaaccaggcaaatatgttggagagaaacagacatcgtggtcttcagcatctcatccacagcaccaatggaattctcaaacgctgacaaatactcgtgaatttctactggatagtcttcattaatttcttcacctgccgttatggctgactcacggccttcgactccagcctcccggaaagcggtcgggcaacgatgacgacaatgacgcgccagctctgcccgcgccaccagcggcgctttccgatgatctcaccaatgtatagctttttatacacaaattacataccaataaagtgatttaaaagtataggataaaatatagaaactaggattttattaaattattatgcataaatttatatagtagcaggataggacaatcatgttggtctttgggggagctaatagacatattcttcaggatcttgtcagtgcattgtctagctgttcacctgtgcatattgagaaataaataaataggcatag

SEQ ID NO: 734398 - DNA, 841 bp, Homo sapiens; identical to SEQ ID NO: 63778
  misc_feature (28)..(28): n is a, c, g, or t

SEQ ID NO: 734399 - DNA, 531 bp, Homo sapiens; identical to SEQ ID NO: 63779
  misc_feature (28)..(28): n is a, c, g, or t

SEQ ID NO: 734400 - DNA, 964 bp, Homo sapiens
gaaggaggagtgatcatggctacctcagagctgagctgcgaggtgtcggaggagaactgtgagcgccgggaggccttctgggcagaatggaaggatctgacactgtccacacggcccgaggagggctgctccctgcatgaggaggacacccagagacatgagacctaccaccagcaggggcagtgccaggtgctggtgcagcgctcgccctggctgatgatgcggatgggcatcctcggccgtgggctgcaggagtaccagctgccctaccagcgggtactgccgctgcccatcttcacccctgccaagatgggcgccaccaaggaggagcgtgaggacacccccatccagcttcaggagctgctggcgctggagacagccctgggtggccagtgtgtggaccgccaggaggtggctgagatcacaaagcagctgccccctgtggtgcctgtcagcaagcccggtgcacttcgtcgctccctgtcccgctccatgtcccaggaagcacagagaggctgagagggactgtgacttgggctccgctgtgcccgccctgggctgggcccttcctggctaggactgtggaggggagctgctggccatggctgctttgtagtttgcccagagttgggggctaggggaggggggagccagaggccaggatgcctgagccccctgagttcccaaagggagggtggcagagacagtgggcactaagggtggagagttgggggccagcacagctgaggaccctcagccccaggagaagggacaaaaggtactggtgagggcaagaggtgcctgggaggagtggccctgatccaggaaaatgtgaggggaatctggaacgctctaggcagaagaagctgggagggagggggaggtgaaaagggcagaggcaaggatggtggggcccccagcaccctctgttagtgccgcaataaatgctcaatcatgtgccaga

SEQ ID NO: 734401 - DNA, 411 bp, Homo sapiens
gaaggaggagtgatcatggctacctcagagctgagctgcgaggtgtcggaggagaactgtgagcgccgggaggccttctgggcagaatggaaggatctgacactgtccacacggcccgaggagggctgctccctgcatgaggaggacacccagagacatgagacctaccaccagcaggggcagtgccaggtgctggtgcagcgctcgccctggctgatgatgcggatgggcatcctcggccgtgggctgcaggagtaccagctgccctaccagcgggtactgccgctgcccatcttcacccctgccaagatgggcgccacggagggggaggtgaaaagggcagaggcaaggatggtggggcccccagcaccctctgttagtgccgcaataaatgctcaatcatgtgccaga

SEQ ID NO: 734402 - DNA, 559 bp, Homo sapiens
gaaggaggagtgatcatggctacctcagagctgagctgcgaggtgtcggaggagaactgtgagcgccgggaggccttctgggcagaatggaaggatctgacactgtccacacggcccgaggagggcaaggaggagcgtgaggacacccccatccagcttcaggagctgctggcgctggagacagccctgggtggccagtgtgtggaccgccaggaggtggctgagatcacaaagcagctgccccctgtggtgcctgtcagcaagcccggtgcacttcgtcgctccctgtcccgctccatgtcccaggaagcacagagaggctgagagggactgtgacttgggctccgctgtgcccgccctgggctgggcccttcctggctaggactgtggaggggagctgctggccatggctgctttgtagtttgcccagagttgggggctaggggaggggggagccagaggccaggatgcctgagccccctgagttcccaaagggagggtggcagagacagtggcaccctctgttagtgccgcaataaatgctcaatcatgtgccaga

SEQ ID NO: 734403 - DNA, 793 bp, Homo sapiens
gaaggaggagtgatcatggctacctcagagctgagctgcgaggtgtcggaggagaactgtgagcgccgggaggccttctgggcagaatggaaggatctgacactgtccacacggcccgaggagggctgctccctgcatgaggaggacacccagagacatgagacctaccaccagcaggggcagtgccaggtgctggtgcagcgctcgccctggctgatgatgcggatgggcatcctcggccgtgggctgcaggagtaccagctgccctaccagcgggtactgccgctgcccatcttcacccctgccaagatgggcgccaccaaggaggagcgtgaggacacccccatccagcttcaggagctgctggcgctggagacagccctgggtggccagtgtgtggaccgccaggaggtggctgagatcacaaagcagctgccccctgtggtgcctgtcagcaagcccggtgcacttcgtcgctccctgtcccgctccatgtcccaggaagcacagagaggctgagagggactgtgacttgggctccgctgtgcccgccctgggctgggcccttcctgctgaggaccctcagccccaggagaagggacaaaaggtactggtgagggcaagaggtgcctgggaggagtggccctgatccaggaaaatgtgaggggaatctggaacgctctaggcagaagaagctgggagggagggggaggtgaaaagggcagaggcaaggatggtggggcccccagcaccctctgttagtgccgcaataaatgctcaatcatgtgccaga

SEQ ID NO: 734404 - DNA, 1167 bp, Homo sapiens
gagagagagagagagagaactagttctctctgcttctggcatgggcagcctggaggaggagggcaccatggaggaggcgggagaggaagagggggaagacggagacgcctttgtgacggaggagtcccaggacacacacagccttggggatcgtgaccccaagatcctcacgcacaacggccgcatgctgacactggctgacctggaagattacgtgcctggggaaggggagaccttccactgtggtggccctgggcctggcgcccctgatgaccctccctgcgaggtctcggtgatccagagagagatcggggagcccacggtggggcagcctgtgctgctcagcgtggggcatgcactgggtccccgaggccctctcggcctctttaggcctgagccccgtggggcgtcaccaccgggaccccaggtccgtagccttgagggcacctccttcctcttgcgggaggccccggctcggcctgtgggcagtgctccctggacgcagtctttctgcacccgcatccggcgttctgcggacagtggccagagcagcttcaccacagagctttccacccagaccgtcaacttcgggacagtgggggagacggtcacccttcacatctgcccagacagggatggggatgaggcggcacagccctgatgctgctgccatggtggcttggggcagcggggagaaaggagtgtccttgaggcctaggacgctgcccggcctcagcagcagccctgggagcctcctgagggccctccctgtccctggccacgggcccttcttacctcactcaacttcagccaggaggactgggtggtgcttgcaatgttggaatgaccggctcaaagacctcagctctgggctgtttcctgtcagcctggcaggagcctcaggactgtggacgaaggatgtggccttgggcatttgtcctgttcccacatgggcctggtccctccctcctggccccagccacagctgccaggcctgacatggccttgcctctcctgcagtcttggtgactgagacccttgggtggcgcttcccagctctgcaggccctcctggccttttctgcagggtggacacagggtctgtgtgtgggcagcagcccctgtctctcagcaagaataaagcagcttcctgtgcaaaaaactgatt

SEQ ID NO: 734405 - DNA, 472 bp, Homo sapiens
atattgggagaaggtaaagttgagtaacaagaaaccaaccgtgtgtgagagggggattggaaaaaaatttgagggagaagaatgttagaatggaagggaatgatggtggaagggaggtgtgagggtgtgtgctgagtgttgaaagaacggttggtgtctgtgtgattttccttgagtctgttcttcagtgtgtcttctgcagcttgccatgactgcctgggaaagagtagggaaatacccagagccaaaacctcctttcagtcccaccccatccctcaaaaccccagctattgcttcttttcagcttcaggtcctgatctccaatcttagtatggactcccttctcaccaagaccaccaccagctacgtttgctgtgtaatctggaaagtgataatttcctttgcttgttgggtgtgagtcacaatactttggtttgtgcacaagaataaatttatgccccataccttctgt

SEQ ID NO: 734406 - DNA, 2284 bp, Homo sapiens
gccccaccatcgtttccccgcgcgcaggtccgcggggaggggcggcctgccgaccggcccaccccagggcgttcctgaagggcgtcctcggccgcccccaccgcctcccagatgtactatgcggtttcccaggcgcgcgtgaacgcggtccccgggaccatgctgcggccacagcggcccggagacttgcagctcggggcctccctctacgagctggtgggctacaggcagccgccctcctcctcctcctcctccacctcctccacctcctccacttcctcctcctccacgacggcccccctcctccccaaggctgcgcgcgagaagccggaggcgccggccgagcctccaggccccgggcccgggtcaggcgcgcacccgggcggcagcgcccggccggacgccaaggaggagcagcagcagcagctgcggcgcaagatcaacagccgcgagcggaagcgcatgcaggacctgaacctggccatggacgccctgcgcgaggtcatcctgccctactcagcggcgcactgccagggcgcgcccggccgcaagctctccaagatagccacgctgctgctcgcccgcaactacatcctactgctgggcagctcgctgcaggagctgcgccgcgcgctgggcgagggcgccgggcccgccgcgccgcgcctgctgctggccgggctgcccctgctcgccgccgcgcccggctccgtgctgctggcgcccggcgccgtaggaccccccgacgcgctgcgccccgccaagtacctgtcgctggcgctggacgagccgccgtgcggccagttcgctctccccggcggcggcgcaggcggccccggcctctgcacctgcgccgtgtgcaagttcccgcacctggtcccggccagcctgggcctggccgccgtgcaggcgcaattctccaagtgagggcgggcctgggcctggggcgcgacctcggcccggcctcccttcgctcagcttctccgcgcccctgctccctgcgtctgggagagcgaggccgagcaaggaaagcatttcgaaccttccagtccagaggaagggactgtcgggcacccccttccccgcccccacccctgggacgttaaagtgaccagagcggatgttcgatggcgcctcggggcagtttggggttctgggtcggttccagcggctttaggcagaaagtgctcgctctcacccagcacatctctctccttgtccctggagttgcgcgcttcgcggggccgatgtagaacttagggcgccttgccgtggttggcgcgccccgggtgcagcgagaggccatccccgagcgctacctccccggagcggagcacgccggctcccagtactaggggctgcgctcgagcagtggcgggggcggaggggtggttcttttccttctcctccgccagaggccacgggcgcccttgttcccgccggccaggtcctatcaaaggaggctgccggaactcaagaggcagaaaaagaccagttaggcggtgcagacggtctgggacgtggcagacggacggaccctcggcggacaggtggtcggcgtcggggtgcggtgggtaggggcgaggacaacgcagggtgcgctgggttgggacgtgggtccacttttgtagaccagctgtttggagagctgtatttaagactcgcgtatccagtgttttgtcgcagagagttttcgctcttaaatcctgggggtttcttagaaagcaacttagaactcgagattcacctttcgtttccctttccccaaaagtagcgtaaccaacatttaagcttgcttaaaaacgaaaaccaaccgccttgcatccagtgttcccgatttactaaaataggtaaccaggcgtctcacagtcgccgtcctgtcaagagcgctaatgaacgttctcattaacacgcaggagtaccgggagccctgaaccgcccgctgctcggcggatcccagctgcggtggcgacggcgggaaggcgctttccgctgttcctcagcgggccgggcccttgaccagcgcggcccgcaggtcttccttctcgccgtcttgcagttgaagagctacatacgtagtcagtttcgatttgttacagacgttaacaaattcctttacccaaggttatgctatgacctttccgcagtttactttgattttctatgtttaaggttttggttgttggtagtagccgaatttaactggcactttattttacttctaaccttgtttcctgacggtgtacagaatcaacaaaataaaacatttaaagtctgatttttt

SEQ ID NO: 734407 - DNA, 1918 bp, Homo sapiens
gccccaccatcgtttccccgcgcgcaggtccgcggggaggggcggcctgccgaccggcccaccccagggcgttcctgaagggcgtcctcggccgcccccaccgcctcccagatgtactatgcggtttcccaggcgcgcgtgaacgcggtccccgggaccatgctgcggccacagcggcccggagacttgcagctcggggcctccctctacgagctggtgggctacaggcagccgccctcctcctcctcctcctccacctcctccacctcctccacttcctcctcctccacgacggcccccctcctccccaaggctgcgcgcgagaagccggaggcgccggccgagcctccaggccccgggcccgggtcaggcgcgcacccgggcggcagcgcccggccggacgccaaggaggagcagcagcagcagctgcggcgcaagatcaacagccgcgagcggaagcgcatgcaggacctgaacctggccatggacgccctgcgcgaggtcatcctgccctactcagcggcgcactgccagggcgcgcccggccgcaagctctccaagatagccacgctgctgctcgcccgcaactacatcctactgctgggcagctcgctgcaggagctgcgccgcgcgctgggcgagggcgccgggcccgccgcgccgcgcctgctgctggccgggctgcccctgctcgccgccgcgcccggctccgtgctgctggcgcccggcgccgtaggaccccccgacgcgctgcgccccgccaagtacctgtcgctggcgctggacgagccgccgtgcggccagttcgctctccccggcggcggcgcaggcggccccggcctctgcacctgcgccgtgtgcaagttcccgcacctggtcccggccagcctgggcctggccgccgtgcaggcgcaattctccaagtgagggcgggcctgggcctggggcgcgacctcggcccggcctcccttcgctcagcttctccgcgcccctgctccctgcgtctgggagagcgaggccgagcaaggaaagcatttcgaaccttccagtccagaggaagggactgtcgggcacccccttccccgcccccacccctgggacgttaaagtgaccagagcggatgttcgatggcgcctcggggcagtttggggttctgggtcggttccagcggctttaggcagaaagtgctcgctctcacccagcacatctctctccttgtccctggagttgcgcgcttcgcggggccgatgtagaacttagggcgccttgccgtggttggcgcgccccgggtgcagcgagaggccatccccgagcgctacctccccggagcggagcacgccggctcccagtactaggggctgcgctcgagcagtggcgggggcggaggggtggttcttttccttctcctccgccagaggccacgggcgcccttgttcccgccggccaggtcctatcaaaggaggctgccggaactcaagaggcagaaaaagaccagttaggcggtgcagacggtctgggacgtggcagacggacggaccctcggcggacaggagtaccgggagccctgaaccgcccgctgctcggcggatcccagctgcggtggcgacggcgggaaggcgctttccgctgttcctcagcgggccgggcccttgaccagcgcggcccgcaggtcttccttctcgccgtcttgcagttgaagagctacatacgtagtcagtttcgatttgttacagacgttaacaaattcctttacccaaggttatgctatgacctttccgcagtttactttgattttctatgtttaaggttttggttgttggtagtagccgaatttaactggcactttattttacttctaaccttgtttcctgacggtgtacagaatcaacaaaataaaacatttaaagtctgatttttt

SEQ ID NO: 734408 - DNA, 1938 bp, Homo sapiens
gccccaccatcgtttccccgcgcgcaggtccgcggggaggggcggcctgccgaccggcccaccccagggcgttcctgaagggcgtcctcggccgcccccaccgcctcccagatgtactatgcggtttcccaggcgcgcgtgaacgcggtccccgggaccatgctgcggccacagcggcccggagacttgcagctcggggcctccctctacgagctggtgggctacaggcagccgccctcctcctcctcctcctccacctcctccacctcctccacttcctcctcctccacgacggcccccctcctccccaaggctgcgcgcgagaagccggaggcgccggccgagcctccaggccccgggcccgggtcaggcgcgcacccgggcggcagcgcccggccggacgccaaggaggagcagcagcagcagctgcggcgcaagatcaacagccgcgagcggaagcgcatgcaggacctgaacctggccatggacgccctgcgcgaggtcatcctgccctactcagcggcgcactgccagggcgcgcccggccgcaagctctccaagatagccacgctgctgctcgcccgcaactacatcctactgctgggcagctcgctgcaggagctgcgccgcgcgctgggcgagggcgccgggcccgccgcgccgcgcctgctgctggccgggctgcccctgctcgccgccgcgcccggctccgtgctgctggcgcccggcgccgtaggaccccccgacgcgctgcgccccgccaagtacctgtcgctggcgctggacgagccgccgtgcggccagttcgctctccccggcggcggcgcaggcggccccggcctctgcacctgcgccgtgtgcaagttcccgcacctggtcccggccagcctgggcctggccgccgtgcaggcgcaattctccaagtgagggcgggcctgggcctggggcgcgacctcggcccggcctcccttcgctcagcttctccgcgcccctgctccctgcgtctgggagagcgaggccgagcaaggaaagcatttcgaaccttccagtccagaggaagggactgtcgggcacccccttccccgcccccacccctgggacgttaaagtgaccagagcggatgttcgatggcgcctcggggcagtttggggttctgggtcggttccagcggctttaggcagaaagtgctcgctctcacccagcacatctctctccttgtccctggagttgcgcgcttcgcggggccgatgtagaacttagggcgccttgccgtggttggcgcgccccgggtgcagcgagaggccatccccgagcgctacctccccggagcggagcacgccggctcccagtactaggggctgcgctcgagcagtggcgggggcggaggggtggttcttttccttctcctccgccagaggccacgggcgcccttgttcccgccggccaggtcctatcaaaggaggctgccggaactcaagaggcagaaaaagaccagttaggcggtgcagacggtctgggacgtggcagacggacggaccctcggcggacaggtggtcggcgtcggggtgcggagtaccgggagccctgaaccgcccgctgctcggcggatcccagctgcggtggcgacggcgggaaggcgctttccgctgttcctcagcgggccgggcccttgaccagcgcggcccgcaggtcttccttctcgccgtcttgcagttgaagagctacatacgtagtcagtttcgatttgttacagacgttaacaaattcctttacccaaggttatgctatgacctttccgcagtttactttgattttctatgtttaaggttttggttgttggtagtagccgaatttaactggcactttattttacttctaaccttgtttcctgacggtgtacagaatcaacaaaataaaacatttaaagtctgatttttt

SEQ ID NO: 734409 - DNA, 2178 bp, Homo sapiens
gccccaccatcgtttccccgcgcgcaggtccgcggggaggggcggcctgccgaccggcccaccccagggcgttcctgaagggcgtcctcggccgcccccaccgcctcccagatgtactatgcggtttcccaggcgcgcgtgaacgcggtccccgggaccatgctgcggccacagcggcccggagacttgcagctcggggcctccctctacgagctggtgggctacaggcagccgccctcctcctcctcctcctccacctcctccacctcctccacttcctcctcctccacgacggcccccctcctccccaaggctgcgcgcgagaagccggaggcgccggccgagcctccaggccccgggcccgggtcaggcgcgcacccgggcggcagcgcccggccggacgccaaggaggagcagcagcagcagctgcggcgcaagatcaacagccgcgagcggaagcgcatgcaggacctgaacctggccatggacgccctgcgcgaggtcatcctgccctactcagcggcgcactgccagggcgcgcccggccgcaagctctccaagatagccacgctgctgctcgcccgcaactacatcctactgctgggcagctcgctgcaggagctgcgccgcgcgctgggcgagggcgccgggcccgccgcgccgcgcctgctgctggccgggctgcccctgctcgccgccgcgcccggctccgtgctgctggcgcccggcgccgtaggaccccccgacgcgctgcgccccgccaagtacctgtcgctggcgctggacgagccgccgtgcggccagttcgctctccccggcggcggcgcaggcggccccggcctctgcacctgcgccgtgtgcaagttcccgcacctggtcccggccagcctgggcctggccgccgtgcaggcgcaattctccaagtgagggcgggcctgggcctggggcgcgacctcggcccggcctcccttcgctcagcttctccgcgcccctgctccctgcgtctgggagagcgaggccgagcaaggaaagcatttcgaaccttccagtccagaggaagggactgtcgggcacccccttccccgcccccacccagcacatctctctccttgtccctggagttgcgcgcttcgcggggccgatgtagaacttagggcgccttgccgtggttggcgcgccccgggtgcagcgagaggccatccccgagcgctacctccccggagcggagcacgccggctcccagtactaggggctgcgctcgagcagtggcgggggcggaggggtggttcttttccttctcctccgccagaggccacgggcgcccttgttcccgccggccaggtcctatcaaaggaggctgccggaactcaagaggcagaaaaagaccagttaggcggtgcagacggtctgggacgtggcagacggacggaccctcggcggacaggtggtcggcgtcggggtgcggtgggtaggggcgaggacaacgcagggtgcgctgggttgggacgtgggtccacttttgtagaccagctgtttggagagctgtatttaagactcgcgtatccagtgttttgtcgcagagagttttcgctcttaaatcctgggggtttcttagaaagcaacttagaactcgagattcacctttcgtttccctttccccaaaagtagcgtaaccaacatttaagcttgcttaaaaacgaaaaccaaccgccttgcatccagtgttcccgatttactaaaataggtaaccaggcgtctcacagtcgccgtcctgtcaagagcgctaatgaacgttctcattaacacgcaggagtaccgggagccctgaaccgcccgctgctcggcggatcccagctgcggtggcgacggcgggaaggcgctttccgctgttcctcagcgggccgggcccttgaccagcgcggcccgcaggtcttccttctcgccgtcttgcagttgaagagctacatacgtagtcagtttcgatttgttacagacgttaacaaattcctttacccaaggttatgctatgacctttccgcagtttactttgattttctatgtttaaggttttggttgttggtagtagccgaatttaactggcactttattttacttctaaccttgtttcctgacggtgtacagaatcaacaaaataaaacatttaaagtctgatttttt

SEQ ID NO: 734410 - DNA, 2868 bp, Homo sapiens
ccaccccaagctgggaaaataagcttctccctcccatatgtgggggcggccccctcctgagacctgtcatcacttagggggagttgggcaaaacctcctaggaaggtcctggacgcctccaccctgccccacaaggctccgtactcccacctgcctgggcagccctcacacccatgctccctcctttaggcaggcccagaaaggtgccccttcctgagggtgttgggggatggcggcagagagacagctggtattaggagcttccccatcctaatgtgcaggaccaagttgcccgctctgccagccaggggctccaccatgctggcacaggcatctcagaggtgtgagatgaactccgcctcatgcaggatgcccagggctcggaagcagtaaggaggatgctacagaaaggaactgcagaaagaaaaaaagccacatggttaacttttcccctggagggcaaaggggtccggctctcaaaaagaaaagccaggcacagatcccaacaccaagtgtaaggcagcacaaagtgggtctgaaaccccaggaccgggtcaaaggccttccgaaggcccgaggttcttgaggaggaggggaagctgatagggccctggtctttctgcaccagcgtggctctttaaaatacaaaacacccacaaagccaaaaaccctgaaacatgttctttagctaaccccttccctgcccagatgcctgcaattctgagaattcacttcagttttgccagatccaacccctaggcttgagggtggagagccaggcctcctcagggtcccttctaggctcccaggcccaccttaggctttaattgcattggctgtttcttatggtgttagtgaattttgcaaagaaagccctgagcattgcataaatgcttgggggcgtgtcatttaaatggaagttctccaatagtggctgaaggcagagtttactgttatccctccctcttgctggctttgctggagggcttttatcagagagattggaggtgggagagcacttttaaagcacaccccaccccctgcacccgagcggcacctaagcttcccagagaccatgaccttgtatgtggctggaggcctcaggcttagggagcagcctgaagcctttgctgtcaaccctcccaggaaagaagccgggcctcaggctgaggaaaaacagagtttcctctccagagggctcaatgagcagccgggtagtggcctcgggcagtcctcaccagggggacacctccctgctttgcattaactcatcagcaagctcatcgagagctaacgtgggcccagcagtcctgtgcttggaaatgatgccgtcacctccacactcctgctgttccagcctctgcaggtgaagctgcaaggtgagcagaggcaggcgtggggacacactcttcaaggactgcactgccccttctccctcctgagagctctgtgcactgggtttggggatgaggcgccagcctggtcaggggaggtgactgtggtccttctgaccagcttggatctttaaaataatcacaaaaaagctcagcctgagcaggtgggtgcaaggctcaggggcctgtgtttttcatcaatcagttttcttcctgcaagattcttagagctggatgttcacgggatcatggggcatggaggtggtcacgctcagacagtcatgcaccaccctcaatcccaggccctgcagagataggaagaatcccaaccagagggattcttccccaaacgttcccttgtggcccaagagtgagttccggcctgagtgctgttatgactgccggcgtctctccgactgcctctcgcctcagtttaaccatctataggttaggaacaaagaagggcttaggcagccatcgtttccccatttctgtcagagccaagggcttggaggcccagccccatccgggcaagggctgtccgctcctgcccaggcctcacctcctcgctgcagctggcaagattctttctagcagaacagaaacactggcccccaattccactctcccctcctgatgctaccgcagagggcagaaaggtgccctgtagcgtccaccatgtgtgtgtcctgagtttccagtgcaagtcatctggatttgcatttagctagggaaactcggccctcaaaccctctccctctctgcctgaatttgccaaaatgccaaccatccgggcaggtgtggatgccacagtccatccccattgcatttcacccccacatggacagaggcacacactcgcacacattcccagcacctttgactgctgggggatgcaggccagggtctgcctggagcctcagggttgggacttatctccaaaggagcccacaccccctcttccaggatgggcactggctggcagcacttttttccctcatcacatccctgacccctgcccagcccacatgcacatgctgtttcctgtctccagggccctagcctgtggatctcttcctcccatgcactcctagggtgaatgggctcagcaccaaacctggctgtgcccattccccacaaccccagcttggcctcctgtgggaaggagaaggcagacctgcccagaggagaggggcagtgttcccacccacctgctccagcacaggaaccagggaggaaagaagggagagggaggttccattcaccgtcttctgggttagcgcttgattggatgtttcaagcaagggacaaggtgatggtggctgtaataggctcctcgtgggcaccgtcaccccagaaggcctgggcacccatgagaacctgtggccagcccttttcattggctgagttccctgctgttgtgcgtggtgccattttttttttaaacaacatatataaaaacaaaacaactggt

SEQ ID NO: 734411 - DNA, 2146 bp, Homo sapiens
ccaccccaagctgggaaaataagcttctccctcccatatgtgggggcggccccctcctgagacctgtcatcacttagggggagttgggcaaaacctcctaggaaggtcctggacgcctccaccctgccccacaaggctccgtactcccacctgcctgggcagccctcacacccatgctccctcctttaggcaggcccagaaaggtgccccttcctgagggtgttgggggatggcggcagagagacagctggtattaggagcttccccatcctaatgtgcaggaccaagttgcccgctctgccagccaggggctccaccatgctggcacaggcatctcagaggtgtgagatgaactccgcctcatgcaggatgcccagggctcggaagcagtaaggaggatgctacagaaaggaactgcagaaagaaaaaaagccacatggttaacttttcccctggagggcaaaggggtccggctctcaaaaagaaaagccaggcacagatcccaacaccaagtgtaaggcagcacaaagtgggtctgaaaccccaggaccgggtcaaaggccttccgaaggcccgaggttcttgaggaggaggggaagctgatagggccctggtctttctgcaccagcgtggctctttaaaatacaaaacacccacaaagccaaaaaccctgaaacatgttctttagctaaccccttccctgcccagatgcctgcaattctgagaattcacttcagttttgccagatccaacccctaggcttgagggtggagagccaggcctcctcagggtcccttctaggctcccaggcccaccttaggctttaattgcattggctgtttcttatggtgttagtgaattttgcaaagaaagccctgagcattgcataaatgcttgggggcgtgtcatttaaatggaagttctccaatagtggctgaaggcagagtttactgttatccctccctcttgctggctttgctggagggcttttatcagagagattggaggtgggagagcacttttaaagcacaccccaccccctgcacccgagcggcacctaagcttcccagagaccatgaccttgtatgtggctggaggcctcaggcttagggagcagcctgaagcctttgctgtcaaccctcccaggaaagaagccgggcctcaggctgaggaaaaacagagtttcctctccagagggctcaatgagcagccgggtagtggcctcgggcagtcctcaccagggggacacctccctgctttgcattaactcatcagcaagctcatcgagagctaacgtgggcccagcagtcctgtgcttggaaatgatgccgtcacctccacactcctgctgttccagcctctgcaggtgaagctgcaaggtgagcagaggcaggcgtggggacacactcttcaaggactgcactgccccttctccctcctgagagctctgtgcactgggtttggggatgaggcgccagcctggtcaggggaggtgactgtggtccttctgaccagcttggatctttaaaataatcacaaaaaagctcagcctgagcaggtgggtgcaaggctcaggggcctgtgtttttcatcaatcagttttcttcctgcaagattcttagagctggatgttcacgggatcatggggcatggaggtggtcacgctcagacagtcatgcaccaccctcaatcccaggccctgcagagataggaagaatcccaaccagagggattcttccccaaacgttcccttgtggcccaagagtgagttccggcctgagtgctgttatgactgccggcgtctctccgactgcctctcgcctcagtttaaccatctataggttaggaacaaagaagggcttaggcagccatcgtttccccatttctgtcagagccaagggcttggaggaaagaagggagagggaggttccattcaccgtcttctgggttagcgcttgattggatgtttcaagcaagggacaaggtgatggtggctgtaataggctcctcgtgggcaccgtcaccccagaaggcctgggcacccatgagaacctgtggccagcccttttcattggctgagttccctgctgttgtgcgtggtgccattttttttttaaacaacatatataaaaacaaaacaactggt

SEQ ID NO: 734412 - DNA, 3603 bp, Homo sapiens
ccaccccaagctgggaaaataagcttctccctcccatatgtgggggcggccccctcctgagacctgtcatcacttagggggagttgggcaaaacctcctaggaaggtcctggacgcctccaccctgccccacaaggctccgtactcccacctgcctgggcagccctcacacccatgctccctcctttaggcaggcccagaaaggtgccccttcctgagggtgttgggggatggcggcagagagacagctggtattaggagcttccccatcctaatgtgcaggaccaagttgcccgctctgccagccaggggctccaccatgctggcacaggcatctcagaggtgtgagatgaactccgcctcatgcaggatgcccagggctcggaagcagtaaggaggatgctacagaaaggaactgcagaaagaaaaaaagccacatggttaacttttcccctggagggcaaaggggtccggctctcaaaaagaaaagccaggcacagatcccaacaccaagtgtaaggcagcacaaagtgggtctgaaaccccaggaccgggtcaaaggccttccgaaggcccgaggttcttgaggaggaggggaagctgatagggccctggtctttctgcaccagcgtggctctttaaaatacaaaacacccacaaagccaaaaaccctgaaacatgttctttagctaaccccttccctgcccagatgcctgcaattctgagaattcacttcagttttgccagatccaacccctaggcttgagggtggagagccaggcctcctcagggtcccttctaggctcccaggcccaccttaggctttaattgcattggctgtttcttatggtgttagtgaattttgcaaagaaagccctgagcattgcataaatgcttgggggcgtgtcatttaaatggaagttctccaatagtggctgaaggcagagtttactgttatccctccctcttgctggctttgctggagggcttttatcagagagattggaggtgggagagcacttttaaagcacaccccaccccctgcacccgagcggcacctaagcttcccagagaccatgaccttgtatgtggctggaggcctcaggcttagggagcagcctgaagcctttgctgtcaaccctcccaggaaagaagccgggcctcaggctgaggaaaaacagagtttcctctccagagggctcaatgagcagccgggtagtggcctcgggcagtcctcaccagggggacacctccctgctttgcattaactcatcagcaagctcatcgagagctaacgtgggcccagcagtcctgtgcttggaaatgatgccgtcacctccacactcctgctgttccagcctctgcaggtgaagctgcaaggtgagcagaggcaggcgtggggacacactcttcaaggactgcactgccccttctccctcctgagagctctgtgcactgggtttggggatgaggcgccagcctggtcaggggaggtgactgtggtccttctgaccagcttggatctttaaaataatcacaaaaaagctcagcctgagcaggtgggtgcaaggctcaggggcctgtgtttttcatcaatcagttttcttcctgcaagattcttagagctggatgttcacgggatcatggggcatggaggtggtcacgctcagacagtcatgcaccaccctcaatcccaggccctgcagagataggaagaatcccaaccagagggattcttccccaaacgttcccttgtggcccaagagtgagttccggcctgagtgctgttatgactgccggcgtctctccgactgcctctcgcctcagtttaaccatctataggttaggaacaaagaagggcttaggcagccatcgtttccccatttctgtcagagccaagggcttggaggcccagccccatccgggcaagggctgtccgctcctgcccaggcctcacctcctcgctgcagctggcaagattctttctagcagaacagaaacactggcccccaattccactctcccctcctgatgctaccgcagagggcagaaaggtgccctgtagcgtccaccatgtgtgtgtcctgagtttccagtgcaagtcatctggatttgcatttagctagggaaactcggccctcaaaccctctccctctctgcctgaatttgccaaaatgccaaccatccgggcaggtgtggatgccacagtccatccccattgcatttcacccccacatggacagaggcacacactcgcacacattcccagcacctttgactgctgggggatgcaggccagggtctgcctggagcctcagggttgggacttatctccaaaggagcccacaccccctcttccaggatgggcactggctggcagcacttttttccctcatcacatccctgacccctgcccagcccacatgcacatgctgtttcctgtctccagggccctagcctgtggatctcttcctcccatgcactcctagggtgaatgggctcagcaccaaacctggctgtgcccattccccacaaccccagcttggcctcctgtgggaaggagaaggcagacctgcccagaggagaggggcagtgttcccacccacctgctccagcacaggaaccagggaggaaagaagggagagggaggttccattcaccgtcttctgggttagcgcttgattggatgtttcaagcaagggacaaggtgatggtggctgtaataggctcctcgtgggcaccgtcaccccagaaggcctgggcacccatgagaacctgtggccagcccttttcattggctgagttccctgctgttgtgcgtggtgccattttttttttaaacaacatatataaaaacaaaacaactggttctgtgtgtatcaacttaatttgcatatgaatgagtgttgtgttgtgatttgcagtgttttgacaccgtgattggctttgtttgggtctctcttctttctgtgaaattaactgctgtgcgttttcactgttcttagagaagaccctgagctcctggggttttcttgtctcacttctaccctgacctgctgggagcccaccccaccccagtccagccatgagggtatttccagcctattccaatgactgaaacccttcttggaagaaaacgtctaatgtcggggacgtagggacgcttccagacttgccctggccggaaccctgcagcctggggccccagcccgcctgcagctcagctttccccaacaccctcaggacccagccccagccccggcagaccttccctgggagctgcttaggtggtctccacagcgccctctaggggccaagcagggttccagattctccagccttctgccagctttaaaacccttcactcaagcagcattactgtacatgcaatgaaaaatactatatatgacagtcaaaacctgtgtacatatttccatgtacatatttatacatacacacaccttcctattataaatatataaagcatgacatctctttggcattccaagtttgtgtttttttaaatccttggaaatacggctttggaaacctttttcttcctttccctcttttctatgttgtaataaacattcatgtgaccttt

SEQ ID NO: 734413 - DNA, 1537 bp, Homo sapiens
gcccagccccatccgggcaagggctgtccgctcctgcccaggcctcacctcctcgctgcagctggcaagattctttctagcagaacagaaacactggcccccaattccactctcccctcctgatgctaccgcagagggcagaaaggtgccctgtagcgtccaccatgtgtgtgtcctgagtttccagtgcaagtcatctggatttgcatttagctagggaaactcggccctcaaaccctctccctctctgcctgaatttgccaaaatgccaaccatccgggcaggtgtggatgccacagtccatccccattgcatttcacccccacatggacagaggcacacactcgcacacattcccagcacctttgactgctgggggatgcaggccagggtctgcctggagcctcagggttgggacttatctccaaaggagcccacaccccctcttccaggatgggcactggctggcagcacttttttccctcatcacatccctgacccctgcccagcccacatgcacatgctgtttcctgtctccagggccctagcctgtggatctcttcctcccatgcactcctagggtgaatgggctcagcaccaaacctggctgtgcccattccccacaaccccagcttggcctcctgtgggaaggagaaggcagacctgcccagaggagaggggcagtgttcccacccacctgctccagcacaggaaccagggaggaaagaagggagagggaggttccattcaccgtcttctgggttagcgcttgattggatgtttcaagcaagggacaaggtgatggtggctgtaataggctcctcgtgggcaccgtcaccccagaaggcctgggcacccatgagaacctgtggccagcccttttcattggctgagttccctgctgttgtgcgtggtgccattttttttttaaacaacatatataaaaacaaaacaactggttctgtgtgtatcaacttaatttgcatatgaatgagtgttgtgttgtgatttgcagtgttttgacaccgtgattggctttgtttgggtctctcttctttctgtgaaattaactgctgtgcgttttcactgttcttagagaagaccctgagctcctggggttttcttgtctcacttctaccctgacctgctgggagcccaccccaccccagtccagccatgagggtatttccagcctattccaatgactgaaacccttcttggaagaaaacgtctaatgtcggggacgtagggacgcttccagaattctccagccttctgccagctttaaaacccttcactcaagcagcattactgtacatgcaatgaaaaatactatatatgacagtcaaaacctgtgtacatatttccatgtacatatttatacatacacacaccttcctattataaatatataaagcatgacatctctttggcattccaagtttgtgtttttttaaatccttggaaatacggctttggaaacctttttcttcctttccctcttttctatgttgtaataaacattcatgtgaccttt

SEQ ID NO: 734414 - DNA, 5911 bp, Homo sapiens
  misc_feature (5)..(6): n is a, c, g, or t
atgcnnaacaacctgacggactgcgaggacggcgatgggggagccaacccgggtgatggcaaccccaaggaaagcagtcccttcatcaacagcaccgacacagagaagggaaaggagtatgatggcaagaacatggccttgtttgaggaggagatggacaccagccctatggtgtcctccttgctcagtggcctggccaactacaccaacctgccccagggaagtagggagcatgaagaggcagaaaacaatgagggtggaaaaaagaagccggtgcaggccccacgcatgggcaccttcatgggcgtgtacctgccgtgcctgcagaacatctttggcgtcatcctcttcctgcggctcacctgggtggtgggcattgcaggcatcatggagtccttctgcatggtgttcatctgctgctcctgtacgatgctcacggccatctccatgagtgcaattgcaacgaatggtgttgtgcctgctggtggctcctactacatgatttccaggtctctgggcccagagtttgggggtgccgtgggcctctgcttctacctgggcactacctttgcaggagccatgtacatcctgggcaccatcgaaatcctgctggcttacctcttcccagccatggccatcttcaaggcagaagatgccagtggggaggcagcagccatgctgaacaacatgcgtgtttacggcacctgtgtgctcacctgcatggccactgtggtgtttgtgggtgtcaagtatgtcaacaagtttgcccttgtcttcctgggttgtgtcatcctctccatcctggccatctatgctggggtcatcaagtctgccttcgacccacccaacttcccgatctgcctcctgggtaaccgcacgctgtctcgccatggctttgatgtctgtgccaagctggcttgggaaggaaatgagacggtgaccacacggctatggggccttttctgctcctctcgcttcctcaacgccacctgtgatgaatacttcacccgaaacaatgtcacagagatccagggcatccctggtgctgccagtggcctcatcaaagagaacctctggagctcctacctgaccaagggcgtgattgtggagaggagtgggatgacctcggtgggcctggccgatggcactcctatcgacatggaccacccttatgtcttcagtgatatgacctcctacttcaccctgctggttggcatctacttcccctcagtcacagggatcatggctggttctaaccgctctggggacctgagggatgcccagaagtcaatccccactggcaccatcctggccatcgccaccacctctgctgtctacatcagctccgttgttctgtttggggcctgcattgagggggtcgtcctgcgggacaagtttggcgaagctgtgaatggcaacctcgtggtgggcactctggcctggccatctccatgggtaattgtcatcggatccttcttctccacctgtggggctgggctgcagagcctcacgggggccccacgcctgctgcaggccatctcgagggatggcattgtgcccttcctgcaggtctttggccatggcaaggccaatggagagccgacctgggccctgctcctgactgcctgcatctgcgagattggcatcctcattgcatccctcgacgaggtggcccccatcctctctatgttcttcctgatgtgctacatgtttgtgaatctggcctgtgcagtgcagacgctgctgaggacacccaactggaggccacgctttcgatattaccactggaccctctccttcctgggcatgagcctctgcctggccctcatgttcatctgctcctggtattatgcactggtagccatgctcattgctggactcatctacaagtacattgagtaccgtggggcagagaaggagtggggcgatgggatacgaggtctgtctctcagtgcggctcgctatgccctcttacgcctggaggaagggcccccacacaccaagaactggaggccacagctgctggtgctggtgcgtgtggaccaagaccagaatgtggtgcacccccagctgctctcactgacctcccagctgaaggcagggaagggcctgaccatcgtgggctctgtccttgagggcacctttctggaaaatcatccacaggcccagcgggcagaagagtctatcaggcgcctgatggaggcagagaaggtgaagggcttctgccaggtggtgatctcctccaacttgcgtgatggcgtgtcccatctgatccagtccgggggcctcggggggctgcagcacaacactgtgcttgttggctggccccgcaactggcgccagaaggaagatcatcagacgtggaggaacttcattgagctggtccgggaaaccacagctggccacttagccctgctggtcaccaagaacgtttccatgtttcctgggaaccctgagcgcttctctgagggcagcatcgacgtttggtggattgtgcacgatggaggcatgctcatgctgctgcccttcctgctgcggcaccacaaggtctggcggaagtgcaagatgcgtatcttcactgtggcccagatggatgacaatagcatccagatgaagaaggatctgaccacatttctgtatcatttacgcatcactgcggaggtcgaggtggtggagatgcatgagagcgacatctcagcttacacctatgagaagacgttggtgatggagcagcgttcccagatcctcaaacagatgcatttaaccaagaatgagcgggagcgggagatccagagtatcacagatgagtcacgaggctcaatccggagaaagaatccagccaacacgcggctccgcctgaacgtcccagaagagacggctggtgacagtgaagagaagccagaggaggaggtgcagctgatccacgatcagagtgctccccaactgccccagcagctccccgtccccaggggaggagcctgagggggaaggggagacagatccggagaaggtgcatctcacctggaccaaggacaagtcggtggcagagaagaataagggccccagtcctgtctcctctgagggcatcaaggacttcttcagcatgaagccggagtgggagaacttgaaccagtccaacgtgcggcgcatgcacacggccgtgcggctgaacgaggtcatcgtgaagaaatcccgggacgccaagcttgttttgctcaacatgcctgggcctccccgcaaccgcaatggtgatgaaaactacatggagtttctcgaggtcctcacagagcacctggaccgggtgatgctggtccgcggcggcggccgcgaggtcatcaccatctactcctgagaaccaggacctgccacccgggcccgagcgcgcccggcccgcggctccggagccctcgccgcgccccccgccgctgtcaccgtttacatacagaccctgtgcccgtgtcctggccccttaccccgctgcctgaagcccggagccacgcctgttggggctgattcggagagggcgccccgcgcgcagagaccagagctcctcagtgccagtttggcccctgggtcttcgctgccctttttctaagcccggcctcgtctcgccggaggagacgctgcaataaaggttgggagaaggcgcggaaaggagaggagctggggccttggggacccccaggtagtccatgcggcccattcctccccttcccactcccgccgcggtcctcgctctgcgctcctccggcgctgctccctggctcccggcggcccggaggcccgcggggtgggaaggccgcgcttgccgtctccgccgccccttctcgccgagccgtggggcgcgggcggccgagcctatacatagtgtacaggagacatcgcgtgtatttttaacgtccccatatttatgtgactagaagcgcaacagacttctcgccatagtcgagctctcccgctgggggcactgcggggaggcgaggcctcgggaagctgaattttccttgacgtccaagagtttgagagcgaaagtgctttaggcccaggcgggggtcgtggcctcgttccctcgacacctccgtcctgctctcgcctcttcgccctttccgcgcgcccttggcttcccaccctcctctccagtccttttccgagatgaggtgagacaagggtccaacttttcctggattcgcctcccagcggacgtgagcttccactgcggctgcagagacgcgagcaacctcttctcatcggctcttatgcaagttggggccaggataggggaggggtgctcctcaagaggaagaaaccgagaggcccgcgccccaccgaggaagccccgccccggtgccttcgctggggagcaggcgtctctcctcagtcggcttgtcgcctgctccccgtatcccatggctcctcgccaaagactgaaattgtggagctggagggcgccccctccccggagtttcctccctgggacaagtgagggaggagggggccgattctggtttaggggccggacccactgagaggccccagagccgcccgtgatgttcctcccccgtccccatctggcagctcctgtctcgcctgagggacccagccgccttctccgtgctctggggccgggcctcgctgcttagcagcggcctctagctccgtctcccggggacctgggcctgagggagggctggagtcgcacgcgctttgtccttagcgcctgtctgctctcctctaactaggacccagggcctttggcttccccagctcatccttggcccttccgctccaccagcctggtctgaggcgtgctctgtccttagagaaggcgcggtggccgggttcccttcccctagggcacattactaagggggtcaggcactgcatgctcgttccagcaccatctgggactgggtacagtacctccagccccagggccctgacctgcgcacctagcttgacatctcacgcacctcccagagctggcgccactgagtaatccggacctcaccacctcttttcctttgagcccaaggcagagctagagctggagctggcgccacccagacagcgtcaggtgtggctggggtaggtttggaggtctgccagttacgccaagtcccctctgagattcgatcaggggactggatagattctttcaggtactcaatcaggaagctggaggtgttagacaccagccccctgcatccttcagtagacctccctctgaacaccacagccaggtcctgccttctgggggcctgaatattccagagctgatgtgatgggctgtgcagaagggggctgtatcaacatcaattagggaaccaaagttgcactatctgggcccagattgtctggttggcaagagcaaagtttccgttgatgaaacagacatcccacaacaaaaacccaagttttctgtgctacatgtgcaatatttgttatgaatgttatcacaagtcattcatcaagttatctttataatcactgtagttagatgtttcatgtccattcaagtgacttttattctgagtgcaatatttcaatagccttgtagtgataactagtgttgcttttgttttagatgatctatgtgcagggcaatgcaatgaagttgaaaacccttgtaaataggagaggttgcaaaccaaatcaagagtatttattactattactgctattattattaggcctgcctttaattttcagtgtaagtgttcagtatgccgcatcctgcctcagtattgatcttgtgttctttgtgccaatatgaaaaggagagggttggttctttcctttattgttgaatgctcccatttaatgctttatggcttttactgtattacttttttagactcccgtctgcacaaaatgcaataaaaataattttattatacccttaaaaaaaaaa

SEQ ID NO: 734415 - DNA, 403 bp, Homo sapiens
agaacctctggagctcctacctgaccaagggcgtgattgtggagaggagtgggatgacctcggtgggcctggccgatggcactcctatcgacatggaccacccttatgtcttcagtgatatgacctcctacttcaccctgctggttggcatctacttcccctcagtcacagggatcatggctggttctaaccgctctggggacctgagggatgcccagaagtcaatccccactggcaccatcctggccatcgccaccacctctgctgtctgtatcctgcacagctgtgctgggaccaccctcgggggagggcaagagggagggcagctgaacttgctgccttacctgctggtgcaggaagggtggggagggggaggactgaaccgtggggattctcctttatc

SEQ ID NO: 734416 - DNA, 5857 bp, Homo sapiens
  misc_feature (5)..(6): n is a, c, g, or t
atgcnnaacaacctgacggactgcgaggacggcgatgggggagccaacccgggtgatggcaaccccaaggaaagcagtcccttcatcaacagcaccgacacagagaagggaaaggagtatgatggcaagaacatggccttgtttgaggaggagatggacaccagccctatggtgtcctccttgctcagtggcctggccaactacaccaacctgccccagggaagtagggagcatgaagaggcagaaaacaatgagggtggaaaaaagaagccggtgcaggccccacgcatgggcaccttcatgggcgtgtacctgccgtgcctgcagaacatctttggcgtcatcctcttcctgcggctcacctgggtggtgggcattgcaggcatcatggagtccttctgcatggtgttcatctgctgctcctgtacgatgctcacggccatctccatgagtgcaattgcaacgaatggtgttgtgcctgctggtggctcctactacatgatttccaggtctctgggcccagagtttgggggtgccgtgggcctctgcttctacctgggcactacctttgcaggagccatgtacatcctgggcaccatcgaaatcctgctggcttacctcttcccagccatggccatcttcaaggcagaagatgccagtggggaggcagcagccatgctgaacaacatgcgtgtttacggcacctgtgtgctcacctgcatggccactgtggtgtttgtgggtgtcaagtatgtcaacaagtttgcccttgtcttcctgggttgtgtcatcctctccatcctggccatctatgctggggtcatcaagtctgccttcgacccacccaacttcccgatctgcctcctgggtaaccgcacgctgtctcgccatggctttgatgtctgtgccaagctggcttgggaaggaaatgagacggtgaccacacggctatggggccttttctgctcctctcgcttcctcaacgccacctgtgatgaatacttcacccgaaacaatgtcacagagatccagggcatccctggtgctgccagtggcctcatcaaagagaacctctggagctcctacctgaccaagggcgtgattgtggagaggagtgggatgacctcggtgggcctggccgatggcactcctatcgacatggaccacccttatgtcttcagtgatatgacctcctacttcaccctgctggttggcatctacttcccctcagtcacagggatcatggctggttctaaccgctctggggacctgagggatgcccagaagtcaatccccactggcaccatcctggccatcgccaccacctctgctgtctacatcagctccgttgttctgtttggggcctgcattgagggggtcgtcctgcgggacaagtttggcgaagctgtgaatggcaacctcgtggtgggcactctggcctggccatctccatgggtaattgtcatcggatccttcttctccacctgtggggctgggctgcagagcctcacgggggccccacgcctgctgcaggccatctcgagggatggcattgtgcccttcctgcaggtctttggccatggcaaggccaatggagagccgacctgggccctgctcctgactgcctgcatctgcgagattggcatcctcattgcatccctcgacgaggtggcccccatcctctctatgttcttcctgatgtgctacatgtttgtgaatctggcctgtgcagtgcagacgctgctgaggacacccaactggaggccacgctttcgatattaccactggaccctctccttcctgggcatgagcctctgcctggccctcatgttcatctgctcctggtattatgcactggtagccatgctcattgctggactcatctacaagtacattgagtaccgtggggcagagaaggagtggggcgatgggatacgaggtctgtctctcagtgcggctcgctatgccctcttacgcctggaggaagggcccccacacaccaagaactggaggccacagctgctggtgctggtgcgtgtggaccaagaccagaatgtggtgcacccccagctgctctcactgacctcccagctgaaggcagggaagggcctgaccatcgtgggctctgtccttgagggcacctttctggaaaatcatccacaggcccagcgggcagaagagtctatcaggcgcctgatggaggcagagaaggtgaagggcttctgccaggtggtgatctcctccaacttgcgtgatggcgtgtcccatctgatccagtccgggggcctcggggggctgcagcacaacactgtgcttgttggctggccccgcaactggcgccagaaggaagatcatcagacgtggaggaacttcattgagctggtccgggaaaccacagctggccacttagccctgctggtcaccaagaacgtttccatgtttcctgggaaccctgagcgcttctctgagggcagcatcgacgtttggtggattgtgcacgatggaggcatgctcatgctgctgcccttcctgctgcggcaccacaaggtctggcggaagtgcaagatgcgtatcttcactgtggcccagatggatgacaatagcatccagatgaagaaggatctgaccacatttctgtatcatttacgcatcactgcggaggtcgaggtggtggagatgcatgagagcgacatctcagcttacacctatgagaagacgttggtgatggagcagcgttcccagatcctcaaacagatgcatttaaccaagaatgagcgggagcgggagatccagagtatcacagatgagtcacgaggctcaatccggagaaagaatccagccaacacgcggctccgcctgaacgtcccagaagagacggctggtgacagtgaagagaagccagaggaggaggtgcagctgatccacgatcagagtgctccccaactgccccagcagctccccgtccccaggggaggagcctgagggggaaggggagacagatccggagaaggtgcatctcacctggaccaaggacaagtcggtggcagagaagaataagggccccagtcctgtctcctctgagggcatcaaggacttcttcagcatgaagccggagtgggagaacttgaaccagtccaacgtgcggcgcatgcacacggccgtgcggctgaacgaggtcatcgtgaagaaatcccgggacgccaagcttgttttgctcaacatgcctgggcctccccgcaaccgcaatggtgatgaaaactacatggagtttctcgaggtcctcacagagcacctggaccgggtgatgctggtccgcggcggcggccgcgaggtcatcaccatctactcctgagaaccaggacctgccacccgggcccgagcgcgcccggcccgcggctccggagccctcgccgcgccccccgccgctgtcaccgtttacatacagaccctgtgcccgtgtcctggccccttaccccgctgcctgaagcccggagccacgcctgttggggctgattcggagagggcgccccgcgcgcagagaccagagctcctcagtgccagtttggcccctgggtcttcgctgccctttttctaagcccggcctcgtctcgccggaggagacgctgcaataaaggttgggagaaggcgcggaaaggagaggagctggggccttggggacccccaggtagtccatgcggcccattcctccccttcccactcccgccgcggtcctcgctctgcgctcctccggcgctgctccctggctcccggcggcccggaggcccgcggggtgggaaggccgcgcttgccgtctccgccgccccttctcgccgagccgtggggcgcgggcggccgagcctatacatagtgtacaggagacatcgcgtgtatttttaacgtccccatatttatgtgactagaagcgcaacagacttctcgccatagtcgagctctcccgctgggggcactgcggggaggcgaggcctcgggaagctgaattttccttgacgtccaagagtttgagagcgaaagtgctttaggcccaggcgggggtcgtggcctcgttccctcgacacctccgtcctgctctcgcctcttcgccctttccgcgcgcccttggcttcccaccctcctctccagtccttttccgagatgaggtgagacaagggtccaacttttcctggattcgcctcccagcggacgtgagcttccactgcggctgcagagacgcgagcaacctcttctcatcggctcttatgcaagttggggccaggataggggaggggtgctcctcaagaggaagaaaccgagaggcccgcgccccaccgaggaagccccgccccggtgccttcgctggggagcaggcgtctctcctcagtcggcttgtcgcctgctccccgtatcccatggctcctcgccaaagactgaaattgtggagctggagggcgccccctccccggagtttcctccctgggacaagtgagggaggagggggccgattctggtttaggggccggacccactgagaggccccagagccgcccgtgatgttcctcccccgtccccatctggcagctcctgtctcgcctgagggacccagccgccttctccgtgctctggggccgggcctcgctgcttagcagcggcctctagctccgtctcccggggacctgggcctgagggagggctggagtcgcacgcgctttgtccttagcgcctgtctgctctcctctaactaggacccagggcctttggcttccccagctcatccttggcccttccgctccaccagcctggtctgaggcgtgctctgtccttagagaaggcgcggtggccgggttcccttcccctagggcacattactaagggggtcaggcactgcatgctcgttccagcaccatctgggactgggtacagtacctccagccccagggccctgacctgcgcacctagcttgacatctcacgcacctcccagagctggcgccactgagtaatccggacctcaccacctcttttcctttgagcccaaggcagagctagagctggagctggcgccacccagacagcgtcaggtgtggctggggtaggtttggaggtctgccagttacgccaagtcccctctgagattcgatcaggggactggatagattctttcaggtactcaatcaggaagctggaggtgttagacaccagccccctgcatccttcagtagacctccctctgaacaccacagccaggtcctgccttctgggggcctgaatattccagagctgatgtgatgggctgtgcagaagggggctgtatcaacatcaattagggaaccaaagttgcactatctgggcccagattgtctggttggcaagagcaaagtttccgttgatgaaacagacatcccacaacaaaaacccaagttttctgtgctacatgtgcaatatttgttatgaatgttatcacaagtcattcatcaagttatctttataatcactgtagttagatgtttcatgtccattcaagtgacttttattctgagtgcaatatttcaatagccttgtagtgataactagtgttgcttttgttttagatgatctatgtgcagggcaatgcaatgaagttgaaaacccttgtaaataggagaggttgcaaaccaaatcaagagtatttattactattactgctattattattaggcctgcctttaattttcagtgtaagtgttcagtatgccgcatcctgcctcagtattgatcttgtgttctttgtgccaatatgtatggcttttactgtattacttttttagactcccgtctgcacaaaatgcaataaaaataattttattatacccttaaaaaaaaaa

SEQ ID NO: 734417 - DNA, 4721 bp, Homo sapiens
ggcctggttttcagtatcaggaaattagagaattattttatcaaggaaaaaacaatggaacatttggggctctgctcccctgtcacccttacagaacttagtcctgtggcaggcacacagttggttctgtagttggtatggagacctgccctggaaatccaggcagcactgctcacctggcatctcctgtccacatcattccaggtttggcgaagctgtgaatggcaacctcgtggtgggcactctggcctggccatctccatgggtaattgtcatcggatccttcttctccacctgtggggctgggctgcagagcctcacgggggccccacgcctgctgcaggccatctcgagggatggcattgtgcccttcctgcaggtctttggccatggcaaggccaatggagagccgacctgggccctgctcctgactgcctgcatctgcgagattggcatcctcattgcatccctcgacgaggtggcccccatcctctctatgttcttcctgatgtgctacatgtttgtgaatctggcctgtgcagtgcagacgctgctgaggacacccaactggaggccacgctttcgatattaccactggaccctctccttcctgggcatgagcctctgcctggccctcatgttcatctgctcctggtattatgcactggtagccatgctcattgctggactcatctacaagtacattgagtaccgtggggcagagaaggagtggggcgatgggatacgaggtctgtctctcagtgcggctcgctatgccctcttacgcctggaggaagggcccccacacaccaagaactggaggccacagctgctggtgctggtgcgtgtggaccaagaccagaatgtggtgcacccccagctgctctcactgacctcccagctgaaggcagggaagggcctgaccatcgtgggctctgtccttgagggcacctttctggaaaatcatccacaggcccagcgggcagaagagtctatcaggcgcctgatggaggcagagaaggtgaagggcttctgccaggtggtgatctcctccaacttgcgtgatggcgtgtcccatctgatccagtccgggggcctcggggggctgcagcacaacactgtgcttgttggctggccccgcaactggcgccagaaggaagatcatcagacgtggaggaacttcattgagctggtccgggaaaccacagctggccacttagccctgctggtcaccaagaacgtttccatgtttcctgggaaccctgagcgcttctctgagggcagcatcgacgtttggtggattgtgcacgatggaggcatgctcatgctgctgcccttcctgctgcggcaccacaaggtctggcggaagtgcaagatgcgtatcttcactgtggcccagatggatgacaatagcatccagatgaagaaggatctgaccacatttctgtatcatttacgcatcactgcggaggtcgaggtggtggagatgcatgagagcgacatctcagcttacacctatgagaagacgttggtgatggagcagcgttcccagatcctcaaacagatgcatttaaccaagaatgagcgggagcgggagatccagagtatcacagatgagtcacgaggctcaatccggagaaagaatccagccaacacgcggctccgcctgaacgtcccagaagagacggctggtgacagtgaagagaagccagaggaggaggtgcagctgatccacgatcagagtgctccccaactgccccagcagctccccgtccccaggggaggagcctgagggggaaggggagacagatccggagaaggtgcatctcacctggaccaaggacaagtcggtggcagagaagaataagggccccagtcctgtctcctctgagggcatcaaggacttcttcagcatgaagccggagtgggagaacttgaaccagtccaacgtgcggcgcatgcacacggccgtgcggctgaacgaggtcatcgtgaagaaatcccgggacgccaagcttgttttgctcaacatgcctgggcctccccgcaaccgcaatggtgatgaaaactacatggagtttctcgaggtcctcacagagcacctggaccgggtgatgctggtccgcggcggcggccgcgaggtcatcaccatctactcctgagaaccaggacctgccacccgggcccgagcgcgcccggcccgcggctccggagccctcgccgcgccccccgccgctgtcaccgtttacatacagaccctgtgcccgtgtcctggccccttaccccgctgcctgaagcccggagccacgcctgttggggctgattcggagagggcgccccgcgcgcagagaccagagctcctcagtgccagtttggcccctgggtcttcgctgccctttttctaagcccggcctcgtctcgccggaggagacgctgcaataaaggttgggagaaggcgcggaaaggagaggagctggggccttggggacccccaggtagtccatgcggcccattcctccccttcccactcccgccgcggtcctcgctctgcgctcctccggcgctgctccctggctcccggcggcccggaggcccgcggggtgggaaggccgcgcttgccgtctccgccgccccttctcgccgagccgtggggcgcgggcggccgagcctatacatagtgtacaggagacatcgcgtgtatttttaacgtccccatatttatgtgactagaagcgcaacagacttctcgccatagtcgagctctcccgctgggggcactgcggggaggcgaggcctcgggaagctgaattttccttgacgtccaagagtttgagagcgaaagtgctttaggcccaggcgggggtcgtggcctcgttccctcgacacctccgtcctgctctcgcctcttcgccctttccgcgcgcccttggcttcccaccctcctctccagtccttttccgagatgaggtgagacaagggtccaacttttcctggattcgcctcccagcggacgtgagcttccactgcggctgcagagacgcgagcaacctcttctcatcggctcttatgcaagttggggccaggataggggaggggtgctcctcaagaggaagaaaccgagaggcccgcgccccaccgaggaagccccgccccggtgccttcgctggggagcaggcgtctctcctcagtcggcttgtcgcctgctccccgtatcccatggctcctcgccaaagactgaaattgtggagctggagggcgccccctccccggagtttcctccctgggacaagtgagggaggagggggccgattctggtttaggggccggacccactgagaggccccagagccgcccgtgatgttcctcccccgtccccatctggcagctcctgtctcgcctgagggacccagccgccttctccgtgctctggggccgggcctcgctgcttagcagcggcctctagctccgtctcccggggacctgggcctgagggagggctggagtcgcacgcgctttgtccttagcgcctgtctgctctcctctaactaggacccagggcctttggcttccccagctcatccttggcccttccgctccaccagcctggtctgaggcgtgctctgtccttagagaaggcgcggtggccgggttcccttcccctagggcacattactaagggggtcaggcactgcatgctcgttccagcaccatctgggactgggtacagtacctccagccccagggccctgacctgcgcacctagcttgacatctcacgcacctcccagagctggcgccactgagtaatccggacctcaccacctcttttcctttgagcccaaggcagagctagagctggagctggcgccacccagacagcgtcaggtgtggctggggtaggtttggaggtctgccagttacgccaagtcccctctgagattcgatcaggggactggatagattctttcaggtactcaatcaggaagctggaggtgttagacaccagccccctgcatccttcagtagacctccctctgaacaccacagccaggtcctgccttctgggggcctgaatattccagagctgatgtgatgggctgtgcagaagggggctgtatcaacatcaattagggaaccaaagttgcactatctgggcccagattgtctggttggcaagagcaaagtttccgttgatgaaacagacatcccacaacaaaaacccaagttttctgtgctacatgtgcaatatttgttatgaatgttatcacaagtcattcatcaagttatctttataatcactgtagttagatgtttcatgtccattcaagtgacttttattctgagtgcaatatttcaatagccttgtagtgataactagtgttgcttttgttttagatgatctatgtgcagggcaatgcaatgaagttgaaaacccttgtaaataggagaggttgcaaaccaaatcaagagtatttattactattactgctattattattaggcctgcctttaattttcagtgtaagtgttcagtatgccgcatcctgcctcagtattgatcttgtgttctttgtgccaatatgaaaaggagagggttggttctttcctttattgttgaatgctcccatttaatgctttatggcttttactgtattacttttttagactcccgtctgcacaaaatgcaataaaaataattttattatacccttaaaaaaaaaa

SEQ ID NO: 734418 - DNA, 4667 bp, Homo sapiens
ggcctggttttcagtatcaggaaattagagaattattttatcaaggaaaaaacaatggaacatttggggctctgctcccctgtcacccttacagaacttagtcctgtggcaggcacacagttggttctgtagttggtatggagacctgccctggaaatccaggcagcactgctcacctggcatctcctgtccacatcattccaggtttggcgaagctgtgaatggcaacctcgtggtgggcactctggcctggccatctccatgggtaattgtcatcggatccttcttctccacctgtggggctgggctgcagagcctcacgggggccccacgcctgctgcaggccatctcgagggatggcattgtgcccttcctgcaggtctttggccatggcaaggccaatggagagccgacctgggccctgctcctgactgcctgcatctgcgagattggcatcctcattgcatccctcgacgaggtggcccccatcctctctatgttcttcctgatgtgctacatgtttgtgaatctggcctgtgcagtgcagacgctgctgaggacacccaactggaggccacgctttcgatattaccactggaccctctccttcctgggcatgagcctctgcctggccctcatgttcatctgctcctggtattatgcactggtagccatgctcattgctggactcatctacaagtacattgagtaccgtggggcagagaaggagtggggcgatgggatacgaggtctgtctctcagtgcggctcgctatgccctcttacgcctggaggaagggcccccacacaccaagaactggaggccacagctgctggtgctggtgcgtgtggaccaagaccagaatgtggtgcacccccagctgctctcactgacctcccagctgaaggcagggaagggcctgaccatcgtgggctctgtccttgagggcacctttctggaaaatcatccacaggcccagcgggcagaagagtctatcaggcgcctgatggaggcagagaaggtgaagggcttctgccaggtggtgatctcctccaacttgcgtgatggcgtgtcccatctgatccagtccgggggcctcggggggctgcagcacaacactgtgcttgttggctggccccgcaactggcgccagaaggaagatcatcagacgtggaggaacttcattgagctggtccgggaaaccacagctggccacttagccctgctggtcaccaagaacgtttccatgtttcctgggaaccctgagcgcttctctgagggcagcatcgacgtttggtggattgtgcacgatggaggcatgctcatgctgctgcccttcctgctgcggcaccacaaggtctggcggaagtgcaagatgcgtatcttcactgtggcccagatggatgacaatagcatccagatgaagaaggatctgaccacatttctgtatcatttacgcatcactgcggaggtcgaggtggtggagatgcatgagagcgacatctcagcttacacctatgagaagacgttggtgatggagcagcgttcccagatcctcaaacagatgcatttaaccaagaatgagcgggagcgggagatccagagtatcacagatgagtcacgaggctcaatccggagaaagaatccagccaacacgcggctccgcctgaacgtcccagaagagacggctggtgacagtgaagagaagccagaggaggaggtgcagctgatccacgatcagagtgctccccaactgccccagcagctccccgtccccaggggaggagcctgagggggaaggggagacagatccggagaaggtgcatctcacctggaccaaggacaagtcggtggcagagaagaataagggccccagtcctgtctcctctgagggcatcaaggacttcttcagcatgaagccggagtgggagaacttgaaccagtccaacgtgcggcgcatgcacacggccgtgcggctgaacgaggtcatcgtgaagaaatcccgggacgccaagcttgttttgctcaacatgcctgggcctccccgcaaccgcaatggtgatgaaaactacatggagtttctcgaggtcctcacagagcacctggaccgggtgatgctggtccgcggcggcggccgcgaggtcatcaccatctactcctgagaaccaggacctgccacccgggcccgagcgcgcccggcccgcggctccggagccctcgccgcgccccccgccgctgtcaccgtttacatacagaccctgtgcccgtgtcctggccccttaccccgctgcctgaagcccggagccacgcctgttggggctgattcggagagggcgccccgcgcgcagagaccagagctcctcagtgccagtttggcccctgggtcttcgctgccctttttctaagcccggcctcgtctcgccggaggagacgctgcaataaaggttgggagaaggcgcggaaaggagaggagctggggccttggggacccccaggtagtccatgcggcccattcctccccttcccactcccgccgcggtcctcgctctgcgctcctccggcgctgctccctggctcccggcggcccggaggcccgcggggtgggaaggccgcgcttgccgtctccgccgccccttctcgccgagccgtggggcgcgggcggccgagcctatacatagtgtacaggagacatcgcgtgtatttttaacgtccccatatttatgtgactagaagcgcaacagacttctcgccatagtcgagctctcccgctgggggcactgcggggaggcgaggcctcgggaagctgaattttccttgacgtccaagagtttgagagcgaaagtgctttaggcccaggcgggggtcgtggcctcgttccctcgacacctccgtcctgctctcgcctcttcgccctttccgcgcgcccttggcttcccaccctcctctccagtccttttccgagatgaggtgagacaagggtccaacttttcctggattcgcctcccagcggacgtgagcttccactgcggctgcagagacgcgagcaacctcttctcatcggctcttatgcaagttggggccaggataggggaggggtgctcctcaagaggaagaaaccgagaggcccgcgccccaccgaggaagccccgccccggtgccttcgctggggagcaggcgtctctcctcagtcggcttgtcgcctgctccccgtatcccatggctcctcgccaaagactgaaattgtggagctggagggcgccccctccccggagtttcctccctgggacaagtgagggaggagggggccgattctggtttaggggccggacccactgagaggccccagagccgcccgtgatgttcctcccccgtccccatctggcagctcctgtctcgcctgagggacccagccgccttctccgtgctctggggccgggcctcgctgcttagcagcggcctctagctccgtctcccggggacctgggcctgagggagggctggagtcgcacgcgctttgtccttagcgcctgtctgctctcctctaactaggacccagggcctttggcttccccagctcatccttggcccttccgctccaccagcctggtctgaggcgtgctctgtccttagagaaggcgcggtggccgggttcccttcccctagggcacattactaagggggtcaggcactgcatgctcgttccagcaccatctgggactgggtacagtacctccagccccagggccctgacctgcgcacctagcttgacatctcacgcacctcccagagctggcgccactgagtaatccggacctcaccacctcttttcctttgagcccaaggcagagctagagctggagctggcgccacccagacagcgtcaggtgtggctggggtaggtttggaggtctgccagttacgccaagtcccctctgagattcgatcaggggactggatagattctttcaggtactcaatcaggaagctggaggtgttagacaccagccccctgcatccttcagtagacctccctctgaacaccacagccaggtcctgccttctgggggcctgaatattccagagctgatgtgatgggctgtgcagaagggggctgtatcaacatcaattagggaaccaaagttgcactatctgggcccagattgtctggttggcaagagcaaagtttccgttgatgaaacagacatcccacaacaaaaacccaagttttctgtgctacatgtgcaatatttgttatgaatgttatcacaagtcattcatcaagttatctttataatcactgtagttagatgtttcatgtccattcaagtgacttttattctgagtgcaatatttcaatagccttgtagtgataactagtgttgcttttgttttagatgatctatgtgcagggcaatgcaatgaagttgaaaacccttgtaaataggagaggttgcaaaccaaatcaagagtatttattactattactgctattattattaggcctgcctttaattttcagtgtaagtgttcagtatgccgcatcctgcctcagtattgatcttgtgttctttgtgccaatatgtatggcttttactgtattacttttttagactcccgtctgcacaaaatgcaataaaaataattttattatacccttaaaaaaaaaa

SEQ ID NO: 734419 - DNA, 336 bp, Homo sapiens; identical to SEQ ID NO: 13756

SEQ ID NO: 734420 - DNA, 2490 bp, Homo sapiens
caaaatttcttagtgttgatgttgatagcttctgggttggcaaactggcagttcactctagtcttactgggttgggcaagtccttgcccctagaaaattggggatagctttggccatgggaggagcaagaacactacgcagtcgtaagctctgttttttgttttgttttgttttgttttgttttcggcaccattatgtacgatgaagacttacagccacagcataggggacactttgaggagccctagtatcattgtttgaaatcattgtacagggaactgcaggggtgaacaccattgtaccaatccccgggccagtgtctcatttcctaacagaatcatcccattcttgttcactcttcagtcatcccaagccaaaagggaaaattcgaaacccactgtgacaccccaaccctaatttccaacctttggaggactcacctggggcagaagggagaaagggctttgctgaagtctcaggctgccgagagccatgtatgggcataggagcaagctgatggcatggctcttgacaaggttttctatagggcagcagctgctgctcccaggggaaccctctcctgttgcctccgcagtctattctggggtggaaacaccattctctattatttctctcacatacatgtggatttctaatatcaagttatgtgactgcctaccacttaaggcctacaaaaccacatgggagtttctttattgcgtatgcagccagtcaacatgaatgggaccctagaaactgtgaggagcaggattctctaaggtgctcttagatacggtgtcacttccacatacaagcacaattctcccagttaaggggctggaagacaagcggggcaactggttttgaaaagcccgctggcgtgccagagggggtgtttgcccacaccctccttgaatttaactgccacaatctatccgcagatgtgttttgttctatttcttgtttttcactagcgtttgcgttgcttcctctgaagccagagggtgaaaggccctagcaaagttagttatcagtcaactgatgataactgtgatccttaaagatgaattcccagcctgaggtgacacacagaggttcagcagacgtctcaggatctgtcatatgtcatgttgcttggtgtgaagatggaagaacaaagtccacatcagtttctgctccttcaaacagtgtgtcgatatgaaacattgagatttggcagaaacatgtgcctagtttgcagcaccaaatactggtcttctcagaagtgtttctgtttttttgtttttgtttttgtttttgttttgttttgttttgtttaatttcctcttctggcatcccaatttggatcatttcctctctttctttcctggagaaacaggatggcaggtgctggagcccagagagggggttaccctccagctaaaatgatttaaatggaaaggagaatgacagcaaagcctcacgtgaactttaatgaccttatcaatgacctttactaactgactctttggtacccggattgttgagaggtgagtgggactaaaagccaggatcaagatcaggttgctccacacatttgcagatcaggaaccccgggaatatgagttagacccagaaagtattgaactggacattgaatgaagcttgaggccatgcattgataacatttttagagtctgttacattattttctcaaaaggaacacatgtttactacaaaccatttagaaaataccaataaccaaacagaagggaaatgtctggaaccttccagttgtttaattctgtagaaactgttcacgaaaggctgaatgagtggggacaagtcacagagatctcgccatggttagcaccagggacaagtctggctctaatgtatgttttatgaagtctgattagctttgaaatgcatctttgccagctgaacttgtcatgcactaaacttcccattgatcattagagtgtctacgattaagtggaaaaggtggtcaaccatttggatgtttgactttcacaacatcaagcattggccattgggcgtatctgggcattggtatggaataaacaggatactcagtgaaacatccaaactattgactggatttttcccatggggcatctgtctaagagtcacagatctgagaaatagaaggaccaggtccgtgtggatgctcctagtgcgttcaaataacccttgaattcacccaggtctcattgcatttatttaaagatggagcccattgtcccccctcctcctcagctcacccatggaactagaaattcacaaacctgaagctgaaccacaggacaagaaattaaacagcaacggccacatggcctcttttttcacaggttttgcattgaatgttttagaactttattcccccgccccctcacccatgtataccaaaactggttttattttcattttcctaaattattttctgatacaataaactgttaactgtttatttatacttttaaaaaaaaa

SEQ ID NO: 734421 - DNA, 411 bp, Homo sapiens; identical to SEQ ID NO: 728869

SEQ ID NO: 734422 - DNA, 1892 bp, Homo sapiens; identical to SEQ ID NO: 15788

SEQ ID NO: 734423 - DNA, 1664 bp, Homo sapiens
atcacattgaatggttaatttatttttaattctatgaaaggagctggagagagagaagtaaaatattcaggggattttctgtgttttaaaagagaaaacctcctgattgcaagctctaaaataaatgctaagatttgtcacactttcagcccacgggagatttgcttttctcgcatagtatggactcaccaggatctgaaattaggggctttccttagaggtggcctcaggctttcctacccccacagttggattatgcagagaaggtcactgggtcctgaggctgctgccgagcgtgctgtcccgggtggacagcgtgccctgtcatctttcattaggatgtgtgtgcctgtgccgcaccagccacaggtcaggatgccagcccctgcacgccctgcgtgctcatttgaaaactgagggtatctgggaagtcaccttacaaggtgccgaggagcagatggctaatttaaaggcaatctgtatgtgctctgagcctcccaaattatccatttcttgaatcctcaatgtgtgaaattcagcacactaagtcctcacaggctaggaaatcaaatgctggacaggccattccctaccatcatctggagtattcagagtatttggaatattcacagtcttcaaggtgtagctgtcgggctctgtgaaggataccttgcatttatagggatcgtcaggtctcctcttcctacgtatttgaagtattatggcttggagtactttctccaccaatgaagaaaagtttatatggcctctcctacgctcttgtcttgtcccaaaagtagggcttaactctgtccttgccatcaatctgtgcacatgttatggagtgaccatggtgaatgggcgatagaggttccttcctaggagaaactttcccagcttccccaaatgtgagaggggcgcctctctcccgaattccccagagccctttcctcccttccctctgccctcacctccctggatgcttcaggatactctgtggatactcttccgtgctccaggagagcatggccccgtggctgatagactcagctctcacccctctaagagctgctcatgagtatcctcgagtggatgagtgaacagatttctaactcaacagacataaatccccagtggagcttaagttaaatgcctggtttttaaattaagaaatatgacttcagcaatatgtataaaccaaaggaacattaaactaatgatagtatctttacaaatgagttgttgaggatttggagatagtttgtataacataaaacataacaaatacagtagaaagcatatggtagtgggattgaagaaacccgagaggttatttatcccaaacaccacctgatgttacagtgcttattgagtgattgatactgtgtcctacgtagagggggcacataaacaattcacatgtaatttttctgtattacattgacagatatatataaaatgatctctgcatctaaaattcaagcagtccagcctggaatactatcaccaaaaagtgaaaactgattttagaaacgaataatattttgttgtgaacaactctgaaaacatactggtcgatgaggtttatagctagagtctaaaatgccacatttatatgggtgaaacattttcagcttcaggagaaaataaaaccaaaaaaaaaa

SEQ ID NO: 734424 - DNA, 3524 bp, Homo sapiens
ggcaacgtgttctcgcagaccaccatctgccgcttcgaggccctgcagctgagcttcaagaacatgtgcaagctcaagccgctgctgaacaagtggctggaggaggcggactcaagcaccggcagccccacaagcatcgacaagatcgcggcgcagggccgcaagcgcaagaagcggacctctatcgaggtgagcgtcaagggcgcgctggagagccacttcctcaagtgccccaagccctccgcgcaggagatcaccaacctggccgacagcctgcagctcgagaaggaggtggtgcgggtctggttctgcaatcggcgccaaaaggagaagcgcatgacgccgcccgggatccaacagcagacgcccgacgacgtctactcgcaggtgggcaccgtgagcgccgacacgccgccgcctcaccacgggctgcagacgagcagggccgccgccgccgccgcctccgcagccgccgtcagcaccgccgccgcccctgccgccgccgccgccgccgccgccgccgctgccgccgccgcgccgaccctgcacctgggccgctccgggctccagcccaggcccatccgccgccctcccctccacccagagacaggcatgcccgcccttggaggagaaaacgcgggagaaacggaccaaggaggcatttttgcactgcctaaagagatccacggaaactttatttcctgggagcgacctgagagaaaacagaggcaccaggttccatcaggggacgacacccgaggccgccgagccaggcccggccgcgtacccaggctttgacggctgccattcagggtggacgatgcctaaagattccaccgctaatattttttttattaatattttttattttttatttctggactgactcagataaaggaatttagaaagactgagcaccagccgctgcacttctctggacttctctcctcaatccgttgccaactttgattgaatgggtgctgtggatgtgattatataatactgccatttccaagcagtgtttttggtaggttttaataaacagacttttcaaaagacggcaatatagaattgttagatccgttgttgatctaaaaatatttgctttatattttcattaaatgacttcttttaatattttattcagaatacttatgaactgctgcaaaacggtaatttatttttccccagatcttgtattacgtgtttttttcagacgagcacaaatcaaaatgaaatgaaaatatggacagttgttaggtaataagggtatcttttgatgtgatcatttgattgtaatttaatttgagtagtgattccgtaagagctgatcgagaaaataaatttgttagaatgaaatagtctgtgtctgatgcgtaaacactgtgtgggaagaaaagagttctttaagaaatatttttttactaatgaaaatccctaagtaatagcgttgaggaagtagagcctgctccacttaaggtacttttggaaatctagagtaaagcataggcattgctgagacagctagtattttaacatagtagtcactcctcgataatccataaattcacaatatttttctctcccttaattttagtggatgtctttagtgttttcaggtgagattgcctaaatattaacccttttcttggcgatacctgtgtttcttatcgaaagattgaacgatatcaccagtaaaaatgagccaactggctattaatggttaatacagcccctccccccaagttcagcttcttttttcttctcctgtccccctcccaacatgttcctgtctcttttctctttttctcaagactatagttgttaggagtcgcttataagtcttataaaatattttgatatcaattacttcccatcaataactatatgtaattaaatttaaattattaagctttttgggttttttccccccgtaataaaagaatatagttctaaaatcctgattatggtccacactgcataccatctgtgcaattaccaactcagacttaaggttctatatttctgtgtttttgtctctccccagtatgattctatatcttctttactggtgctgggggttttaggtcaccttttacataaaccctgcagagtggtcacattgatcaagttaatgtttcaatatttacaatgtgggaaaatgaaagtgtaatgcctcaggttgtgagtacttaagacgctaaaggctcggcttagttgagtccctatatattgtacttaaaagtatttagcagtggtagagcaacgattttatagacaaattccccccaatctcacttagctgtcactcactttttttcctccttctctcatcttcactccctctccctgtgatatcaatgcaggggttaaaaaacccggaaaactgtgagagcaacaaggcacagttatttctcccagacaggccctgtgtcactttcataaatcaaacccagccagatggccatgtattgggttgcattattttaaacaccaaatcgtactaaaaatcacaatcattttgatttgtgaaatctgaaaaaggccacatatattaaacagagagaagaaaaaaatgaagacaagaaaccacaatttacttttctttgccttcttgttccctatttctcttgctgctgtaatccctatgcccagcaaatttacaacctggagtgggggtgggggagaagttcaccattttgggggtgtctagagaggcaagcaaagaagtcctcattggaaagctgaggactggtcaggttgtttttatgtggtggatactactggcacgtgagatggaatcttgtttttcctatgggaatggtggtggttgattagacaagtaataggtctattaaaaaaatttcaggaggtatctacttagttgatttagctgacaacaaaagagctaacattagatttcacactgttttctattaaaaagcaaactttgctgattactttggaagaatccctgatttgggggtagcagagtaacttttaattggagaagctgggaaagcaaacccattttgtttcattatttgcattttataaagtgagctaatgcttgcactccattttttttaatcaaccctttcaatgtaattacaaaatgaaattcatggttgaaaaacaaaagagggcagatataactgagaggttttgtgctaaggcttatattgttacacatgtaaataatgaaaatattgttatatatcaccagatctttttaatgaatttggtcattgtgttcctttgcagtgcaagtgtcttgtgcttcgtaaagtgcccatttgtttcctccatttcaatccaaccccccctccccttccaacccaaaggaaagtgacaaagttctgttccatcagccttgctaatcccaagctaggcccacttacagtttacagtctcctgtggctcttgatcagttgtccaagcctccgtcgctcccacaaccatcttcccctggcaagtctgtgcgataaatcattcaaggtgtattgaaaatagtcactttgcta

SEQ ID NO: 734425 - DNA, 518 bp, Homo sapiens
ttccacttcctattcctattccctattttctattccctattcctatgcgaaattcctgctgaggtaagtaaccaaaaactgtaagaatgattaacaaaaaacgaaaacctaaaatgtgttgatgccttagcattatggaaatgatgtaaacacctttgaaaaggagtgaagaagcctattggcttcactaaagatatacacaggcactaaactagaggggtgccttaccagaggtatcaggcttagtaacattctaggaatatttgaaggaatactgttatatatttaaagtataatattatatagaacaagtgtataaaaaactgtcccaaatactaacagagtataggtagagaaaaataaaggccagtgtcttctcagtatcatgttagtattatttcagacctcattaaagaataatatttaacgtgaagaacatgagtaataaatcaatatgaagaataaattctaaaattttaaacaatgaataatgacaatactttatttaaaaaaaaaaa

SEQ ID NO: 734426 - DNA, 503 bp, Homo sapiens; identical to SEQ ID NO: 23519

SEQ ID NO: 734427 - DNA, 4350 bp, Homo sapiens
gtgctcggggcttcactcccgcgcgtgaggcgagcgggcaagttggctgagggcgtgcggcagaggctgcttccctcggcgacgcgacccctcagcaactcaagctatgaactgaagctccctagggacggagaccggagcggagcggcggaggcagcagcagcagcagcagcagcagcagcagcagcagccgccgccgccgccgccttagcgggaactgagcagacccggcgcggagccacgactcctgcacgtttacctccctgtcgccgttcctgccggcggttggctaaaagacgttacagccgcgagacccgacacacaaaagccgctttctccgcgccgcccgcccagggaggctgcggccagcaagggaccccacctgagagcagctcgggctgctgagttcgttttgtgtctgagctctgcgctctgcacggaaccgaccccgtacccatggctctgataatggaaccggtgagcaaatggtctccgagtcaagtagtggactggatgaaaggtcttgatgactgtttgcagcagtatattaagaactttgagagggagaagatcagtggggaccagctgctgcgcattacacatcaggagctagaagatctgggggtcagccgcattggccatcaggaactgatcttggaagcagttgaccttctgtgtgcattgaattatggcttggaaacagaaaatctaaaaaccctttctcacaagttgaatgcatctgccaaaaatctgcagaattttataacaggaaggagaaggagtggccattatgatgggaggaccagccgaaaattgccaaacgactttctgacctcagttgtggatctgattggagcagccaagagtctgcttgcctggttggacaggtcaccatttgctgctgtgacagactattcagttacaagaaataatgtcatacaactctgcctggagttaacaacaattgtgcaacaggattgtactgtatatgaaacagagaataaaattcttcacgtgtgtaaaactctttctggagtctgtgaccacatcatatccctgtcgtcagatcctctggtttcacagtctgctcacctggaagtgattcagctggcaaacattaaaccaagcgaagggctgggtatgtatattaaatctacatatgatggcctccatgtaattactggaaccacagaaaattcacctgcagatcggtgcaagaaaatccatgctggcgatgaagtgattcaagttaatcatcagactgtggtggggtggcagttgaaaaatttggtgaatgcactacgagaggacccgagtggtgttatcttaactttgaaaaagcgacctcagagcatgcttacctcagcaccagctttactgaaaaatatgagatggaagccccttgctctgcagcctcttatacctagaagtcccacaagcagcgttgccacgccttccagcaccatcagtacacccaccaaaagagacagttctgccctccaggatctctacattccccctcctcctgcagaaccatatattcccagggatgaaaaaggaaaccttccttgtgaagacctcagaggacatatggtgggcaagccagtgcataagggatctgaatcaccaaattcatttctggatcaggaatatcgaaagagatttaatattgtcgaagaagatactgtcttatattgctatgaatatgaaaaaggaagatcaagtagtcaaggaagacgagaaagcaccccaacttatggcaagctacgacctatatctatgccagtggaatataattgggtgggggactatgaagatccaaataagatgaagagagatagtagaagagaaaactctctacttcggtatatgagcaatgaaaagattgctcaagaagaatacatgtttcagagaaacagcaaaaaggacacagggaagaagtcaaaaaagaagggtgataagagtaatagcccaactcactattcattgctacctagtttacaaatggatgcactgagacaagacatcatgggcactcctgtgccagagaccacactataccatacatttcagcagtcctcactgcagcacaaatcaaagaagaaaaacaaaggtcctatagcaggcaagagcaaaagacgaatttcttgcaaagatcttggccgtggtgactgtgagggctggctttggaaaaagaaagatgcgaagagttacttttcacagaaatggaaaaaatattggtttgtcctaaaggatgcatccctttattggtatattaatgaggaggatgaaaaagcagaaggattcattagcctgcctgaatttaaaattgatagagccagtgaatgccgcaaaaaatatgcattcaaagcctgtcatcctaaaatcaaaagcttttattttgctgctgaacatcttgatgatatgaacaggtggcttaacagaattaatatgctgactgcaggatatgcagaaagagagaggattaagcaggaacaagattactggagtgagagtgacaaggaagaagcagatactccatcaacaccaaaacaagatagccctccacccccatatgatacatacccacgacctccctcgatgagttgcgccagtccttatgtggaagcaaaacatagccgactttcctccacggagacttctcagtctcagtcttctcatgaggagtttcgccaggaagtaactgggagcagtgcagtgtctcccattcgcaagacagccagtcagcgccgctcctggcaggatttaattgagacgccactgacaagttcaggcttacactatcttcagactctgcccctggaggattctgtcttctctgactccgcggccatctccccagagcacaggcggcagtctaccctgccaactcagaaatgccacctgcaggatcactatgggccataccccttagctgagagtgagaggatgcaagtgctaaatggaaatgggggcaagcctcgaagttttactctgcctcgagatagcgggttcaaccattgctgtctgaatgctccagttagtgcctgtgacccacaggatgacgtgcaacccccagaggtggaggaagaggaggaggaggaggaggaggaaggggaggcagcaggggaaaacataggagaaaaaagctaatacactgcgagagttggtagaacctctccatgccaaatcggatccacttctgttggcactcaacccattggactcacagattgataagctaatgtttagagaatttagatcggagagagtcggtacggcgcagactcaacatcaacctcttgcaagcaactaaaatggcctcgtccttgctgtttataacagaaaacagacttgtaaaaagcttagatcatcaagtgttttggattgggggcctcccaaagggatataagaggggcaggccactcttaagaagaatgcgagctttctacattgggactagcataagatcaaagccaatcaagatggagcacagtaacagaaaactgcggtttctgtgggagaacagaaggggaaagggtcttaactgggaaagggctctgtgtggtaacacctcagttgtgttctcctgacaccaggaaaagagagggatcagcttcaataactagaaaattctggctgtttaatggactctttggtggcctctttaaggcaaagcagagaaagcaaattatgtattaagtgtattttgcatttttaaaacttgacgtgctgtattgtactaaattaagtgtaatctattaaggcaaggtatacacaatttgctttgaaacttactatgtttattctattataaagtgtattcaggtgcaacacagagactgctttcggtgacattaatgaagaaaatttctcatgccaggctttattatagaatcttcagctaaaatcctaactttctccttatttcttggcacttgtatacaagtggtgttgcctcttagggcaggcatgagctattcttttctgtaaaatattttgaatctataggctgtgggtttcatttttgaaaagtattttgtctggatgtctttcaaactagcttcagatattatttaatactatgtaactgggtcccctatggctcaatcaatattgcttatttttcttctgtagtggatgtgaaatttcctttagttggataagatacactgtaataattttaatgctaattaatgatatttcatactgtgcaatgaacagataatttaacactgtattttgaaatgtttttttcttcctgtcaccgcagtgtgtggtattgcataatgtgaatacctgtaaaaatataaattacttaaaaataaaaatatgaccaattggtatcag

SEQ ID NO: 734428 - DNA, 2630 bp, Homo sapiens
aaaactctctacttcggtatatgagcaatgaaaagattgctcaagaagaatacatgtttcagagaaacagcaaaaaggacacagggaagaagtcaaaaaagaagggtgataagagtaatagcccaactcactattcattgctacctagtttacaaatggatgcactgagacaagacatcatgggcactcctgtgccagagaccacactataccatacatttcagcagtcctcactgcagcacaaatcaaagaagaaaaacaaaggtcctatagcaggcaagagcaaaagacgaatttcttgcaaagatcttggccgtggtgactgtgagggctggctttggaaaaagaaagatgcgaagagttacttttcacagaaatggaaaaaatattggtttgtcctaaaggatgcatccctttattggtatattaatgaggaggatgaaaaagcagaaggattcattagcctgcctgaatttaaaattgatagagccagtgaatgccgcaaaaaatatgcattcaaagcctgtcatcctaaaatcaaaagcttttattttgctgctgaacatcttgatgatatgaacaggtggcttaacagaattaatatgctgactgcaggatatgcagaaagagagaggattaagcaggaacaagattactggagtgagagtgacaaggaagaagcagatactccatcaacaccaaaacaagatagccctccacccccatatgatacatacccacgacctccctcgatgagttgcgccagtccttatgtggaagcaaaacatagccgactttcctccacggagacttctcagtctcagtcttctcatgaggagtttcgccaggaagtaactgggagcagtgcagtgtctcccattcgcaagacagccagtcagcgccgctcctggcaggatttaattgagacgccactgacaagttcaggcttacactatcttcagactctgcccctggaggattctgtcttctctgactccgcggccatctccccagagcacaggcggcagtctaccctgccaactcagaaatgccacctgcaggatcactatgggccataccccttagctgagagtgagaggatgcaagtgctaaatggaaatgggggcaagcctcgaagttttactctgcctcgagatagcgggttcaaccattgctgtctgaatgctccagttagtgcctgtgacccacaggatgacgtgcaacccccagaggtggaggaagaggaggaggaggaggaggaggaaggggaggcagcaggggaaaacataggagaaaaaagctaatacactgcgagagttggtagaacctctccatgccaaatcggatccacttctgttggcactcaacccattggactcacagattgataagctaatgtttagagaatttagatcggagagagtcggtacggcgcagactcaacatcaacctcttgcaagcaactaaaatggcctcgtccttgctgtttataacagaaaacagacttgtaaaaagcttagatcatcaagtgttttggattgggggcctcccaaagggatataagaggggcaggccactcttaagaagaatgcgagctttctacattgggactagcataagatcaaagccaatcaagatggagcacagtaacagaaaactgcggtttctgtgggagaacagaaggggaaagggtcttaactgggaaagggctctgtgtggtaacacctcagttgtgttctcctgacaccaggaaaagagagggatcagcttcaataactagaaaattctggctgtttaatggactctttggtggcctctttaaggcaaagcagagaaagcaaattatgtattaagtgtattttgcatttttaaaacttgacgtgctgtattgtactaaattaagtgtaatctattaaggcaaggtatacacaatttgctttgaaacttactatgtttattctattataaagtgtattcaggtgcaacacagagactgctttcggtgacattaatgaagaaaatttctcatgccaggctttattatagaatcttcagctaaaatcctaactttctccttatttcttggcacttgtatacaagtggtgttgcctcttagggcaggcatgagctattcttttctgtaaaatattttgaatctataggctgtgggtttcatttttgaaaagtattttgtctggatgtctttcaaactagcttcagatattatttaatactatgtaactgggtcccctatggctcaatcaatattgcttatttttcttctgtagtggatgtgaaatttcctttagttggataagatacactgtaataattttaatgctaattaatgatatttcatactgtgcaatgaacagataatttaacactgtattttgaaatgtttttttcttcctgtcaccgcagtgtgtggtattgcataatgtgaatacctgtaaaaatataaattacttaaaaataaaaatatgaccaattggtatcagatcttttcagatagctaaataatttgctaagtatgcctgatagtaaatatctttctaaaaagaagtaatcagtgcttctttctcacaaatggaatttgtgtctgtgaataaaatcacattgatctgcct

SEQ ID NO: 734429 - DNA, 360 bp, Homo sapiens; identical to SEQ ID NO: 25812

SEQ ID NO: 734430 - DNA, 578 bp, Homo sapiens
ctcgagaacagtcaggcttgctgttgaagggagcgccatgcagcgcttacaagaccacctctcggcagccgcacaaagtgttttctgctatgggtgaaagtgtaatgagaaccgaggcaagaaaggtcggaggcctgatgctccaacttcaaaacgtgggcctgggcagggcagatgagcgagtcactggctagttgataccaatctccttgttatcctcgataaaccgcgtgaatgggcggctggctgctgtttctgagctcgctttgtccaagctgacgatgggtgggctactgccagtgcgtgctttgtccatcccactggccatgctgcccagaggggggagggcgctgcccccaagactcacggggagctgggggatgccgccgttctggatgacggagatctcgttgttcttcatggcgagcccgttagtgatggctgcagcatactggttccaaaaactggggtcgacgttcattgcccgagctgccaggtccttctggaacatttcagagaacttcagggcatcaccccctaggagagccatggggttctccacagacaggcggcggcgc

SEQ ID NO: 734431 - DNA, 5153 bp, Homo sapiens
cacactcgcacccgcgcacgcaccgccagcaggcagcggccaccgccgcgatgctcgcccgcgggttggggaagtttcccgccggcctcggccgcgggcacccgtgctcccaggtgtagcgcccccgcgcggcgcgggcggccggcgcctccagcatgaccggccagagcctgtgggacgtgtcggaggctaacgtcgaggacggggagatccgcatcaatgtgggcggcttcaagaggaggctgcgctcgcacacgctgctgcgcttccccgagacgcgcctgggccgcttgctgctctgccactcgcgcgaggccattctggagctctgcgatgactacgacgacgtccagcgggagttctacttcgaccgcaaccctgagctcttcccctacgtgctgcatttctatcacaccggcaagcttcacgtcatggctgagctatgtgtcttctccttcagccaggagatcgagtactggggcatcaacgagttcttcattgactcctgctgcagctacagctaccatggccgcaaagtagagcccgagcaggagaagtgggacgagcagagtgaccaggagagcaccacgtcttccttcgatgagatccttgccttctacaacgacgcctccaagttcgatgggcagcccctcggcaacttccgcaggcagctgtggctggcgctggacaaccccggctactcagtgctgagcagggtcttcagcatcctgtccatcctggtggtgatggggtccatcatcaccatgtgcctcaatagcctgcccgatttccaaatccctgacagccagggcaaccctggcgaggaccctaggttcgaaatcgtggagcactttggcattgcctggttcacatttgagctggtggccaggtttgctgtggcccctgacttcctcaagttcttcaagaatgccctaaaccttattgacctcatgtccatcgtccccttttacatcactctggtggtgaacctggtggtggagagcacacctactttagccaacttgggcagggtggcccaggtcctgaggctgatgcggatcttccgcatcttaaagctggccaggcactccactggcctccgctccctgggggccactttgaaatacagctacaaagaagtagggctgctcttgctctacctctccgtggggatttccatcttctccgtggtggcctacaccattgaaaaggaggagaacgagggcctggccaccatccctgcctgctggtggtgggctaccgtcagtatgaccacagtggggtacggggatgtggtcccagggaccacggcaggaaagctgactgcctctgcctgcatcttggcaggcatcctcgtggtggtcctgcccatcaccttgatcttcaataagttctcccacttttaccggcgccaaaagcaacttgagagtgccatgcgcagctgtgactttggagatggaatgaaggaggtcccttcggtcaatttaagggactattatgcccataaagttaaatcccttatggcaagcctgacgaacatgagcaggagctcaccaagtgaactcagtttaaatgattccctacgttagccgggaggacttgtcaccctccaccccacattgctgagctgcctcttgtgcctctggcacagcccaggcaccttatggttatggtgtaaggagtatgcccagcccctgaggggagagatgcatgggatatgcacccaggtttcttttacagtttttagaatcgtttttagagggtggtgtgtctgacaccatgcctttgcacctttccatgaaatgacactcactggtctttgcatcgtgggcataaaatgttcaccttttttccagatgagtacacccagaatgctaatttttctgtccatcgtgtacgctattctagtgcttgtggcccagtactgtctatgagttgtcgtgctcctgtttctgaggttgtcgtgtgagttctgtacaaaaagcccccacaagtcgtccagtagaaatgcatctatgaggtcagcaaggatatgatgagattttgctcacagtcatgtgaaaacaaaatctcagctctttatccattgctttcacttagttttagtaccaaaacaaagagaatgcaaagttaagcagacttgaccaatgcaagtctctaagttgtttttataaatgatctgtagttccgtggcttgcatgggtgcaccaatcatctttagaacgatgtacactgatgttcatctcataaatgtcactctttagagaatgttacttagttaaacatgcagtgaagatcgaatttttttcccaagaacagatgtgttagggagaggggcttcagctaaatagtccaaaccctagggtgcttaaagccaagttagtgcaggctgagccccttggttcacagtcaagcctccttgtttcctagggtgactgtagagaaatgtatttccggatgaggtttctgatctaggccatttgaccaaactttgctgtgtctaagatattagcatgtttttgaaatatttattttttaagatgtttaggagtaaggtcgtgttgtcttcctcaactaaaaagaagtttactgttgtatcgtctccctgaggtgaacgttgttgggttgctagcaagggcagtagcttaaatacttttgttgcctactctgaaagctcatcaaatgagagccccttttatttccaagcagaatttagtcagataattttgcttctaggatatagtatgttgtatatgatgctgtgattgccctggagttcctgcccatgacatggaaacctggtggtatggaagcatgtactcaaaatatagacgtgcacgatggtggtgtggcttacccaggatggaaacactgcagttcttacttgcattcccactgcctttcatggggggtgactgggtagaggccaggagaaaggaaagagttgtaaaataaaaaactgctagttcataaaatgtcataaaaaattgtaaacttgaaaagcttaatgctattcaaaagaccttcaagcttccaaacttgtattgaagggagacgactgtttcctcctccaaaatgctcctgctcctcttgttcggttaaccagcacataacattgtgatggggaacctgggttcctctataagataattcttctccatcatctttaaggtaatctgatggttttccaggtggctttcattattgttccatctttgaaaaggcaatagaacccaggggtctgagcatggagctatccagggttttcatccaaaggttgggcctcttcttaagaggtccttttgtgtttcagttgattgaagatgatacttacctcattggaggtgtggcaaggatcttatcagaaggctttgtgttcttgtagttgtcatggctactacagtgtgggtgatttattgaatgaattcactagccacttgtgtcctggagcccccagttcaaatctttccattggactggaggcttgtgggaggctgggaggtggctgtctcctagtgtctacatccgtgtctctgaagcatcaggaaaagtgagatgacttagaggcaactgggcactgaatcagaggagcagagttatttttcagaatttgcacatggaacacttagatttggctggtgcttccagccctggaaggcataacatttacggactcatccccagctgcactgaaggcaggtggtggtacagacttatgaggacggatcagtttgccaaggctgatggtattgggtcactgagcctggtatccatggccgctgaccaggaagcttatgcaaagtggaagcaaggaacaaggcagaataactcagtcactttcatgaagatttttctaaacaagaaggcttaccaccaaaaaagaggtaccctagtggttaccctttgcagatgtgaaagctggaaaacttgacttttctttttggtaatgacttgcatttatctggtgcctttcgttggaggaatcccaacgtgctttagagactatctttttaacatctcttgtacatacatatatacttatataaaatattatcttgcccaactggacctttactcacttctgagcatgagaatgtcccaatagcattgagtttttcaagtggtggtttcagataagtgggagaaagaacaacccggctggcttaaaccctggagctaattcccacaaggaatgtagactgaatggtgacccagggagaaataatcttcctctcccctaaagtctcactaaggtttgaagtttacaggtgctctccactgggtctttgatcgaccttgctagataacatctaaccagcagtttcttttagtccctgaagctaaccagggagagtcaggttaattttctgtaaaaatatgaggtgacatctttggcaaccaggctgtcagactgacctgtaaacctcctttagggggacagagtagaaactggagatgacttgtttccagctgtgagcttgagagaagtgtcactcccagcatttgaaggttattgttttcaatgccagtgggccaaatatatgggccaggctttgatatctgtgatgtgcattttggaagtgctgggttgggaagtgacacgtctgttgcacaaatgcatattggttataggtttgtgttttctgccaaacccccacatttctcgggtttgtgagtgaggaagggcatgttgtaatgccaagctgatttgtagctcgtaaggtagtaattggtatttaacatttgcatttgttatttctacttatcttagcactcaaataattgaactacctgctaattcttgccgcatttcaaagaaaataagttgttatgcactttgggatagtggtgatctgtacaggctgtgtgttagctacttgaaggcgtaactggtatttcttgtgtgttttaacagcatgacttcttacagagctgtaatttttaaaattgaggatgccatatttgagatgtcagttttaacactcattaacacactactgtgcaagcattgacacaggctgcactgaaccattatgtctgattgctgcactttcatctctgtgcctcgattcgggaatgggcagtaatactgacacactcgggactccagcctcaaaaagtgtgcagattaaatagacaaaaattatttgcat

SEQ ID NO: 734432 - DNA, 498 bp, Homo sapiens
  misc_feature (8)..(8): n is a, c, g, or t
  misc_feature (29)..(29): n is a, c, g, or t
  misc_feature (50)..(50): n is a, c, g, or t
  misc_feature (65)..(65): n is a, c, g, or t
  misc_feature (76)..(76): n is a, c, g, or t
  misc_feature (85)..(85): n is a, c, g, or t
  misc_feature (153)..(153): n is a, c, g, or t
  misc_feature (477)..(477): n is a, c, g, or t
  misc_feature (487)..(487): n is a, c, g, or t
aaccacangggtaaaaaattacatttgcntggaaccccggcctaacgatnccctgtaaaatgganactttggcganactcacttncccgggtcaaagtgggaaacaggctgaaaaacaggcctgagcatcctttaatgatgtgcagaaagagnagggccctctgcccccacgggcagatgtacacagctgctaacagagaagcccctcatcctgtacgaccagtgcagagaaacgatcccctcgaatgcttcctagtggagttaagaaattttttgttgatcgtgcctttgaactaaggtcatttaagtatacaacagatgttcctctgagggaaacagacttataaagtcaggaacacagaagggacctaatggtttactaggggtggcgcattaagttcatagcaatttaactcctttcaatgctaaacaaaacaatgacgcaatttgatgcgcaataaaaacttgtcaaaagtntcaacttacnaaaaaaaaaaa

SEQ ID NO: 734433 - DNA, 1464 bp, Homo sapiens
ggcttaaaaagatgaatcgagatgcagtgtgtaggaagcatgggcaagggatgaggaacgccactttgaaaattactaaaactaaagcaagtgactaagagtgtgaatgaccctggctgcaatgactacgcctgctgggcttctattaaaattagactctatttcctgagcacccacaaatggacctgacaaagggaagacacagatgtactgcgtgatgaggaaagcctatcaggattaaaatatggctataactcagcctctccagagtgcagccaccatgacctccgcagattgatgatggaagaaaagaaaaccaggatatcctgtgctctggcttccctggaccatggatggaggacagcccatcccctcatccctagtcccccttgggaacgtatcagcagattctagcatgtccctggagcagaaaatgacatttgtttttgtgattctgttgtttattttcttgggcattctcattgtccggtgcttccggattcttttggatccatatcgaagcatgccaacctctacctgggctgatggacttgaaggcctggagaaagggcagttcgaccatgcccttgcttaggagggatggtgtgggatctcctcctgaggagatgaagtgctttgtgtcttggtgaggattccctttatttagtgttctcaacaaatcaaatttaaacaatatttggtcccaggaccataatccattattccataaatatgcagttgggttaaagacatttgaggatgttggaaatggacacttatataactaatccaacataagaaggtttaaatttttatgtttgctcaatgaatgagtactcttaaaattgtgtgattgtgaaaccaagagcgttaatactgacatagatttgccatcaaacaaaacaccacctgatctgactaaagaataaaagactagaaaggatctcatatgaatctggtgacaaggccaggaagagatttccttgctctaattatgtctatatttgttttatttcatgggcacctatctgggtcctgagcagaatgaggaagattgtgctgaatggacccaaagtagtttcttgttttctcctaaagcagggagctttgggaagcaatggaaaagcttaaaagagatgattctgtccttggtaaatgtgagtgagaatagcgttttgtttttcaagtaaaacttaattcaaaggctacaaagttttaaaaactatttaccaagccaactacattatatgtattcatattaataacatgtgtagaggtagctatacattacttgaatttacactttacacaaatgatttaaaaaataggttgcaagtgcagcttaaagttttttttcaatgaaaagttaattgtttagaggagaagacttttatagtcttcagaggaatgtgtatttatgattgtatatagtcaccaaataaaacttttcaagaaacagaaatg

SEQ ID NO: 734434 - DNA, 2329 bp, Homo sapiens
ataaaaacattgtatatagtagaccaaatggtcatagttactgtgagcctggcagagcagaaaaggcagttgaaggaggcagagaaggggttggtgatacggtgctataaatctgtggtccagtccacctcccttttaagacgtcctccccctatttctgttcttagttagagatgcagcagcttactcctgtagcgacctactaaaaagcaacaaggagaaagacatcgtctttttgaaaaaacgttctttcgtctcttttctttgttccttggtttgtttttcttgcccctttttgtttagttgaacggcaataggagggtagtctctccgtctttttaaactcttttttaagtttcccctcccctttcatatttttttgggccatttcttttagctttggactttgggggtcgaaagcgtttctttttatttgcttcttttaagccgagcacagtttaggtttcgtgctgtcttaagagaactatccagcagcttcttgctcatccttattgggagaactgcaccgttactttaaaaacacacatacacaaaaaccttaagggagaaagaggtaattgctgccatggaaacacaactgtctaatgggccaacttgcaataacacagccaatggtccaaccaccataaacaacaactgttcgtcaccagttgactctgggaacacagaagacagcaagaccaacttaatagtcaactaccttcctcagaacatgacacaggaggaactaaagagtctctttgggagcattggtgaaatagagtcctgtaagcttgtaagagacaaaataacagggcagagcttgggatatggctttgtgaactacattgaccccaaggatgcagagaaagctatcaacaccctgaatggattgagacttcaaaccaaaacaataaaagtttcctatgctcgcccaagttcagcttctatcagagatgcaaatttatatgtcagcggacttccaaaaacaatgacccagaaggagttggaacagcttttttcacaatatggacgcattattacttctcgtattcttgtcgaccaggtcactggcatatcaaggggtgtagggtttattcgatttgacaagcgaattgaggcagaagaagctatcaaaggcctaaatggccagaaacctcccggtgccacggagccaatcactgtaaagtttgctaataacccaagccaaaaaaccaatcaggccatcctttcccagctgtaccagtctccaaacagaaggtatccaggaccgctagctcagcaggcacagcgttttaggttggacaatctgctcaatatggcttatggagtaaagaggttttctccaatgaccattgacggaatgaccagtttggctggaattaatatccctgggcaccctggaacagggtggtgtatatttgtgtacaacctggctcctgacgcagatgagagtatcctgtggcaaatgtttgggccttttggagctgtcaccaatgtgaaggtcatccgtgactttaacaccaataaatgcaaaggttttggatttgtgactatgacaaactatgatgaggctgccatggcgatacgtagcctcaatggataccgtctgggagacagagtactgcaggtctcctttaagacaaacaaaacgcacaaagcctaatgagctcttgtcctcagtccatttatatatgaaaactatacaacaaaggcaagttaagagaaactttatacattagtaaatgtctttgtaagtcagtgttgagatggggataaaatgactacttagcatcctaagaaatatgtgagattttttattgctagtatttgaattaaaacttcttaaatatcttttatgttgaatatggacaagaggtacagggtttttacctgtcacattgcattctattgccttctttgaagaaggtggaccttttaaagtgtttcagctaagggaagacatttcttttctttttacataactgccttgaacctgtgagtaaatattgaggctttgtgttgtaattcttcagttggttgtgtcttttttttcccccctttttcctttttctgattagctttgtgtttggtttacatttaaagcattgctgttatgtctgtttaagaaaagtattttgaagtttacatttttatttatgaagtttaaaacagtatttattttgtaattatgatttgggttggggaagggggggctacattataaacgcttattgtaagaatactggagaacttttcgtaaagcagtaccttgccaaagagataagagcctctttgatgtgggtttaaaaaaagcatctatttttat

SEQ ID NO: 734435 - DNA, 2290 bp, Homo sapiens
ataaaaacattgtatatagtagaccaaatggtcatagttactgtgagcctggcagagcagaaaaggcagttgaaggaggcagagaaggggttggtgatacggtgctataaatctgtggtccagtccacctcccttttaagacgtcctccccctatttctgttcttagttagagatgcagcagcttactcctgtagcgacctactaaaaagcaacaaggagaaagacatcgtctttttgaaaaaacgttctttcgtctcttttctttgttccttggtttgtttttcttgcccctttttgtttagttgaacggcaataggagggtagtctctccgtctttttaaactcttttttaagtttcccctcccctttcatatttttttgggccatttcttttagctttggactttgggggtcgaaagcgtttctttttatttgcttcttttaagccgagcacagtttaggtttcgtgctgtcttaagagaactatccagcagcttcttgctcatccttattgggagaactgcaccgttactttaaaaacacacatacacaaaaaccttaagggagaaagaggtaattgctgccatggaaacacaactgtctaatgggccaacttgcaataacacagccaatggtccaaccaccataaacaacaactgttcgtcaccagttgactctgggaacacagaagacagcaagaccaacttaatagtcaactaccttcctcagaacatgacacaggaggaactaaagagtctctttgggagcattggtgaaatagagtcctgtaagcttgtaagagacaaaataacagggcagagcttgggatatggctttgtgaactacattgaccccaaggatgcagagaaagctatcaacaccctgaatggattgagacttcaaaccaaaacaataaaagtttcctatgctcgcccaagttcagcttctatcagagatgcaaatttatatgtcagcggacttccaaaaacaatgacccagaaggagttggaacagcttttttcacaatatggacgcattattacttctcgtattcttgtcgaccaggtcactggcatatcaaggggtgtagggtttattcgatttgacaagcgaattgaggcagaagaagctatcaaaggcctaaatggccagaaacctcccggtgccacggagccaatcactgtaaagtttgctaataacccaagccaaaaaaccaatcaggccatcctttcccagctgtaccagtctccaaacagaaggtatccaggaccgctagctcagcaggcacagcgttttaggttttctccaatgaccattgacggaatgaccagtttggctggaattaatatccctgggcaccctggaacagggtggtgtatatttgtgtacaacctggctcctgacgcagatgagagtatcctgtggcaaatgtttgggccttttggagctgtcaccaatgtgaaggtcatccgtgactttaacaccaataaatgcaaaggttttggatttgtgactatgacaaactatgatgaggctgccatggcgatacgtagcctcaatggataccgtctgggagacagagtactgcaggtctcctttaagacaaacaaaacgcacaaagcctaatgagctcttgtcctcagtccatttatatatgaaaactatacaacaaaggcaagttaagagaaactttatacattagtaaatgtctttgtaagtcagtgttgagatggggataaaatgactacttagcatcctaagaaatatgtgagattttttattgctagtatttgaattaaaacttcttaaatatcttttatgttgaatatggacaagaggtacagggtttttacctgtcacattgcattctattgccttctttgaagaaggtggaccttttaaagtgtttcagctaagggaagacatttcttttctttttacataactgccttgaacctgtgagtaaatattgaggctttgtgttgtaattcttcagttggttgtgtcttttttttcccccctttttcctttttctgattagctttgtgtttggtttacatttaaagcattgctgttatgtctgtttaagaaaagtattttgaagtttacatttttatttatgaagtttaaaacagtatttattttgtaattatgatttgggttggggaagggggggctacattataaacgcttattgtaagaatactggagaacttttcgtaaagcagtaccttgccaaagagataagagcctctttgatgtgggtttaaaaaaagcatctatttttat

SEQ ID NO: 734436 - DNA, 627 bp, Homo sapiens
agcccggcatctccctgccggcacggacccgaagggcggtcgggcagggcacgcgccggcggcggccgcggcgccgcgaactcgccgccggccccgcctcctggcgctcttccaagcaagcccctccttcccgccccgctacaaacggcgggaccgcggcgcctgggcgtcactgaggcagtagccggccgggtgaggagggcggttgccggcgcggcgcggcgcggcgcgggtggggcgggggttccgccggcttccagtcccctttcccgccgccgccgccgccaccgcctctccgcggagctcgccccgagcgactcctccgcggcagtgctgacggccagcggcacgagccgtagtagctgcagcttcgagtcacagcagaggtaattgctgccatggaaacacaactgtctaatgggccaacttgcaataacacagccaatggtccaaccaccataaacaacaactgttcgtcaccagttgactctgggaacacagaagacagcaagaccaacttaatagtcaactaccttcctcagaacatgacacaggaggaactaaagagtctctttgggagcattggtgaaatagagtcctgtaagcttgtaagagacaaaataacag

SEQ ID NO: 734437 - DNA, 759 bp, Homo sapiens
ccctagtccgaactctgggcgggaacactggtgggggcggcggaggttgtgcccgcgaagttcctagagctcagcccgttgcggcgggagtagagagaattgggcgcctcgggaggtggcaccgcccctcccgtgggcacaagcaggttgggggcggcgggagccgagcggggacagtcgcgcctggcagcgtgcacgggcgtggacgtgcccgggtgcggccgcgtgtagcgcaagaaggaaactgttgagacgcagaggtaattgctgccatggaaacacaactgtctaatgggccaacttgcaataacacagccaatggtccaaccaccataaacaacaactgttcgtcaccagttgactctgggaacacagaagacagcaagaccaacttaatagtcaactaccttcctcagaacatgacacaggaggaactaaagagtctctttgggagcattggtgaaatagagtcctgtaagcttgtaagagacaaaataacagggcagagcttgggatatggctttgtgaactacattgaccccaaggatgcagagaaagctatcaacaccctgaatggattgagacttcaaaccaaaacaataaaagtttcctatgctcgcccaagttcagcttctatcagagatgcaaatttatatgtcagcggacttccaaaaacaatgacccagaaggagttggaacagcttttttcacaatatggacgcattattacttctcgtattcttgtcgaccaggtcactg

SEQ ID NO: 734438 - DNA, 299 bp, Homo sapiens; identical to SEQ ID NO: 33807

SEQ ID NO: 734439 - DNA, 1211 bp, Homo sapiens
ggcgaggccatgtgatgctgggcgagagagagccgccgcgccggagcctccttctttcctgcctctgattccgggctgtcatggcgacccccaacaatctgacccccaccaactgcagctggtggcccatctccgcgctggagagcgatgcggccaagccagcggaggcccccgacgctcccgaggcggccagccccgcccattggcccagggagagcctggttctgtaccactggacccagtccttcagctcgcagaaggtgcggctggtgatcgccgagaagggcctggtgtgcgaggagcgggacgtgagcctgccacagagcgagcacaaggagccctggttcatgcggctcaacctgggcgaggaggtgcccgtcatcatccaccgcgacaacatcatcagtgactatgaccagatcattgactatgtggagcgcaccttcacaggagagcacgtggtggccctgatgcccgaggtgggcagcctgcagcacgcacgggtgctgcagtaccgggagctgctggacgcactgcccatggatgcctacacgcatggctgcatcctgcatcccgagctcaccaccgactccatgatccccaagtacgccacggccgagatccgcagacatttagccaatgccaccacggacctcatgaaactggaccatgaagaggagccccagctctccgagccctacctttctaaacaaaagaagctcatggccaagatcttggagcatgatgatgtgagctacctgaagaagatcctcggggaactggccatggtgctggaccagattgaggcggagctggagaagaggaagctggagaacgaggggcagaaatgcgagctgtggctctgtggctgtgccttcaccctcgctgatgtcctcctgggagccaccctgcaccgcctcaagttcctgggactgtccaagaaatactgggaagatggcagccggcccaacctgcagtccttctttgagagggtccagagacgctttgccttccggaaagtcctgggtgacatccacaccaccctgctgtcggccgtcatccccaatgctttccggctggtcaagaggaaacccccatccttcttcggggcgtccttcctcatgggctccctgggtgggatgggctactttgcctactggtacctcaagaaaaaatacatctagggccaggcctggggcttggtgtctgac

SEQ ID NO: 734440 - DNA, 450 bp, Homo sapiens
ggcgaggccatgtgatgctgggcgagagagagccgccgcgccggagcctccttctttcctgcctctgattccgggctgtcatggcgacccccaacaatctgaccccccccgacgctcccgaggcggccagccccgcccattggcccagggagagcctggttctgtaccactggacccagtccttcagctcgcagaaggtgcggctggtgatcgccgagaagggcctggtgtgcgaggagcgggacgtgagcctgccacagagcgagcacaaggagccctggttcatgcggctcaacctgggcgaggaggtgcccgtcatcatccaccgcgacaacatcatcagtgactatgaccagatcattgactatgtggagcgcaccttcacaggagagcacgtggtggccctgatgcccgaggtgggcagcctgcagcacgcacgggtgctgcagt

SEQ ID NO: 734441 - DNA, 2648 bp, Homo sapiens; identical to SEQ ID NO: 433215

SEQ ID NO: 734442 - DNA, 2893 bp, Homo sapiens; identical to SEQ ID NO: 433220

SEQ ID NO: 734443 - DNA, 1456 bp, Homo sapiens
ggcgaggccatgtgatgctgggcgagagagagccgccgcgccggagcctccttctttcctgcctctgattccgggctgtcatggcgacccccaacaatctgacccccaccaactgcagctggtggcccatctccgcgctggagagcgatgcggccaagccagcggaggcccccgacgctcccgaggcggccagccccgcccattggcccagggagagcctggttctgtaccactggacccagtccttcagctcgcagaaggtgcggctggtgatcgccgagaagggcctggtgtgcgaggagcgggacgtgagcctgccacagagcgagcacaaggagccctggttcatgcggctcaacctgggcgaggaggtgcccgtcatcatccaccgcgacaacatcatcagtgactatgaccagatcattgactatgtggagcgcaccttcacaggaggaccccgcctggcagcaagtctggagctgagaggagctaaccctcggggacagcttggcagagcccagtgaggagagatggccgggccaccactagaatcccctgtccgccagcagccaagcccgagcatgggggtgcccagggcctctgggcagagacatcttggggctcagggatgccgggggcaggtggccggggcaggtgcccctctggcttccctgcccagcccctggcggtgcccacagagcacgtggtggccctgatgcccgaggtgggcagcctgcagcacgcacgggtgctgcagtaccgggagctgctggacgcactgcccatggatgcctacacgcatggctgcatcctgcatcccgagctcaccaccgactccatgatccccaagtacgccacggccgagatccgcagacatttagccaatgccaccacggacctcatgaaactggaccatgaagaggagccccagctctccgagccctacctttctaaacaaaagaagctcatggccaagatcttggagcatgatgatgtgagctacctgaagaagatcctcggggaactggccatggtgctggaccagattgaggcggagctggagaagaggaagctggagaacgaggggcagaaatgcgagctgtggctctgtggctgtgccttcaccctcgctgatgtcctcctgggagccaccctgcaccgcctcaagttcctgggactgtccaagaaatactgggaagatggcagccggcccaacctgcagtccttctttgagagggtccagagacgctttgccttccggaaagtcctgggtgacatccacaccaccctgctgtcggccgtcatccccaatgctttccggctggtcaagaggaaacccccatccttcttcggggcgtccttcctcatgggctccctgggtgggatgggctactttgcctactggtacctcaagaaaaaatacatctagggccaggcctggggcttggtgtctgac

SEQ ID NO: 734444 - DNA, 2474 bp, Homo sapiens; identical to SEQ ID NO: 433221

SEQ ID NO: 734445 - DNA, 1037 bp, Homo sapiens
ggcgaggccatgtgatgctgggcgagagagagccgccgcgccggagcctccttctttcctgcctctgattccgggctgtcatggcgacccccaacaatctgacccccaccaactgcagctggtggcccatctccgcgctggagagcgatgcggccaagccagcggaggcccccgacgctcccgaggcggccagccccgcccattggcccagggagagcctggttctgtaccactggacccagtccttcagctcgcagaaggtgcggctggtgatcgccgagaagggcctggtgtgcgaggagcgggacgtgagcctgccacagagcgagcacaaggagccctggttcatgcggctcaacctgggcgaggaggtgcccgtcatcatccaccgcgacaacatcatcagtgactatgaccagatcattgactatgtggagcgcaccttcacaggaggacatttagccaatgccaccacggacctcatgaaactggaccatgaagaggagccccagctctccgagccctacctttctaaacaaaagaagctcatggccaagatcttggagcatgatgatgtgagctacctgaagaagatcctcggggaactggccatggtgctggaccagattgaggcggagctggagaagaggaagctggagaacgaggggcagaaatgcgagctgtggctctgtggctgtgccttcaccctcgctgatgtcctcctgggagccaccctgcaccgcctcaagttcctgggactgtccaagaaatactgggaagatggcagccggcccaacctgcagtccttctttgagagggtccagagacgctttgccttccggaaagtcctgggtgacatccacaccaccctgctgtcggccgtcatccccaatgctttccggctggtcaagaggaaacccccatccttcttcggggcgtccttcctcatgggctccctgggtgggatgggctactttgcctactggtacctcaagaaaaaatacatctagggccaggcctggggcttggtgtctgac

SEQ ID NO: 734446 - DNA, 1191 bp, Homo sapiens
cttgcccccagctcccaccctcagccctgtgactggaatgtgtgccccaccgtcattgtcctgagttgaatgtccctttgtgggggaggtggggggggcagtgtccatccacgaaggggcagaaggagggagccacgtgccccgccccacccgctcgggtgaagcccagtgggatttgcatctttctttctctttggttcctgcacatttatgggctgggaggcatccgtgtggaattgcgtgcagcctgtgtgtgtgctggcacaagcccatgcactgtgtgtgcagacgcatggggcctgcacccacaggcatggccgagcacatgtgtgggggaaggcgtgggcacataggtgcatgtaacctgtttgggcattggcacgtgcctacctgcatgttagcgtgagaggagctttgtgtgtgagaacatgtgtaatgtgtgtgcagacatgccgagagccagagacttgtgtgtgggccacgtacatgtggatagagacgcatacatggaggtgcatgtaatctgtgtctccgagtgtgtgtgtgcaggtatgtgtgctggtgcagacccaagtgtgtgggtgtgcctctgtgtgcgtgtgttccatcatccctgcaccactggctccagatcccttcctgagcccccgtccccgctggccctctcacagcctgcagcacatcagtgcccccagctgcatgcgcctcgctgctctgtccatcagtgtgtgcttgaccaagagaaaactaagacgtctcgggggacccctgtacctggtcctctcagacccccgcccactgtgctgtgttactcgcatgggggatttcctgccccttccacaatatgctgtttccccaggagcctcaggcctgaggctctgagtggggtccccagggggccccccggggtgagccccggctccacaccctgccccatccaccctgtagggcccatgttggtgtagcagtgatggcttctgtggatattctgtgacctctgtcggtgtaacttgacaatttctaaatggaaaagggttgctgtgttttctctgtctctcttttttaatgtccttttttcttctcccccgctccctgctctctttccttttcagtttttctagccaagtgtttggggctttaataaaacttgtttctttttcctctcctggatctccttcctataggctgatg

SEQ ID NO: 734447 - DNA, 1702 bp, Homo sapiens
agcttggcacgagggagggaatgtttgtgaatacatctggtgtgtactaaaaagctggaaaacccctaagtaaatgcaatatcgatagaaagcgagtttcttgaagagtcatctgctaaactccactagagtcatctctacaataacaatatcaactgaatataaaatattaatgccatggatgatctcagaaatgatttcctacaaagtcccaacctatcctggaacatttcttatgtgtgcttgggagattgcaagaggacaactcggctctaaaatcgatgcattaacatgtcattggaattgaccttgccaaaagatgcctccctaaatccacaagaatctccttgtttgaacacagtttctaatccagctgtaatgaagacagacaacagtcaaattaacaactgatcaggaggagaagttcatactccttgagctggatctatctgcacatgcacctggcccaggaagctgaaatgggagatctgatgagcagtggaggactgaaccaaagcccttggcttttgctccataccagtcagagtctcatcaggatatcatgttgcattgagtagtcatgtctccacaggcttttcttggctgcgactcttactcacgttttccttggttttgcccaccttacagtttacagtagtggtcaggtattttgtagtatgtccctcacttgggctttgcttgatgcttatctcctgagaaaactagggatatgtattttggggaggaaggccacagagatgaagtgacattcttttcacatcatatcaatgctacatactatcaaaagggcttatcactgttgatgttaattttaatcacctggctaagatattctttttcaggattttgactttaaagttaccctttatgcttttccttctcataaagtgctctttgaaatgaagtcactctgtgcagcagacatttaaaaagcaggaaattatggtgacagagtatctgtataaattatttgcagttcttttattttcagagtttggaattatagcactcctataaatcttattactaatggtgccacaaattgtgtactactgatatgtattagtgcacaacttaaagcatgtggacatgagctgtatttgaaaaaacattcagatggaagagctacctgatttgaagtgaatcttaattggaacttaatgatgcctcctagtaatttactattttagctgaacctacagtatcagctgtagcccagaaaatataagagctacaattcgtacaattcaacatcagctgccaaggcccacctggactgcacctgcaaaaccagctgtggtttctttgctctcacaattcatgtcagtgtttttcagccaatgcatcactggtttcgaattttatactgtccctctctcagtcctccacccctctagtttctaaatgatagagaataattaggtgaggtttaaactctcaggattattcagggtttgtggagagtaggaaggtttcttccaggttacagcacaatttaaggagcctggcaagaagcatccaatattagcaagtagaaaagcagcataagtatgaggttggaacttcccacgatacttagtacatggaaaaaaatgtagaacataccaaaaaaaaagcaaattgtaaaaaaatttcacaaataaaaatactgttatgaaaattaaattataaaaaaaaaata

SEQ ID NO: 734448 - DNA, 1071 bp, Homo sapiens
agcttggcacgagggagggaatgtttgtgaatacatctggtgtgtactaaaaagctggaaaacccctaagtaaatgcaatatcgatagaaagcgagtttcttgaagagtcatctgctaaactccactagagtcatctctacaataacaatatcaactgaatataaaatattaatgccatggatgatctcagaaatgatttcctacaaagtcccaacctatcctggaacatttcttatgtgtgcttgggagattgcaagaggacaactcggctctaaaatcgatgcattaacatgtcattggaattgaccttgccaaaagatgcctccctaaatccacaagaatctccttgtttgaacacagtttctaatccagctgtaatgaagacagacaacagtcaaattaacaactgatcaggaggagaagttcatactccttgagctggatctatctgcacatgcacctggcccaggaagctgaaatgggagatctgatgagcagtggaggactgaaccaaagcccttggcttttgctccataccagtcagagtctcatcaggatatcatgttgcattgagtagtcatgtctccacaggcttttcttggctgcgactcttactcacgttttccttggttttgcccaccttacagtttacagtagtggtcagccgttctggacatacacatgggcagaagatgtagccgccttgtgtgaaaatttgagagctctctactccatcttccgctagtataaccctcattggctggaatcataatggtatctgcatctggaactggccactagtataacacctacaaaatgcacaacggccttcagaccatatgaaaagtctacagggtgagaatctgaaaatccagcaatgaggagaaaaaagttatctcccattaagaacactttccagaagctacacaattccagttattgattcatcccatttactagaacctgttcatctggctatgcccaaaaccaagggaaactgaaatagtggttaccatattctgtaactcagcctagcctagcttcagaagttttaataaagaaaataaaat

SEQ ID NO: 734449 - DNA, 951 bp, Homo sapiens
agcttggcacgagggagggaatgtttgtgaatacatctggtgtgtactaaaaagctggaaaacccctaagtaaatgcaatatcgatagaaagcgagtttcttgaagagtcatctgctaaactccactagagtcatctctacaataacaatatcaactgaatataaaatattaatgccatggatgatctcagaaatgatttcctacaaagtcccaacctatcctggaacatttcttatgtgtgcttgggagattgcaagaggacaactcggctctaaaatcgatgcattaacatgtcattggaattgaccttgccaaaagatgcctccctaaatccacaagaatctccttgtttgaacacagtttctaatccagctgtaatgaagacagacaacagtcaaattaacaactgatcaggaggagaagttcatactccttgagctggatctatctgcacatgcacctggcccaggaagctgaaatgggagatctgatgagcagtggaggactgaaccaaagcccttggcttttgctccataccagtcagccgttctggacatacacatgggcagaagatgtagccgccttgtgtgaaaatttgagagctctctactccatcttccgctagtataaccctcattggctggaatcataatggtatctgcatctggaactggccactagtataacacctacaaaatgcacaacggccttcagaccatatgaaaagtctacagggtgagaatctgaaaatccagcaatgaggagaaaaaagttatctcccattaagaacactttccagaagctacacaattccagttattgattcatcccatttactagaacctgttcatctggctatgcccaaaaccaagggaaactgaaatagtggttaccatattctgtaactcagcctagcctagcttcagaagttttaataaagaaaataaaat

SEQ ID NO: 734450 - DNA, 404 bp, Homo sapiens
cgcaaagctcattaagaggcaacatggcggaatttacctggtgcatgacgttcctctaggaatgctagacttcatagctgctggaagaatcgcacgccttctgcggggtggctactcggaggaatatctgctgcctccaggaatgcctccgggtcttcacaggagtcccaccagaatcaccaagatggtttgctttggattcaaagtccctttttgtgttcataaaatcagaggtgttattttcatctacaggagccagaaattttagaaaatttggcacagaggaagaagaatgaagttttttccgcagggcattacggcaggagatgctctttggcacagcattcccactttgtcctccactggaattatgttttagggacttaaaaaagtttggcgaggag

SEQ ID NO: 734451 - DNA, 400 bp, Homo sapiens
gggcccatcttcacaaactggttctaaaggagatcgtgggggaagctctcccagctctgaataatcttcatagctgctggaagaatcgcacgccttctgcggggtggctactcggaggaatatctgctgcctccaggaatgcctccgggtcttcacaggagtcccaccagaatcaccaagatggtttgctttggattcaaagtccctttttgtgttcataaaatcagaggtgttattttcatctacaggagccagaaattttagaaaatttggcacagaggaagaagaatgaagttttttccgcagggcattacggcaggagatgctctttggcacagcattcccactttgtcctccactggaattatgttttagggacttaaaaaagtttggcgaggag

SEQ ID NO: 734452 - DNA, 1637 bp, Homo sapiens; identical to SEQ ID NO: 43456

SEQ ID NO: 734453 - DNA, 460 bp, Homo sapiens; identical to SEQ ID NO: 728870

SEQ ID NO: 734454 - DNA, 1333 bp, Homo sapiens
atgacctgtagcccatgtgtatacaaccctttcctgcacgtctgcacacggagtgaacagaacccagccagcacgggtgaggaccagatgagagatgggggctgcagcagcaaagtctgggacggaggtctcagagagccccttggggtggcgaaggccctccacacatcagagctccagaccctgaagaagagggcagagctacatggtgctgccaggtgagtcctgcaccgccaggcctcctgtgggaggggcaggaatggccaacggacctcatctccatccgagcctgtctgaggcaggacagctgggtgtgtctgagaagcaatgtcatgctagtactcagcccctgtgccaatattacattctagttctggggcaattcatcaggagcagaagggctgggaaagagcaggccactccccaggcctgttctcacacctgcctgcagaatcacaggtaggtttcaggctccatctaggataccctagaaggcggggctattctaggtagcaaaagcctctgcctctgattctcacccacatgcagaagcagtcacaacttgcacacaacacagctcacaactagggaaagcacttgttaaagagaatgcccccagggcatggccagcatgccgatacagtgttcccatgcccctgttactgatcctgtcctcctgccttctagaacagtggacctcacatcacctcccagattgtctccattttatggattgaaactctgaggcctccagacatgaagaagcagccatagattcagtcaaatgccagccaagggtttgccttgcctcagacaacctccccagccccatttgacccagagaccagctgtcagggagcgacctcagagccagaggggtgaaagatgagaggcaagaaggtagctcctatcctagcacagcccaggctccatctgtctgcctttctctcccctgcggcatcctggcagggcagttggcagagtgccccctccccaggaggctgcagatctctgtccctggctcacccagatcggtctgttctctgcagttccattcctttagcctctttcgcaggtctgagcatctctggagcatgcaggggaggagatatctgaggtgggcttccgtgcagtcagcagcctgccccagcttcagcctcaggcgtcaggctggtctgcactgaactctgggtctgcctctggggccctgaccaagcacgcctgactccagccccatgaggagcatcctgtcttggttccgtagggatcatgggtcctcttaccactgtgcgccaagcccccagcccacctctgcctgggccgacttcctggt

SEQ ID NO: 734455 - DNA, 1316 bp, Homo sapiens
ggggaaaggaggtacacacagtcgcgcgcgcacggacacacacacacacgcacgcacgcacacacaccggtggcgagttcgagccccgcggcccctgtccgcccgcgtgcgcccctcgacacagctcgcctcccgccccctgattcctgctgctgccgcccagaggagaaaggaacctttgcctcgaatttccccactgcgccgggcgctgcggagagcggcgagggtgggcgcgaggcggagaacgcgatgaatgagttctcccctcgcctcggagttgtctgagttggcggcgctgcgcccaggcttccggctctcagcgccccacgcgcgcgtggctccccgggctgccacccacgcccgcggccggggccgagccagccacgcagggcagccgaggctccggagctcctgtcccggccccagtccgggtaaaaggagggttgtccccagcggaggcgcacagccgcgcgttctccctgcactctcttcgcggtcccatctgttccccatggcgtctcatccgcaaacccggatccaggcttacctggagaagaacaagatcggtcccctgtttgaggaattaatgaccaagttaataactgagacacctgaccagccaatcccatttctcattgaccatcttcagtctaaacaagggaaccgtggacaacttcaaagaactttgtctggatctgcagctctatgggcagaaagtgaaaaatcagaatccaaaggaacaagaagggatttcagaagctatgataaaccttggcaattaaatgcaaagaagcctaaaaaatcaaaaagtgaccttgctgtgtctaatatttctccaccatcaccggactccaaatcattgccaaggtcagtagagcatccaaagtggaactggaggactaaaccacaaagccgtgattttgatgaattgaatcacatccttcaggagagcaagaagctggggaaagcccttgagaatctctctcgaagtattgcaatttcagatgaactcgataaggaaacagtgacatttaattcttctcttctgaggccccgtgtgattggagaatggattggtagagaagaaaatgatgctgatcccctagctgctgaaatgctacagcctccaattccaagaagcaaaaatgaccaatgggaaagtgaagatagtggctctagtcctgcaggaagctttaaagatgggagccttaagaacaaaggattaaaacagcagcaacagcaacataagaaactcctggccgcaatgctctctcaagattcttttgagtccatccacagccctaccccatctgtaa

SEQ ID NO: 734456 - DNA, 951 bp, Homo sapiens
acttcggagagagaatgtagaatggaggaggtgaggaatttaactaatagagatgctttttctaacaggcagaaattagagaaatggatcaaaagatttaaacattgattacatataaacgagtttcctttttttctacatagcacacaggtgctcaacatttaatgaataatataacagatactgtcttaaaagtttaaaaacaggatttgtacttaatcctaaattcctcttatcacacaccagaaaataatttggattttatttacaaactacatccaaatactcttaaggaaagagtgtcatttagcttggagtagggactgactggggtctaagtgttggaaattaaattctgccattcagtccaacctcaaaggtgttccaggcaaggagttttgcaaggactagaaaccctttcacacttgaagtgcaggtgttggctgaaagaatagagggacatttcacaaacacagaacacggctcccctacaggaaagggatggagacagctacctttgctcttgctctcacattctctgtcctcatggactttcttctctgtttccctctgcctatctatctgcctggttctcttgcttctcctggccaaccagctttctcattagtgcatatgtagctgaaaaatccacccctcaagaacccactccacacaacctttccttttcagtacccaccacgctctgactagcatctctgtgatgcctaaggcaaatttttgaggatctgattggtttagttcatctgcctatgggtgagccaccctggggtcaggtgcctgtccaatcacctgttaccaaggaggcagggccgtgtcatttaagcatggccccatggactgaccctttcagcagggacttttattgggggctggtacccagaagaaggagcatgagtgggcaagaccttcaaaaagaacctactacacact

SEQ ID NO: 734457 - DNA, 499 bp, Homo sapiens
catctatcagatgggaatagtaatactcattttacctatttttaccaggtggttgtaggaacaggattcattcattccttcattaatataatgaacactttgagaccccactatataacagggccatacatatgacaaggtgatagatggaaagacgttttgcagaatttttgaagacttgcaatgtttttgaagactacaggatagtttgtgatttttatattaaggtcgtatcaactctttatgtcaatatatcaaagtaattgacacttttagagctctgccaatcagtgggccatattcatagaatgtcagtaatctgtctgaatacaagttatagttggtctttagctgttctgtctctgaggagctagaaataaaatattaggttctaatttttttttgttcaaacactgatcatgtaacaaactgcaaatccatgttttcagcaggttcgccaacctttgagttgaatgcagacctttctttagaacaacct

SEQ ID NO: 734458 - DNA, 470 bp, Homo sapiens; identical to SEQ ID NO: 728882

SEQ ID NO: 734459 - DNA, 2040 bp, Homo sapiens
ctgaagactggctagtcctggcagaacagtactttggagttccctggagcctggccagccctcacctcttctggatagaggattcccccaactccccaactttctccatgagggtcacgccccctgaggacctcaggaggccagcagaacccgcaggctcctgaagactggctacgcctcctgagaccacttggaaacagaccaactgcccccgtggttgcctggtggctggacccccgggattgactagagaccggccgtacaccttctgcatctcactggagactgaacactagtcccttgcggtcacgtgggacactgggcgcctcctcctccccctcctcctcacctggagagactacaggaacttcagggtcactccccgtggtcacatggaggttgtgggccgaggcgcttattttcccttatggtgacctgagtcctggagactcccattctccccctctccctgagagtcccctgcagtttctgggtaacagggcacacccctctagtttcatgggcgagcacccccatctgccacctcagactgacacacagccagctggctcacttactgggggccacgtcccacccctcagatatttctttgaagggagagcaaacccaccctgtcctctgacgtccctttcccaactgtcaccaaacagaccatcttcccaggcctggggaccggtaagatccatgtcactagttatgcagagcagttgccttgggtcccactgtcaccaaggcaaccagtcctgctgctacctgtcacctagagtcacacaccccttccctcatcaggcacacccatgaagacagtgcctccctcctccagctgtaaccatggataccacacatttctcatctcattggcccccaccccagagacctccacctcaacttctggctgtccctaccctgactcaccgccatggagatcaccctccccgaagctgtcgccagggtgacccaacatccagttctccggctctcaccatggaaacaaactgtccctgtccccaggcccactccagttccagaccaccctccatgctccacccccaggcggtttggaccccaccactgttgccatggtgaccaaactctggagtccgaggtaacagaacacctgtccccctaggcttttccttgtggacaacggggccctgttcaccaagctgttcccatagagactgtcaacgttgtcctcatgacaaccagacttccagttctcaggaacttctcattgtgggccagaagtcctgggtgcctcctactagggctaccctactgcaccccatcaggggcctgatggctgccccttccccagacagggctggacttctggagctgctaagccaccctccgtttgcacgttaactctatgccggatagcagctgtgcacgagacaatcttgcaacacccgggcatgtttgtcgtcgtcctacaaatgaggaaaccgagcctatggcgtgccctggtctgttgagatatgcaagcactgagctcctcttttgtcctctgagaccccatctccattctcacccagttcctctctccttccctgacccccacccacatttccctccttagagatccaggagggatggaatgttctttaaaattcaacacccaccaggctctaagcggcgatctgtgctaagaggtcaggacccagccgaagtcctcggcgttgacaggcagctggggggacatgatccatggacaaggccatcccggccgtgggagaccccagtcccgaagtcttgcctgcaggagtactggggtccccctggggccctctttactgtcacgtcatctctaggaaacctatctctgagttttgggaccaggtcggtttgggtttgaattctgcctcttcttgctcactgtgtgaccaagtgacaaactccttctgaacctgtgttctcccactgtaccagggctgttctgtggtccccgtgagtgccaagcatacagtaggggctcaataaatccttgtttcttttgatgaatgagaaaatgaggca

SEQ ID NO: 734460 - DNA, 1680 bp, Homo sapiens
ctgaagactggctagtcctggcagaacagtactttggagttccctggagcctggccagccctcacctcttctggatagaggattcccccaactccccaactttctccatgagggtcacgccccctgaggacctcaggaggccagcagaacccgcaggctcctgaagactggctacgcctcctgagaccacttggaaacagaccaactgcccccgtggttgcctggtggctggacccccgggattgactagagaccggccgtacaccttctgcatctcactggagactgaacactagtcccttgcggtcacgtgggacactgggcgcctcctcctccccctcctcctcacctggagagactacaggaacttcagggtcactccccgtggtcacatggaggttgtgggccgaggcgcttattttcccttatggtgacctgagtcctggagactcccattctccccctctccctgagagtcccctgcagtttctgggtaacagggcacacccctctagtttcatgggcgagcacccccatctgccacctcagactgacacacagccagctggctcacttactgggggccacgtcccacccctcagatatttctttgaagggagagcaaacccaccctgtcctctgacgtccctttcccaactgtcaccaaacaaggcccactccagttccagaccaccctccatgctccacccccaggcggtttggaccccaccactgttgccatggtgaccaaactctggagtccgaggtaacagaacacctgtccccctaggcttttccttgtggacaacggggccctgttcaccaagctgttcccatagagactgtcaacgttgtcctcatgacaaccagacttccagttctcaggaacttctcattgtgggccagaagtcctgggtgcctcctactagggctaccctactgcaccccatcaggggcctgatggctgccccttccccagacagggctggacttctggagctgctaagccaccctccgtttgcacgttaactctatgccggatagcagctgtgcacgagacaatcttgcaacacccgggcatgtttgtcgtcgtcctacaaatgaggaaaccgagcctatggcgtgccctggtctgttgagatatgcaagcactgagctcctcttttgtcctctgagaccccatctccattctcacccagttcctctctccttccctgacccccacccacatttccctccttagagatccaggagggatggaatgttctttaaaattcaacacccaccaggctctaagcggcgatctgtgctaagaggtcaggacccagccgaagtcctcggcgttgacaggcagctggggggacatgatccatggacaaggccatcccggccgtgggagaccccagtcccgaagtcttgcctgcaggagtactggggtccccctggggccctctttactgtcacgtcatctctaggaaacctatctctgagttttgggaccaggtcggtttgggtttgaattctgcctcttcttgctcactgtgtgaccaagtgacaaactccttctgaacctgtgttctcccactgtaccagggctgttctgtggtccccgtgagtgccaagcatacagtaggggctcaataaatccttgtttcttttgatgaatgagaaaatgaggca

SEQ ID NO: 734461 - DNA, 1400 bp, Homo sapiens
tcgaacctggcgccgttacttagggcacctctcttgtgccctgttggaccggggaaaacccagtggcgagctattttatgcagagcagttgccttgggtcccactgtcaccaaggcaaccagtcctgctgctacctgtcacctagagtcacacaccccttccctcatcaggcacacccatgaagacagtgcctccctcctccagctgtaaccatggataccacacatttctcatctcattggcccccaccccagagacctccacctcaacttctggctgtccctaccctgactcaccgccatggagatcaccctccccgaagctgtcgccagggtgacccaacatccagttctccggctctcaccatggaaacaaactgtccctgtccccaggcccactccagttccagaccaccctccatgctccacccccaggcggtttggaccccaccactgttgccatggtgaccaaactctggagtccgaggtaacagaacacctgtccccctaggcttttccttgtggacaacggggccctgttcaccaagctgttcccatagagactgtcaacgttgtcctcatgacaaccagacttccagttctcaggaacttctcattgtgggccagaagtcctgggtgcctcctactagggctaccctactgcaccccatcaggggcctgatggctgccccttccccagacagggctggacttctggagctgctaagccaccctccgtttgcacgttaactctatgccggatagcagctgtgcacgagacaatcttgcaacacccgggcatgtttgtcgtcgtcctacaaatgaggaaaccgagcctatggcgtgccctggtctgttgagatatgcaagcactgagctcctcttttgtcctctgagaccccatctccattctcacccagttcctctctccttccctgacccccacccacatttccctccttagagatccaggagggatggaatgttctttaaaattcaacacccaccaggctctaagcggcgatctgtgctaagaggtcaggacccagccgaagtcctcggcgttgacaggcagctggggggacatgatccatggacaaggccatcccggccgtgggagaccccagtcccgaagtcttgcctgcaggagtactggggtccccctggggccctctttactgtcacgtcatctctaggaaacctatctctgagttttgggaccaggtcggtttgggtttgaattctgcctcttcttgctcactgtgtgaccaagtgacaaactccttctgaacctgtgttctcccactgtaccagggctgttctgtggtccccgtgagtgccaagcatacagtaggggctcaataaatccttgtttcttttgatgaatgagaaaatgaggca

SEQ ID NO: 734462 - DNA, 721 bp, Homo sapiens
  misc_feature (577)..(577): n is a, c, g, or t
  misc_feature (581)..(581): n is a, c, g, or t
  misc_feature (599)..(599): n is a, c, g, or t
  misc_feature (619)..(619): n is a, c, g, or t
  misc_feature (628)..(628): n is a, c, g, or t
  misc_feature (650)..(650): n is a, c, g, or t
  misc_feature (657)..(657): n is a, c, g, or t
gcagctgagtcagtgagcagcgccatgatgaggggcagtccctgccagcaccaacaggggctggaaacccagcgataggagcatcagcatctccgaggggtcctgtggctgtctgtggtctccgaggtgctgtacattctgctgctggtggttggcttcagcctcatgtgtctcgagctcttccactccagcaatgtcatcgacgggctcaagctcaatgccttcgcggctgtcttcacggtgctctcaggcctcctgggaatggtcgcccacatgatgtacacgcaggtgttccaggtcaccgtgagcctcggtcctgaggactggagaccccattcctgggactacgggtggtccttctgcctggcgtggggctcctttacctgctgcatggcagcctctgtcaccacgctcaactcctacaccaagacggtcattgagttccggcacaagcgcaaggtctttgagcagggctaccgggaagagccgacctttcatagaccctgaggccatcaagtacttccgggagaggatggagaagagggacgggagcgaggaggacttcacttagactgcngcangagagataccctgccganaccagccacacatggcggantcctggccnggagctcgacaggaagcaccanagctgancgacgagtgctgggtctggggcactggggtgacaaaacctcaagctggccgggaacctcagcac

SEQ ID NO: 734463 - DNA, 1160 bp, Homo sapiens
  misc_feature (1016)..(1016): n is a, c, g, or t
  misc_feature (1020)..(1020): n is a, c, g, or t
  misc_feature (1038)..(1038): n is a, c, g, or t
  misc_feature (1058)..(1058): n is a, c, g, or t
  misc_feature (1067)..(1067): n is a, c, g, or t
  misc_feature (1089)..(1089): n is a, c, g, or t
  misc_feature (1096)..(1096): n is a, c, g, or t
gcggccgctgacgcggggcgccagctgccaacttcgcgcgcggagctccccggcggtgcagtcccgtcccggcggcgcgggcggcatgaagactagccgccgcggccgagcgctcctggccgtggccctgaacctgctggcgctgctgttcgccaccaccgctttcctcaccacgcactggtgccagggcacgcagcgggtccccaagccgggctgcggccagggcgggcgcgccaactgccccaactcgggcgccaacgccacggccaacggcaccgccgcccccgccgccgccgccgccgccgccaccgcctcggggaacggcccccctggcggcgcgctctacagctgggagaccggcgacgaccgcttcctcttcaggaatttccacaccggcatctggtactcgtgcgaggaggagctcagcgggcttggtgaaaaatgtcgcagcttcattgacctggccccggcatcggagaaaggggtcctgtggctgtctgtggtctccgaggtgctgtacattctgctgctggtggttggcttcagcctcatgtgtctcgagctcttccactccagcaatgtcatcgacgggctcaagctcaatgccttcgcggctgtcttcacggtgctctcaggcctcctgggaatggtcgcccacatgatgtacacgcaggtgttccaggtcaccgtgagcctcggtcctgaggactggagaccccattcctgggactacgggtggtccttctgcctggcgtggggctcctttacctgctgcatggcagcctctgtcaccacgctcaactcctacaccaagacggtcattgagttccggcacaagcgcaaggtctttgagcagggctaccgggaagagccgacctttcatagaccctgaggccatcaagtacttccgggagaggggcaaatcgaggcacagagagggagggcgacttgcccccaggtcacacagctggatggagaagagggacgggagcgaggaggacttcacttagactgcngcangagagataccctgccganaccagccacacatggcggantcctggccnggagctcgacaggaagcaccanagctgancgacgagtgctgggtctggggcactggggtgacaaaacctcaagctggccgggaacctcagcac

SEQ ID NO: 734464 - DNA, 1106 bp, Homo sapiens
  misc_feature (962)..(962): n is a, c, g, or t
  misc_feature (966)..(966): n is a, c, g, or t
  misc_feature (984)..(984): n is a, c, g, or t
  misc_feature (1004)..(1004): n is a, c, g, or t
  misc_feature (1013)..(1013): n is a, c, g, or t
  misc_feature (1035)..(1035): n is a, c, g, or t
  misc_feature (1042)..(1042): n is a, c, g, or t
gcggccgctgacgcggggcgccagctgccaacttcgcgcgcggagctccccggcggtgcagtcccgtcccggcggcgcgggcggcatgaagactagccgccgcggccgagcgctcctggccgtggccctgaacctgctggcgctgctgttcgccaccaccgctttcctcaccacgcactggtgccagggcacgcagcgggtccccaagccgggctgcggccagggcgggcgcgccaactgccccaactcgggcgccaacgccacggccaacggcaccgccgcccccgccgccgccgccgccgccgccaccgcctcggggaacggcccccctggcggcgcgctctacagctgggagaccggcgacgaccgcttcctcttcaggaatttccacaccggcatctggtactcgtgcgaggaggagctcagcgggcttggtgaaaaatgtcgcagcttcattgacctggccccggcatcggagaaaggggtcctgtggctgtctgtggtctccgaggtgctgtacattctgctgctggtggttggcttcagcctcatgtgtctcgagctcttccactccagcaatgtcatcgacgggctcaagctcaatgccttcgcggctgtcttcacggtgctctcaggcctcctgggaatggtcgcccacatgatgtacacgcaggtgttccaggtcaccgtgagcctcggtcctgaggactggagaccccattcctgggactacgggtggtccttctgcctggcgtggggctcctttacctgctgcatggcagcctctgtcaccacgctcaactcctacaccaagacggtcattgagttccggcacaagcgcaaggtctttgagcagggctaccgggaagagccgacctttcatagaccctgaggccatcaagtacttccgggagaggatggagaagagggacgggagcgaggaggacttcacttagactgcngcangagagataccctgccganaccagccacacatggcggantcctggccnggagctcgacaggaagcaccanagctgancgacgagtgctgggtctggggcactggggtgacaaaacctcaagctggccgggaacctcagcac

SEQ ID NO: 734465 - DNA, 983 bp, Homo sapiens
gcagccttgacctcccgggcccaggtagtcctcccacctcagcctcccatgtagcaggaaccacaggcaggcaccaccatacccagctaatttttgtattttttgtagagatggggtttcgccatgttgcccaggctagtcttttctttcttctctttttttttccccacagtatatattatacagcagtcataatatctataaatacatagagtttatgttgtgaagtttcccagttcactgaaatgttaggtttcctaaagggtacagtgccgtataaaacaacctgcctcatatatttctcctcaaaacgttggactatttgggaaaaggaaaagagttgggaaaattggttttaaggtaagttttagtcaaaagaattctttcttgaaactagctggtttgtggattcagatactctgatccttacagaatccaagaggaagctttcataaaaacaattcagcaaatatttccaatataatttgaatggctaattttcagttgctaattaattagcagctttgtaatacttgatttgggagcatttacttggaaatcctaaggactataataaaagttttcaacatatttctaaattgtgtgagtttccagctgtagcttttgtctttgtcacattttaaaaaataataagcaagacacattggggacactggcagcagttgccaggttttagctgccaccgcttcagtatgagatatagctgtcccatcttcccccattcagggtaggagatatagtgacccagacttcatgcaaatggaaaaaaagttttaactgaaatatttatttagatttcagggtctagatggatgggaaagtagaaaaacatatggcaaatcttcagtgttctcactatgaccactcttgagcagagatttggttttgtttccttttgtaacaaagtgaaaacaggtgagacaatgtgcccaaaacaaagggaagaagagaaccttctgtga

SEQ ID NO: 734466 - DNA, 491 bp, Homo sapiens
catgagggagacaggcaaacctgtgtgggttgggggtgtcttcctatgtaatagaaggtctcgtggtggggcatgctgtctttcgtttgaggggatgatgggcctccagttggtggcgaatcttttgaaacttgtttttagcattcccaaatttttttagagaaaaattcagaaagtacaggtgcctttggcgtttcatagtcaatatacaagcgagacacaagtattctccatggatgatttttgtgttgtcatggaatgaaagaaaaataccagtgggtctttactggccataatattttcgttttctcagttggcacatagctctttcgtcgcggaattcacttctttccatcccctctctctacttttaaatattttatgggcagtaagctcacaatatgtgctagcacggctgctctctccagaggtcaggatgggtttaataatgagatgcgtaacagtgactctgtaaaaacccatttcaggtt

SEQ ID NO: 734467 - DNA, 486 bp, Homo sapiens
gtggaatcctaatagttttttccgtaatctccaactatatttaaaataatgcccttctaaatagctctgtaaagagcctattggaagctgcacatttaaaaatggcaatagcactgcaatatgctgtagcatgatgcctgtcagccatgttccagacaattccttgtaagtcatctttcatttaagtaaaaaacaggttatgaagtactgcctcccagaccggaagtgccattctaaaaactccactatatatatcctgggagccataaaactgcctattgggaggctaaatgctctgcttttctataaaacagagataaggttctagagggaagtactgttaccagaaacaagggcacgtttcttctctgcctaggaatgcttcatctgggggacagaggggaaggtttcaatggaaaagggaacttattatttaaccaggtccctactacatggtggccaacccttttcaaatgactcctctca

SEQ ID NO: 734468 - DNA, 455 bp, Homo sapiens; identical to SEQ ID NO: 728887

SEQ ID NO: 734469 - DNA, 623 bp, Homo sapiens
atgttcttttatggaacaaatcagattaatactaatgttaaggagagctttaaaggagaaagagaatcaataaatcacagcctgaaagttgtgtatgttgtgtgcaagctcagaggggcagtcttcttcaatttgccttgtgctggtgaattgcttgaatgaacttcggtatttcttaacaccaggtactggagcccaccttctttctctccctctggtttcctctttaaatcacagcctgaccccagtctttatagtccattgtaagtggaagttatagctctattcttcacccacaccttgctccctatcattgatacttagaagaaagtaacaatttgcagtactggctgaactcctttgggaaagtttctggagtgtatcaaataagaattcatcatagtaacatggtcgttactggctgaacaaaattctttttgagactattgtacttagtcattaaataattgtttactaaggcaattttcatgtttctggaattcagtgtaatagttaacagctgtatatgtctcacaaaaggaaactacttaggttggaaacaatggaaggttgtgtataattaattcaatcaggtcatgaatatttatgtaacatatggcatt

SEQ ID NO: 734470 - DNA, 569 bp, Homo sapiens
atgttcttttatggaacaaatcagattaatactaatgttaaggagagctttaaaggagaaagagaatcaataaatcacagcctgaaagttgtgtatgttgtgtgcaagctcagaggggcagtcttcttcaatttgccttgtgctggtgaattgcttgaatgaacttcggtatttcttaacaccaggtactggagcccaccttctttctctccctctggtttcctctttaaatcacagcctgaccccagtctttatagtccattgtaagtggaagttatagctctattcttcacccacaccttgctccctatcattgatacttagaagaaagtaacaatttgcagtactggctgaactcctttgggaaagtttctggagtgtatcaaataagaattcatcatagtaacatggtcgttactggctgaacaattttcatgtttctggaattcagtgtaatagttaacagctgtatatgtctcacaaaaggaaactacttaggttggaaacaatggaaggttgtgtataattaattcaatcaggtcatgaatatttatgtaacatatggcatt

SEQ ID NO: 734471 - DNA, 592 bp, Homo sapiens
caatgtaagtcagattatgttgctcctctgcttggaaccttccaatgactccctctgaactctttttctcagagtaaaagctcccgtctttccaagtcctatgcagaaatcttgtattgtctggatctgctcctgttacctctctgacgacactctcccatgctcactctgctccagccacactggcctcgctcttcctttagcataccacatgtgctttgccttggtggcttcttctgcctgtactgctcttcctccagatattcaaatggcttactctttgacctcctttgagtgtttgttcaaatgcctctatctcaattaggccactttgatcacccatttaattacaacccacacctcacaggtaatccccagccctcttaccctgttttcttcatagcactcatactgtactatactatgtaatttacctatttattatgcttcctatcaagtttctttctcctaggatgtaagctaatgaaagcagagattattgtctcatttcctggtgtacccccagcacctagaacactgtttggcacatggtagaggctcaataaacatttgttgggcgaatacatgaacg

SEQ ID NO: 734472 - DNA, 451 bp, Homo sapiens; identical to SEQ ID NO: 728888

SEQ ID NO: 734473 - DNA, 693 bp, Homo sapiens
agggagctgcagccacccgcgtgcggcacgcgccggccgcctgcccggatcgcggccaccagtgccgcggcctctcgactcccgccccgccgagccgcgcgcgcgactgccatcctcctcaattgctttttacgattttttttgtgcatgcattcattttctgttccgttttgtcctttttaaggcggtggcggcggcgacagcggcgtaagctcgcagcggggagggggcggccggaggatgcggcgcggggctgcgctcgctacgtccgctgctgctgcccggctcgggcctgagcgccgagcaggatcccaagtgatggtggtttcctcggagggcgagctgagtcctgcgcgactggttagcacggtggagctggtagccacgcctgctggctggcgtgcgtgaacaggtgtggaccgcaggatctcagcactctgacccaaggggaagcatgtcgaagaaaggccggagcaagggcgagaagcccgagatggagacggacgcggtgcagatggccaacgaggagctgcgggccaagctgaccagcattcagatcgagttccagcaggaaaaaagcaaggtgggcaaactgcgcgagcggctgcaggaggcgaagctggagcgcgagcaggagcagcgacggcacacggcctacatttcggagctcaaggccaagctgcatgaggagaa

SEQ ID NO: 734474 - DNA, 2069 bp, Homo sapiens
agggagctgcagccacccgcgtgcggcacgcgccggccgcctgcccggatcgcggccaccagtgccgcggcctctcgactcccgccccgccgagccgcgcgcgcgactgccatcctcctcaattgctttttacgattttttttgtgcatgcattcattttctgttccgttttgtcctttttaaggcggtggcggcggcgacagcggcgtaagctcgcagcggggagggggcggccggaggatgcggcgcggggctgcgctcgctacgtccgctgctgctgcccggctcgggcctgagcgccgagcaggatcccaagtgatggtggtttcctcggagggcgagctgagtcctgcgcgactggttagcacggtggagctggtagccacgcctgctggctggcgtgcgtgaacaggtgtggaccgcaggatctcagcactctgacccaaggggaagcatgtcgaagaaaggccggagcaagggcgagaagcccgagatggagacggacgcggtgcagatggccaacgaggagctgcgggccaagctgaccagcattcagatcgagttccagcaggaaaaaagcaagatggatgagatcaaagggaaagaccgtgtgattctggccttggagaaggaacttggcgtgcaggctgggcagacccagaagctgcttctgcagaaagaggctttggatgagcagctggttcaggtcaaggaggccgagcggcaccacagtagtccaaagagagagctcccgcccgggatcggggacatggtggagctcatgggcgtccaggatcaacatatggacgagcgagatgtgaggcgatttcaactaaaaattgctgaactgaattcagtgatacggaagctggaagacagaaatacgctgttggcagatgagaggaatgaactgctgaaacgctcacgagagaccgaggttcagctgaagcccctggtggagaagaacaagcggatgaacaagaagaatgaggatctgttgcagagtatccagaggatggaggagaaaatcaagaacctcacgcgggaaaacgtggaaatgaaagaaaagctgtcagcgcaggcgtctctgaagcggcatacctccttgaatgacctcagcctgacgagggatgagcaggagatcgagttcctgaggctgcaggtgctggagcagcagcacgtcattgacgacctctcactggagagagaacggctgttgcgctccaaaaggcatcgagggaaaagtctgaaaccgcccaagaagcatgttgtggagacattttttggatttgatgaggagtctgtggactcagaaacgttgtccgaaacatcctacaacacagacaggacagacaggaccccagccacgcccgaagaagacttggacgatgccacagcccgagaggaggctgacctgcgcttctgccagctgacccgggagtaccaggccctgcaacgcgcctacgccctgctccaggagcaggtgggaggcacgctggacgctgagagggaggcccggactcgggagcagctacaagctgatctgctgaggtgtcaggccaaaatcgaagatttggagaagttactggttgagaagggacaggattccaagtgggttgaagagaagcagctgctcatcagaacaaaccaagacttgctggaaaagatttacagactggaaatggaagagaaccagctgaagaatgaaatgcaagacgccaaggatcagaacgagctgttagaattcagagtgctagaactcgaagtaagagactctatctgttgtaaactctcaaacggagcagacattctctttgaacccaaactgaaattcatgtaaagctctcagatgttttcaagcatgtgtaaaggggacatgttatagtttctttctttctttctttctttttttttttaaatctgtatgttcagaataatttcactgccttaatgtgttctggagagcgtgctcacccaagtctatggacatgtaccagagctaatatatttattgcctatggcttgttttgcacttaataaaataatttgtttttgcaataaaaaaaatt

SEQ ID NO: 734475 - DNA, 1631 bp, Homo sapiens
agggagctgcagccacccgcgtgcggcacgcgccggccgcctgcccggatcgcggccaccagtgccgcggcctctcgactcccgccccgccgagccgcgcgcgcgactgccatcctcctcaattgctttttacgattttttttgtgcatgcattcattttctgttccgttttgtcctttttaaggcggtggcggcggcgacagcggcgtaagctcgcagcggggagggggcggccggaggatgcggcgcggggctgcgctcgctacgtccgctgctgctgcccggctcgggcctgagcgccgagcaggatcccaagtgatggtggtttcctcggagggcgagctgagtcctgcgcgactggttagcacggtggagctggtagccacgcctgctggctggcgtgcgtgaacaggtgtggaccgcaggatctcagcactctgacccaaggggaagcatgtcgaagaaaggccggagcaagggcgagaagcccgagatggagacggacgcggtgcagatggccaacgaggagctgcgggccaagctgaccagcattcagatcgagttccagcaggaaaaaagcaagatggatgagatcaaagggaaagaccgtgtgattctggccttggagaaggaacttggcgtgcaggctgggcagacccagaagctgcttctgcagaaagaggctttggatgagcagctggttcaggtcaaggaggccgagcggcaccacagtagtccaaagagagagctcccgcccgggatcggggacatggtggagctcatgggcgtccaggatcaacatatggacgagcgagatgtgaggcgatttcaactaaaaattgctgaactgaattcagtgatacggaagctggaagacagaaatacgctgttggcagatgagaggaatgaactgctgaaacgctcacgagagaccgaggttcagctgaagcccctggtggagaagaacaagcggatgaacaagaagaatgaggatctgttgcagagtatccagaggatggaggagaaaatcaagaacctcacgcgggaaaacgtggaaatgaaagaaaagctgtcagcgcaggcgtctctgaagcggcatacctccttgaatgacctcagcctgacgagggatgagcaggagatcgagttcctgaggctgcaggtgctggagcagcagcacgtcattgacgacctctcactggagagagaacggctgttgcgctccaaaaggcatcgagggaaaagtctgaaaccgcccaagaagaatgaaatgcaagacgccaaggatcagaacgagctgttagaattcagagtgctagaactcgaagtaagagactctatctgttgtaaactctcaaacggagcagacattctctttgaacccaaactgaaattcatgtaaagctctcagatgttttcaagcatgtgtaaaggggacatgttatagtttctttctttctttctttctttttttttttaaatctgtatgttcagaataatttcactgccttaatgtgttctggagagcgtgctcacccaagtctatggacatgtaccagagctaatatatttattgcctatggcttgttttgcacttaataaaataatttgtttttgcaataaaaaaaatt

SEQ ID NO: 734476 - DNA, 397 bp, Homo sapiens
  misc_feature (46)..(46): n is a, c, g, or t
  misc_feature (379)..(379): n is a, c, g, or t
aagacagccaagcagtgcaccatggagatggccaccggggaggtgnacgtgcccctcgtgtccatcttcaagcaaaagcgcgtcaaaggctggtggcccctcctggcccgcaatgagaacgatgagtttgagctcacgggcaaggtggaggctgagctgcatttactgacagcagaggaggcagagaagaacccagtgggcctggcccgcaatgaacctgaccccctagagaaacccaaccggcccgacacgagcttcatctggttcctgaaccctctcaagtcggctcgctacttcttgtgggcacacgtatcgctggctgctcctcaaactgttgctgctcctgctgcttgttcctccttcttgccctgttcctctnatttgttgcctgggttac

SEQ ID NO: 734477 - DNA, 510 bp, Homo sapiens; identical to SEQ ID NO: 506278
  misc_feature (459)..(459): n is a, c, g, or t
  misc_feature (469)..(469): n is a, c, g, or t
  misc_feature (495)..(495): n is a, c, g, or t

SEQ ID NO: 734478 - DNA, 468 bp, Homo sapiens; identical to SEQ ID NO: 506280
  misc_feature (337)..(337): n is a, c, g, or t
  misc_feature (453)..(453): n is a, c, g, or t
  misc_feature (458)..(458): n is a, c, g, or t

SEQ ID NO: 734479 - DNA, 2186 bp, Homo sapiens; identical to SEQ ID NO: 348995

SEQ ID NO: 734480 - DNA, 824 bp, Homo sapiens; identical to SEQ ID NO: 349001

SEQ ID NO: 734481 - DNA, 2387 bp, Homo sapiens
  misc_feature (2364)..(2364): n is a, c, g, or t
  misc_feature (2368)..(2368): n is a, c, g, or t
  misc_feature (2370)..(2371): n is a, c, g, or t
  misc_feature (2375)..(2376): n is a, c, g, or t
  misc_feature (2381)..(2383): n is a, c, g, or t
  misc_feature (2385)..(2385): n is a, c, g, or t
  misc_feature (2387)..(2387): n is a, c, g, or t
gatgtccaaacggagttggtgggctggatccagaaagcccccaagagagatgctgaaactctcaggctctgactccagccaaagcatgaatggccttgaagtggctcccccaggtctgatcaccaacttctccctggccacggcagagcaatgtggccaggagacgccactggagaacatgctgttcgcctccttctaccttctggattttatcctggctttagttggcaataccctggctctgtggcttttcatccgagaccacaagtccgggaccccggccaacgtgttcctgatgcatctggccgtggccgacttgtcgtgcgtgctggtcctgcccacccgcctggtctaccacttctctgggaaccactggccatttggggaaatcgcatgccgtctcaccggcttcctcttctacctcaacatgtacgccagcatctacttcctcacctgcatcagcgccgaccgtttcctggccattgtgcacccggtcaagtccctcaagctccgcaggcccctctacgcacacctggcctgtgccttcctgtgggtggtggtggctgtggccatggccccgctgctggtgagcccacagaccgtgcagaccaaccacacggtggtctgcctgcagctgtaccgggagaaggcctcccaccatgccctggtgtccctggcagtggccttcaccttcccgttcatcaccacggtcacctgctacctgctgatcatccgcagcctgcggcagggcctgcgtgtggagaagcgcctcaagaccaaggcagtgcgcatgatcgccatagtgctggccatcttcctggtctgcttcgtgccctaccacgtcaaccgctccgtctacgtgctgcactaccgcagccatggggcctcctgcgccacccagcgcatcctggccctggcaaaccgcatcacctcctgcctcaccagcctcaacggggcactcgaccccatcatgtatttcttcgtggctgagaagttccgccacgccctgtgcaacttgctctgtggcaaaaggctcaagggcccgccccccagcttcgaagggaaaaccaacgagagctcgctgagtgccaagtcagagctgtgagcggggggcgccgtccaggccgagcgcagactgtttaggactcagcagacccagcaagaggcatctgccctttccccagccacctccccagcaagcaacctgaaatctcagcagatgcccaccatttctctagatcgcctagtctcaacccataaaaaggaagaactgacaaaggggatccatcggccacccctctgcaggggcttgtgatggctacaatggctcctagacactcaacgacttcatctgtggcagggagagaggaggccggaagaacaacccctgaacaatggaggcctttctttcccgctaggctcccagcctccttcccgctacagaatcgctcatcggcgaggctcagcagaaagaccctgaaggcaggctgcaaatgacccagaagagggacctgggagtcctggtggggacggggagggagtctcaatactcctttgcagtgcaaggtactctgagtcccctctgtagtgcctctgccagacacacactgcctgagttgaagagacacaggccacacatttcaggctggttgccagcggacgtcagcactcacggcctgcagggactcagcacagctctggattctggatctctcctgctgtaaccccacgcacaagcctgcaacccccagagctctttgacaggctcccaggcctcccagtcctggacaagcatgtgcagtcacgggagctcagctcaggccagggctgggctgtgcacctgcctcccactgacccagacccacttcctccagagaggcctctctccgcctgagctatttcccttgctagtgtgcagatatttccctaacatgtccttttttgtatttgtttgtacggaccataaatataactgtagctttaagactacacaggttgttatgtttggtcaacatgaagcgtttcccagaacttctctgacccaagaatggtgaagtggtggtacagtggcagaggcagcctcgtgggctctcttgctggggctctggcagctcacagcacatctgcccagattctgaggttctgcactgtggggctgggagggccaagtaggggcctcattcctcactctagctgccaccctgcaccgtccttacggcaatatgcttttgtagcatgtttgactttccaaaacgtttccagcatctttcagatttccccaaccagcccttggggcagtggccctgtgcaaaccttggctcaggaaggagattgggctcgctccacacaccctgtcggcgacgntgcngnncagnncgagnnncngn

SEQ ID NO: 734482 - DNA, 1742 bp, Homo sapiens
gatgtccaaacggagttggtgggctggatccagaaagcccccaagagagatgctgaaactctcaggctctgactccagccaaagcatgaatggccttgaagtggctcccccaggtctgatcaccaacttctccctggccacggcagagcaatgtggccaggagacgccactggagaacatgctgttcgcctccttctaccttctggattttatcctggctttagttggcaataccctggctctgtggcttttcatccgagaccacaagtccgggaccccggccaacgtgttcctgatgcatctggccgtggccgacttgtcgtgcgtgctggtcctgcccacccgcctggtctaccacttctctgggaaccactggccatttggggaaatcgcatgccgtctcaccggcttcctcttctacctcaacatgtacgccagcatctacttcctcacctgcatcagcgccgaccgtttcctggccattgtgcacccggtcaagtccctcaagctccgcaggcccctctacgcacacctggcctgtgccttcctgtgggtggtggtggctgtggccatggccccgctgctggtgagcccacagaccgtgcagaccaaccacacggtggtctgcctgcagctgtaccgggagaaggcctcccaccatgccctggtgtccctggcagtggccttcaccttcccgttcatcaccacggtcacctgctacctgctgatcatccgcagcctgcggcagggcctgcgtgtggagaagcgcctcaagaccaaggcagtgcgcatgatcgccatagtgctggccatcttcctggtctgcttcgtgccctaccacgtcaaccgctccgtctacgtgctgcactaccgcagccatggggcctcctgcgccacccagcgcatcctggccctggcaaaccgcatcacctcctgcctcaccagcctcaacggggcactcgaccccatcatgtatttcttcgtggctgagaagttccgccacgccctgtgcaacttgctctgtggcaaaaggctcaagggcccgccccccagcttcgaagggaaaaccaacgagagctcgctgagtgccaagtcagagctgtgagcggggggcgccgtccaggccgagcgcagactgtttaggactcagcagacccagcaagaggcatctgccctttccccagccacctccccagcaagcaacctgaaatctcagcagatgcccaccatttctctagatcgcctagtctcaacccataaaaaggaagaactgacaaaggggatccatcggccacccctctgcaggggcttgtgatggctacaatggctcctagacactcaacgacttcatctgtggcagggagagaggaggccggaagaacaacccctgaacaatggaggcctttctttcccgctaggctcccagcctccttcccgctacagaatcgctcatcggcgaggctcagcagaaagaccctgaaggcaggctgcaaatgacccagaagagggacctgggagtcctggtggggacggggagggagtctcaatactcctttgcagtgcaaggtactctgagtcccctctgtagtgcctctgccagacactgacccagacccacttcctccagagaggcctctctccgcctgagctatttcccttgctagtgtgcagatatttccctaacatgtccttttttgtatttgtttgtacggaccataaatataactgtagctttaagacta

SEQ ID NO: 734483 - DNA, 2584 bp, Homo sapiens; identical to SEQ ID NO: 349003
  misc_feature (2561)..(2561): n is a, c, g, or t
  misc_feature (2565)..(2565): n is a, c, g, or t
  misc_feature (2567)..(2568): n is a, c, g, or t
  misc_feature (2572)..(2573): n is a, c, g, or t
  misc_feature (2578)..(2580): n is a, c, g, or t
  misc_feature (2582)..(2582): n is a, c, g, or t
  misc_feature (2584)..(2584): n is a, c, g, or t

SEQ ID NO: 734484 - DNA, 1939 bp, Homo sapiens; identical to SEQ ID NO: 348997

SEQ ID NO: 734485 - DNA, 2195 bp, Homo sapiens
aggagcagcccgacacaacaagggacccctcaggaatgaagcagcctttcagggccagaggggctgtggtctcccttcctctccttaaatagccagcgttccacccacagcggcaaggagccccctgccaccaccgacacccacgggcggagatcacctgctgccccgcagacccctgtcccttcctcccggaccagcagctagaggatgtccaaacggagttggtgggctggatccagaaagcccccaagagagatgctgaaactctcaggctctgactccagccaaagcatgaatggccttgaagtggctcccccaggtctgatcaccaacttctccctggccacggcagagcaatgtggccaggagacgccactggagaacatgctgttcgcctccttctaccttctggattttatcctggctttagttggcaataccctggctctgtggcttttcatccgagaccacaagtccgggaccccggccaacgtgttcctgatgcatctggccgtggccgacttgtcgtgcgtgctggtcctgcccacccgcctggtctaccacttctctgggaaccactggccatttggggaaatcgcatgccgtctcaccggcttcctcttctacctcaacatgtacgccagcatctacttcctcacctgcatcagcgccgaccgtttcctggccattgtgcacccggtcaagtccctcaagctccgcaggcccctctacgcacacctggcctgtgccttcctgtgggtggtggtggctgtggccatggccccgctgctggtgagcccacagaccgtgcagaccaaccacacggtggtctgcctgcagctgtaccgggagaaggcctcccaccatgccctggtgtccctggcagtggccttcaccttcccgttcatcaccacggtcacctgctacctgctgatcatccgcagcctgcggcagggcctgcgtgtggagaagcgcctcaagaccaaggcagtgcgcatgatcgccatagtgctggccatcttcctggtctgcttcgtgccctaccacgtcaaccgctccgtctacgtgctgcactaccgcagccatggggcctcctgcgccacccagcgcatcctggccctggcaaaccgcatcacctcctgcctcaccagcctcaacggggcactcgaccccatcatgtatttcttcgtggctgagaagttccgccacgccctgtgcaacttgctctgtggcaaaaggctcaagggcccgccccccagcttcgaagggaaaaccaacgagagctcgctgagtgccaagtcagagctgtgagcggggggcgccgtccaggccgagcgcagactgtttaggactcagcagacccagcaagaggcatctgccctttccccagccacctccccagcaagcaacctgaaatctcagcagatgcccaccatttctctagatcgcctagtctcaacccataaaaaggaagaactgacaaaggggatccatcggccacccctctgcaggggcttgtgatggctacaatggctcctagacactcaacgacttcatctgtggcagggagagaggaggccggaagaacaacccctgaacaatggaggcctttctttcccgctaggctcccagcctccttcccgctacagaatcgctcatcggcgaggctcagcagaaagaccctgaaggcaggctgcaaatgacccagaagagggacctgggagtcctggtggggacggggagggagtctcaatactcctttgcagtgcaaggtactctgagtcccctctgtagtgcctctgccagacacacactgcctgagttgaagagacacaggccacacatttcaggctggttgccagcggacgtcagcactcacggcctgcagggactcagcacagctctggattctggatctctcctgctgtaaccccacgcacaagcctgcaacccccagagctctttgacaggctcccaggcctcccagtcctggacaagcatgtgcagtcacgggagctcagctcaggccagggctgggctgtgcacctgcctcccactgacccagacccacttcctccagagaggcctctctccgcctgagctatttcccttgctagtgtgcagatatttccctaacatgtccttttttgtatttgtttgtacggaccataaatataactgtagctttaagacta

SEQ ID NO: 734486 - DNA, 2757 bp, Homo sapiens
  misc_feature (2734)..(2734): n is a, c, g, or t
  misc_feature (2738)..(2738): n is a, c, g, or t
  misc_feature (2740)..(2741): n is a, c, g, or t
  misc_feature (2745)..(2746): n is a, c, g, or t
  misc_feature (2751)..(2753): n is a, c, g, or t
  misc_feature (2755)..(2755): n is a, c, g, or t
  misc_feature (2757)..(2757): n is a, c, g, or t
aggagcagcccgacacaacaagggacccctcaggaatgaagcagcctttcagggccagaggggctgtggtctcccttcctctccttaaatagccagcgttccacccacagcggcaaggagccccctgccaccaccgacacccacgggcggagatcacctgctgccccgcagacccctgtcccttcctcccggaccagcagctagagctctccgccctcaccgtggttttagcagtcctagggaaagtgccagccgagaccagccagaccaagtcagagtactgtggaacctggattcctggggaatggggtccccatgaggaactccacattggactaagaacagaccctgttcctggaagcagcaggaaaccatctctggtgttagaacttcaggcatcttgaaacactctgaagccgggggcaatcttttcaggctctgactccagccaaagcatgaatggccttgaagtggctcccccaggtctgatcaccaacttctccctggccacggcagagcaatgtggccaggagacgccactggagaacatgctgttcgcctccttctaccttctggattttatcctggctttagttggcaataccctggctctgtggcttttcatccgagaccacaagtccgggaccccggccaacgtgttcctgatgcatctggccgtggccgacttgtcgtgcgtgctggtcctgcccacccgcctggtctaccacttctctgggaaccactggccatttggggaaatcgcatgccgtctcaccggcttcctcttctacctcaacatgtacgccagcatctacttcctcacctgcatcagcgccgaccgtttcctggccattgtgcacccggtcaagtccctcaagctccgcaggcccctctacgcacacctggcctgtgccttcctgtgggtggtggtggctgtggccatggccccgctgctggtgagcccacagaccgtgcagaccaaccacacggtggtctgcctgcagctgtaccgggagaaggcctcccaccatgccctggtgtccctggcagtggccttcaccttcccgttcatcaccacggtcacctgctacctgctgatcatccgcagcctgcggcagggcctgcgtgtggagaagcgcctcaagaccaaggcagtgcgcatgatcgccatagtgctggccatcttcctggtctgcttcgtgccctaccacgtcaaccgctccgtctacgtgctgcactaccgcagccatggggcctcctgcgccacccagcgcatcctggccctggcaaaccgcatcacctcctgcctcaccagcctcaacggggcactcgaccccatcatgtatttcttcgtggctgagaagttccgccacgccctgtgcaacttgctctgtggcaaaaggctcaagggcccgccccccagcttcgaagggaaaaccaacgagagctcgctgagtgccaagtcagagctgtgagcggggggcgccgtccaggccgagcgcagactgtttaggactcagcagacccagcaagaggcatctgccctttccccagccacctccccagcaagcaacctgaaatctcagcagatgcccaccatttctctagatcgcctagtctcaacccataaaaaggaagaactgacaaaggggatccatcggccacccctctgcaggggcttgtgatggctacaatggctcctagacactcaacgacttcatctgtggcagggagagaggaggccggaagaacaacccctgaacaatggaggcctttctttcccgctaggctcccagcctccttcccgctacagaatcgctcatcggcgaggctcagcagaaagaccctgaaggcaggctgcaaatgacccagaagagggacctgggagtcctggtggggacggggagggagtctcaatactcctttgcagtgcaaggtactctgagtcccctctgtagtgcctctgccagacacacactgcctgagttgaagagacacaggccacacatttcaggctggttgccagcggacgtcagcactcacggcctgcagggactcagcacagctctggattctggatctctcctgctgtaaccccacgcacaagcctgcaacccccagagctctttgacaggctcccaggcctcccagtcctggacaagcatgtgcagtcacgggagctcagctcaggccagggctgggctgtgcacctgcctcccactgacccagacccacttcctccagagaggcctctctccgcctgagctatttcccttgctagtgtgcagatatttccctaacatgtccttttttgtatttgtttgtacggaccataaatataactgtagctttaagactacacaggttgttatgtttggtcaacatgaagcgtttcccagaacttctctgacccaagaatggtgaagtggtggtacagtggcagaggcagcctcgtgggctctcttgctggggctctggcagctcacagcacatctgcccagattctgaggttctgcactgtggggctgggagggccaagtaggggcctcattcctcactctagctgccaccctgcaccgtccttacggcaatatgcttttgtagcatgtttgactttccaaaacgtttccagcatctttcagatttccccaaccagcccttggggcagtggccctgtgcaaaccttggctcaggaaggagattgggctcgctccacacaccctgtcggcgacgntgcngnncagnncgagnnncngn

SEQ ID NO: 734487 - DNA, 997 bp, Homo sapiens
aggagcagcccgacacaacaagggacccctcaggaatgaagcagcctttcagggccagaggggctgtggtctcccttcctctccttaaatagccagcgttccacccacagcggcaaggagccccctgccaccaccgacacccacgggcggagatcacctgctgccccgcagacccctgtcccttcctcccggaccagcagctagagctctccgccctcaccgtggttttagcagtcctagggaaagtgccagccgagaccagccagaccaagtcagagtactgtggaacctggattcctggggaatggggtccccatgaggaactccacattggactaagaacagaccctgttcctggaagcagcaggaaaccatctctggtgttagaacttcaggcatcttgaaacactctgaagccgggggcaatcttttcaggctctgactccagccaaagcatgaatggccttgaagtggctcccccaggtctgatcaccaacttctccctggccacggcagagcaatgtggccaggagacgccactggagaacatgctgttcgcctccttctaccttctggattttatcctggctttagttggcaataccctggctctgtggcttttcatccgagaccacaagtccgggaccccggccaacgtgttcctgatgcatctggccgtggccgacttgtcgtgcgtgctggtcctgcccacccgcctggtctaccacttctctgggaaccactggccatttggggaaatcgcatgccgtctcaccggcttcctcttctacctcaacatgtacgccagcatctacttcctcacctgcatcagcgccgaccgtttcctggccattgtgcacccggtcaagtccctcaagctccgcaggcctctctccgcctgagctatttcccttgctagtgtgcagatatttccctaacatgtccttttttgtatttgtttgtacggaccataaatataactgtagctttaagacta

SEQ ID NO: 734488 - DNA, 2112 bp, Homo sapiens
aggagcagcccgacacaacaagggacccctcaggaatgaagcagcctttcagggccagaggggctgtggtctcccttcctctccttaaatagccagcgttccacccacagcggcaaggagccccctgccaccaccgacacccacgggcggagatcacctgctgccccgcagacccctgtcccttcctcccggaccagcagctagagctctccgccctcaccgtggttttagcagtcctagggaaagtgccagccgagaccagccagaccaagtcagagtactgtggaacctggattcctggggaatggggtccccatgaggaactccacattggactaagaacagaccctgttcctggaagcagcaggaaaccatctctggtgttagaacttcaggcatcttgaaacactctgaagccgggggcaatcttttcaggctctgactccagccaaagcatgaatggccttgaagtggctcccccaggtctgatcaccaacttctccctggccacggcagagcaatgtggccaggagacgccactggagaacatgctgttcgcctccttctaccttctggattttatcctggctttagttggcaataccctggctctgtggcttttcatccgagaccacaagtccgggaccccggccaacgtgttcctgatgcatctggccgtggccgacttgtcgtgcgtgctggtcctgcccacccgcctggtctaccacttctctgggaaccactggccatttggggaaatcgcatgccgtctcaccggcttcctcttctacctcaacatgtacgccagcatctacttcctcacctgcatcagcgccgaccgtttcctggccattgtgcacccggtcaagtccctcaagctccgcaggcccctctacgcacacctggcctgtgccttcctgtgggtggtggtggctgtggccatggccccgctgctggtgagcccacagaccgtgcagaccaaccacacggtggtctgcctgcagctgtaccgggagaaggcctcccaccatgccctggtgtccctggcagtggccttcaccttcccgttcatcaccacggtcacctgctacctgctgatcatccgcagcctgcggcagggcctgcgtgtggagaagcgcctcaagaccaaggcagtgcgcatgatcgccatagtgctggccatcttcctggtctgcttcgtgccctaccacgtcaaccgctccgtctacgtgctgcactaccgcagccatggggcctcctgcgccacccagcgcatcctggccctggcaaaccgcatcacctcctgcctcaccagcctcaacggggcactcgaccccatcatgtatttcttcgtggctgagaagttccgccacgccctgtgcaacttgctctgtggcaaaaggctcaagggcccgccccccagcttcgaagggaaaaccaacgagagctcgctgagtgccaagtcagagctgtgagcggggggcgccgtccaggccgagcgcagactgtttaggactcagcagacccagcaagaggcatctgccctttccccagccacctccccagcaagcaacctgaaatctcagcagatgcccaccatttctctagatcgcctagtctcaacccataaaaaggaagaactgacaaaggggatccatcggccacccctctgcaggggcttgtgatggctacaatggctcctagacactcaacgacttcatctgtggcagggagagaggaggccggaagaacaacccctgaacaatggaggcctttctttcccgctaggctcccagcctccttcccgctacagaatcgctcatcggcgaggctcagcagaaagaccctgaaggcaggctgcaaatgacccagaagagggacctgggagtcctggtggggacggggagggagtctcaatactcctttgcagtgcaaggtactctgagtcccctctgtagtgcctctgccagacactgacccagacccacttcctccagagaggcctctctccgcctgagctatttcccttgctagtgtgcagatatttccctaacatgtccttttttgtatttgtttgtacggaccataaatataactgtagctttaagacta

SEQ ID NO: 734489 - DNA, 2359 bp, Homo sapiens
aggagcagcccgacacaacaagggacccctcaggaatgaagcagcctttcagggccagaggggctgtggtctcccttcctctccttaaatagccagcgttccacccacagcggcaaggagccccctgccaccaccgacacccacgggcggagatcacctgctgccccgcagacccctgtcccttcctcccggaccagcagctagagctctccgccctcaccgtggttttagcagtcctagggaaagtgccagccgagaccagccagaccaagtcagagtactgtggaacctggattcctggggaatggggtccccatgaggaactccacattggactaagaacagaccctgttcctggaagcagcaggaaaccatctctggtgttagaacttcaggcatcttgaaacactctgaagccgggggcaatcttttcaggctctgactccagccaaagcatgaatggccttgaagtggctcccccaggtctgatcaccaacttctccctggccacggcagagcaatgtggccaggagacgccactggagaacatgctgttcgcctccttctaccttctggattttatcctggctttagttggcaataccctggctctgtggcttttcatccgagaccacaagtccgggaccccggccaacgtgttcctgatgcatctggccgtggccgacttgtcgtgcgtgctggtcctgcccacccgcctggtctaccacttctctgggaaccactggccatttggggaaatcgcatgccgtctcaccggcttcctcttctacctcaacatgtacgccagcatctacttcctcacctgcatcagcgccgaccgtttcctggccattgtgcacccggtcaagtccctcaagctccgcaggcccctctacgcacacctggcctgtgccttcctgtgggtggtggtggctgtggccatggccccgctgctggtgagcccacagaccgtgcagaccaaccacacggtggtctgcctgcagctgtaccgggagaaggcctcccaccatgccctggtgtccctggcagtggccttcaccttcccgttcatcaccacggtcacctgctacctgctgatcatccgcagcctgcggcagggcctgcgtgtggagaagcgcctcaagaccaaggcagtgcgcatgatcgccatagtgctggccatcttcctggtctgcttcgtgccctaccacgtcaaccgctccgtctacgtgctgcactaccgcagccatggggcctcctgcgccacccagcgcatcctggccctggcaaaccgcatcacctcctgcctcaccagcctcaacggggcactcgaccccatcatgtatttcttcgtggctgagaagttccgccacgccctgtgcaacttgctctgtggcaaaaggctcaagggcccgccccccagcttcgaagggaaaaccaacgagagctcgctgagtgccaagtcagagctgtgagcggggggcgccgtccaggccgagcgcagactgtttaggactcagcagacccagcaagaggcatctgccctttccccagccacctccccagcaagcaacctgaaatctcagcagatgcccaccatttctctagatcgcctagtctcaacccataaaaaggaagaactgacaaaggggatccatcggccacccctctgcaggggcttgtgatggctacaatggctcctagacactcaacgacttcatctgtggcagggagagaggaggccggaagaacaacccctgaacaatggaggcctttctttcccgctaggctcccagcctccttcccgctacagaatcgctcatcggcgaggctcagcagaaagaccctgaaggcaggctgcaaatgacccagaagagggacctgggagtcctggtggggacggggagggagtctcaatactcctttgcagtgcaaggtactctgagtcccctctgtagtgcctctgccagacacacactgcctgagttgaagagacacaggccacacatttcaggctggttgccagcggacgtcagcactcacggcctgcagggactcagcacagctctggattctggatctctcctgctgtaaccccacgcacaagcctgcaacccccagagctctttgacaggctcccaggcctcccagtcctggacaagcatgtgcagtcacgggagctcagctcaggccagggctgggctgtgcacctgcctcccactgacccagacccacttcctccagagaggcctctctccgcctgagctatttcccttgctagtgtgcagatatttccctaacatgtccttttttgtatttgtttgtacggaccataaatataactgtagctttaagacta

SEQ ID NO: 734490 - DNA, 2500 bp, Homo sapiens
gatgtccaaacggagttggtgggctggatccagaaagcccccaagagagatgctgaaactctcaggctctgactccagccaaagcatgaatggccttgaagtggctcccccaggtctgatcaccaacttctccctggccacggcagagcaatgtggccaggagacgccactggagaacatgctgttcgcctccttctaccttctggattttatcctggctttagttggcaataccctggctctgtggcttttcatccgagaccacaagtccgggaccccggccaacgtgttcctgatgcatctggccgtggccgacttgtcgtgcgtgctggtcctgcccacccgcctggtctaccacttctctgggaaccactggccatttggggaaatcgcatgccgtctcaccggcttcctcttctacctcaacatgtacgccagcatctacttcctcacctgcatcagcgccgaccgtttcctggccattgtgcacccggtcaagtccctcaagctccgcaggcccctctacgcacacctggcctgtgccttcctgtgggtggtggtggctgtggccatggccccgctgctggtgagcccacagaccgtgcagaccaaccacacggtggtctgcctgcagctgtaccgggagaaggcctcccaccatgccctggtgtccctggcagtggccttcaccttcccgttcatcaccacggtcacctgctacctgctgatcatccgcagcctgcggcagggcctgcgtgtggagaagcgcctcaagaccaaggcagtgcgcatgatcgccatagtgctggccatcttcctggtctgcttcgtgccctaccacgtcaaccgctccgtctacgtgctgcactaccgcagccatggggcctcctgcgccacccagcgcatcctggccctggcaaaccgcatcacctcctgcctcaccagcctcaacggggcactcgaccccatcatgtatttcttcgtggctgagaagttccgccacgccctgtgcaacttgctctgtggcaaaaggctcaagggcccgccccccagcttcgaagggaaaaccaacgagagctcgctgagtgccaagtcagagctgtgagcggggggcgccgtccaggccgagcgcagactgtttaggactcagcagacccagcaagaggcatctgccctttccccagccacctccccagcaagcaacctgaaatctcagcagatgcccaccatttctctagatcgcctagtctcaacccataaaaaggaagaactgacaaaggggatccatcggccacccctctgcaggggcttgtgatggctacaatggctcctagacactcaacgacttcatctgtggcagggagagaggaggccggaagaacaacccctgaacaatggaggcctttctttcccgctaggctcccagcctccttcccgctacagaatcgctcatcggcgaggctcagcagaaagaccctgaaggcaggctgcaaatgacccagaagagggacctgggagtcctggtggggacggggagggagtctcaatactcctttgcagtgcaaggtactctgagtcccctctgtagtgcctctgccagacacacactgcctgagttgaagagacacaggccacacatttcaggctggttgccagcggacgtcagcactcacggcctgcagggactcagcacagctctggattctggatctctcctgctgtaaccccacgcacaagcctgcaacccccagagctctttgacaggctcccaggcctcccagtcctggacaagcatgtgcagtcacgggagctcagctcaggccagggctgggctgtgcacctgcctcccactgacccagacccacttcctccagagaggcctctctccgcctgagctatttcccttgctagtgtgcagatatttccctaacatgtccttttttgtatttgtttgtacggaccataaatataactgtagctttaagactacacaggttgttatgtttggtcaacatgaagcgtttcccagaacttctctgacccaagaatggtgaagtggtggtacagtggcagaggcagcctcgtgggctctcttgctggggctctggcagctcacagcacatctgcccagattctgaggttctgcactgtggggctgggagggccaagtaggggcctcattcctcactctagctgccacccctgttggtccggagaacaggctgggggcgaggcggttttaagccaggagggatgagatccagtctgaagtgtagtgtcacttggtcctatttcgtataccttctctgtgggagtatccagctctctcagaggccatgaagacccgggtataggagacagaaggaagggaacgcaggaagggcctgggcacggggaagtgggaagagctcagggctgcggccagcaggagccagtgtgcacaccctccaggcggcagctgccagcgagggcccctgtgctggccacaagcggggccaaa

SEQ ID NO: 734491 - DNA, 1460 bp, Homo sapiens
tccagacacatgtgccatttagggctctaggattctgtctgcaagggcagccatgagggccgggcacggagccccagacgactccccatggagagacagggagcagaaccacaggaactcagggtcccgggtgccagaaggggggcgtttctgcacctcagcagctgtggtgagggctgctgaggggtcaagaggaggtgtgggtccctgggcagatgaggccagggtagcacacgcgaggggcagcgggtgtgctgggagaagccggggaggaaggcccagcagtgtttttaacccagctccccagcccagtccttcagaaaggacgagagatgggtagcacacaggaggggtggcaggtgtgccgggaagggctgtggcccagtcctctctggcccaacacggccacctcacctgccggcattcttcacaaagcccaggtcagccagctccacatcacacagctcgcagcggaagcagcccgggtgccagttgttgttcatggccttgatgacgcggccaatgatgaactcacctggaagaagacaggtccctgctggctggggagcacgtgcctgtcccctcttcggaccctcccaagccctgtccacctagcactccgcctgctctctgcctggcccatgggctccctcgtgggatggtgatgcctgtagggggcctgacggctgccgctcagagaggcaaggtggggagttaggaaagagctgggccagttctgtgtaccccctcggccccctgccccccgccactgctgcccacttcccaggcagcccaggatgtgtactgtcaccggccttaccgcaggatccacagcacggagcaaacagcatttggaagtcgtgttcgcagtacttccggccttcaaactgcaaaggggtcgcagagagaggacaagcaaaccacctatcatccccatgagcagcccaggcccttgttgggtcaggacctgacagcaggggatgaggcactgaggcaggggcatgccgggctgaggctggagcagtgggtcccaggcctggccagagaggacactggcccttttgggatggtggggtgcaaagggaggtgcccccgtggaagctggagaggtccgtgaggccacctgtcaaagggccactggtgtctactgaggatctggaccctgttggtccggagaacaggctgggggcgaggcggttttaagccaggagggatgagatccagtctgaagtgtagtgtcacttggtcctatttcgtataccttctctgtgggagtatccagctctctcagaggccatgaagacccgggtataggagacagaaggaagggaacgcaggaagggcctgggcacggggaagtgggaagagctcagggctgcggccagcaggagccagtgtgcacaccctccaggcggcagctgccagcgagggcccctgtgctggccacaagcggggccaaa

SEQ ID NO: 734492 - DNA, 2697 bp, Homo sapiens; identical to SEQ ID NO: 348996

SEQ ID NO: 734493 - DNA, 2870 bp, Homo sapiens
aggagcagcccgacacaacaagggacccctcaggaatgaagcagcctttcagggccagaggggctgtggtctcccttcctctccttaaatagccagcgttccacccacagcggcaaggagccccctgccaccaccgacacccacgggcggagatcacctgctgccccgcagacccctgtcccttcctcccggaccagcagctagagctctccgccctcaccgtggttttagcagtcctagggaaagtgccagccgagaccagccagaccaagtcagagtactgtggaacctggattcctggggaatggggtccccatgaggaactccacattggactaagaacagaccctgttcctggaagcagcaggaaaccatctctggtgttagaacttcaggcatcttgaaacactctgaagccgggggcaatcttttcaggctctgactccagccaaagcatgaatggccttgaagtggctcccccaggtctgatcaccaacttctccctggccacggcagagcaatgtggccaggagacgccactggagaacatgctgttcgcctccttctaccttctggattttatcctggctttagttggcaataccctggctctgtggcttttcatccgagaccacaagtccgggaccccggccaacgtgttcctgatgcatctggccgtggccgacttgtcgtgcgtgctggtcctgcccacccgcctggtctaccacttctctgggaaccactggccatttggggaaatcgcatgccgtctcaccggcttcctcttctacctcaacatgtacgccagcatctacttcctcacctgcatcagcgccgaccgtttcctggccattgtgcacccggtcaagtccctcaagctccgcaggcccctctacgcacacctggcctgtgccttcctgtgggtggtggtggctgtggccatggccccgctgctggtgagcccacagaccgtgcagaccaaccacacggtggtctgcctgcagctgtaccgggagaaggcctcccaccatgccctggtgtccctggcagtggccttcaccttcccgttcatcaccacggtcacctgctacctgctgatcatccgcagcctgcggcagggcctgcgtgtggagaagcgcctcaagaccaaggcagtgcgcatgatcgccatagtgctggccatcttcctggtctgcttcgtgccctaccacgtcaaccgctccgtctacgtgctgcactaccgcagccatggggcctcctgcgccacccagcgcatcctggccctggcaaaccgcatcacctcctgcctcaccagcctcaacggggcactcgaccccatcatgtatttcttcgtggctgagaagttccgccacgccctgtgcaacttgctctgtggcaaaaggctcaagggcccgccccccagcttcgaagggaaaaccaacgagagctcgctgagtgccaagtcagagctgtgagcggggggcgccgtccaggccgagcgcagactgtttaggactcagcagacccagcaagaggcatctgccctttccccagccacctccccagcaagcaacctgaaatctcagcagatgcccaccatttctctagatcgcctagtctcaacccataaaaaggaagaactgacaaaggggatccatcggccacccctctgcaggggcttgtgatggctacaatggctcctagacactcaacgacttcatctgtggcagggagagaggaggccggaagaacaacccctgaacaatggaggcctttctttcccgctaggctcccagcctccttcccgctacagaatcgctcatcggcgaggctcagcagaaagaccctgaaggcaggctgcaaatgacccagaagagggacctgggagtcctggtggggacggggagggagtctcaatactcctttgcagtgcaaggtactctgagtcccctctgtagtgcctctgccagacacacactgcctgagttgaagagacacaggccacacatttcaggctggttgccagcggacgtcagcactcacggcctgcagggactcagcacagctctggattctggatctctcctgctgtaaccccacgcacaagcctgcaacccccagagctctttgacaggctcccaggcctcccagtcctggacaagcatgtgcagtcacgggagctcagctcaggccagggctgggctgtgcacctgcctcccactgacccagacccacttcctccagagaggcctctctccgcctgagctatttcccttgctagtgtgcagatatttccctaacatgtccttttttgtatttgtttgtacggaccataaatataactgtagctttaagactacacaggttgttatgtttggtcaacatgaagcgtttcccagaacttctctgacccaagaatggtgaagtggtggtacagtggcagaggcagcctcgtgggctctcttgctggggctctggcagctcacagcacatctgcccagattctgaggttctgcactgtggggctgggagggccaagtaggggcctcattcctcactctagctgccacccctgttggtccggagaacaggctgggggcgaggcggttttaagccaggagggatgagatccagtctgaagtgtagtgtcacttggtcctatttcgtataccttctctgtgggagtatccagctctctcagaggccatgaagacccgggtataggagacagaaggaagggaacgcaggaagggcctgggcacggggaagtgggaagagctcagggctgcggccagcaggagccagtgtgcacaccctccaggcggcagctgccagcgagggcccctgtgctggccacaagcggggccaaa

SEQ ID NO: 734494 - DNA, 2732 bp, Homo sapiens
  misc_feature (2709)..(2709): n is a, c, g, or t
  misc_feature (2713)..(2713): n is a, c, g, or t
  misc_feature (2715)..(2716): n is a, c, g, or t
  misc_feature (2720)..(2721): n is a, c, g, or t
  misc_feature (2726)..(2728): n is a, c, g, or t
  misc_feature (2730)..(2730): n is a, c, g, or t
  misc_feature (2732)..(2732): n is a, c, g, or t
aggagcagcccgacacaacaagggacccctcaggaatgaagcagcctttcagggccagaggggctgtggtctcccttcctctccttaaatagccagcgttccacccacagcggcaaggagccccctgccaccaccgacacccacgggcggagatcacctgctgccccgcagacccctgtcccttcctcccggaccagcagctagagcagtcctagggaaagtgccagccgagaccagccagaccaagtcagagtactgtggaacctggattcctggggaatggggtccccatgaggaactccacattggactaagaacagaccctgttcctggaagcagcaggaaaccatctctggtgttagaacttcaggcatcttgaaacactctgaagccgggggcaatcttttcaggctctgactccagccaaagcatgaatggccttgaagtggctcccccaggtctgatcaccaacttctccctggccacggcagagcaatgtggccaggagacgccactggagaacatgctgttcgcctccttctaccttctggattttatcctggctttagttggcaataccctggctctgtggcttttcatccgagaccacaagtccgggaccccggccaacgtgttcctgatgcatctggccgtggccgacttgtcgtgcgtgctggtcctgcccacccgcctggtctaccacttctctgggaaccactggccatttggggaaatcgcatgccgtctcaccggcttcctcttctacctcaacatgtacgccagcatctacttcctcacctgcatcagcgccgaccgtttcctggccattgtgcacccggtcaagtccctcaagctccgcaggcccctctacgcacacctggcctgtgccttcctgtgggtggtggtggctgtggccatggccccgctgctggtgagcccacagaccgtgcagaccaaccacacggtggtctgcctgcagctgtaccgggagaaggcctcccaccatgccctggtgtccctggcagtggccttcaccttcccgttcatcaccacggtcacctgctacctgctgatcatccgcagcctgcggcagggcctgcgtgtggagaagcgcctcaagaccaaggcagtgcgcatgatcgccatagtgctggccatcttcctggtctgcttcgtgccctaccacgtcaaccgctccgtctacgtgctgcactaccgcagccatggggcctcctgcgccacccagcgcatcctggccctggcaaaccgcatcacctcctgcctcaccagcctcaacggggcactcgaccccatcatgtatttcttcgtggctgagaagttccgccacgccctgtgcaacttgctctgtggcaaaaggctcaagggcccgccccccagcttcgaagggaaaaccaacgagagctcgctgagtgccaagtcagagctgtgagcggggggcgccgtccaggccgagcgcagactgtttaggactcagcagacccagcaagaggcatctgccctttccccagccacctccccagcaagcaacctgaaatctcagcagatgcccaccatttctctagatcgcctagtctcaacccataaaaaggaagaactgacaaaggggatccatcggccacccctctgcaggggcttgtgatggctacaatggctcctagacactcaacgacttcatctgtggcagggagagaggaggccggaagaacaacccctgaacaatggaggcctttctttcccgctaggctcccagcctccttcccgctacagaatcgctcatcggcgaggctcagcagaaagaccctgaaggcaggctgcaaatgacccagaagagggacctgggagtcctggtggggacggggagggagtctcaatactcctttgcagtgcaaggtactctgagtcccctctgtagtgcctctgccagacacacactgcctgagttgaagagacacaggccacacatttcaggctggttgccagcggacgtcagcactcacggcctgcagggactcagcacagctctggattctggatctctcctgctgtaaccccacgcacaagcctgcaacccccagagctctttgacaggctcccaggcctcccagtcctggacaagcatgtgcagtcacgggagctcagctcaggccagggctgggctgtgcacctgcctcccactgacccagacccacttcctccagagaggcctctctccgcctgagctatttcccttgctagtgtgcagatatttccctaacatgtccttttttgtatttgtttgtacggaccataaatataactgtagctttaagactacacaggttgttatgtttggtcaacatgaagcgtttcccagaacttctctgacccaagaatggtgaagtggtggtacagtggcagaggcagcctcgtgggctctcttgctggggctctggcagctcacagcacatctgcccagattctgaggttctgcactgtggggctgggagggccaagtaggggcctcattcctcactctagctgccaccctgcaccgtccttacggcaatatgcttttgtagcatgtttgactttccaaaacgtttccagcatctttcagatttccccaaccagcccttggggcagtggccctgtgcaaaccttggctcaggaaggagattgggctcgctccacacaccctgtcggcgacgntgcngnncagnncgagnnncngn

SEQ ID NO: 734495 - DNA, 972 bp, Homo sapiens
aggagcagcccgacacaacaagggacccctcaggaatgaagcagcctttcagggccagaggggctgtggtctcccttcctctccttaaatagccagcgttccacccacagcggcaaggagccccctgccaccaccgacacccacgggcggagatcacctgctgccccgcagacccctgtcccttcctcccggaccagcagctagagcagtcctagggaaagtgccagccgagaccagccagaccaagtcagagtactgtggaacctggattcctggggaatggggtccccatgaggaactccacattggactaagaacagaccctgttcctggaagcagcaggaaaccatctctggtgttagaacttcaggcatcttgaaacactctgaagccgggggcaatcttttcaggctctgactccagccaaagcatgaatggccttgaagtggctcccccaggtctgatcaccaacttctccctggccacggcagagcaatgtggccaggagacgccactggagaacatgctgttcgcctccttctaccttctggattttatcctggctttagttggcaataccctggctctgtggcttttcatccgagaccacaagtccgggaccccggccaacgtgttcctgatgcatctggccgtggccgacttgtcgtgcgtgctggtcctgcccacccgcctggtctaccacttctctgggaaccactggccatttggggaaatcgcatgccgtctcaccggcttcctcttctacctcaacatgtacgccagcatctacttcctcacctgcatcagcgccgaccgtttcctggccattgtgcacccggtcaagtccctcaagctccgcaggcctctctccgcctgagctatttcccttgctagtgtgcagatatttccctaacatgtccttttttgtatttgtttgtacggaccataaatataactgtagctttaagacta

SEQ ID NO: 734496 - DNA, 2845 bp, Homo sapiens
aggagcagcccgacacaacaagggacccctcaggaatgaagcagcctttcagggccagaggggctgtggtctcccttcctctccttaaatagccagcgttccacccacagcggcaaggagccccctgccaccaccgacacccacgggcggagatcacctgctgccccgcagacccctgtcccttcctcccggaccagcagctagagcagtcctagggaaagtgccagccgagaccagccagaccaagtcagagtactgtggaacctggattcctggggaatggggtccccatgaggaactccacattggactaagaacagaccctgttcctggaagcagcaggaaaccatctctggtgttagaacttcaggcatcttgaaacactctgaagccgggggcaatcttttcaggctctgactccagccaaagcatgaatggccttgaagtggctcccccaggtctgatcaccaacttctccctggccacggcagagcaatgtggccaggagacgccactggagaacatgctgttcgcctccttctaccttctggattttatcctggctttagttggcaataccctggctctgtggcttttcatccgagaccacaagtccgggaccccggccaacgtgttcctgatgcatctggccgtggccgacttgtcgtgcgtgctggtcctgcccacccgcctggtctaccacttctctgggaaccactggccatttggggaaatcgcatgccgtctcaccggcttcctcttctacctcaacatgtacgccagcatctacttcctcacctgcatcagcgccgaccgtttcctggccattgtgcacccggtcaagtccctcaagctccgcaggcccctctacgcacacctggcctgtgccttcctgtgggtggtggtggctgtggccatggccccgctgctggtgagcccacagaccgtgcagaccaaccacacggtggtctgcctgcagctgtaccgggagaaggcctcccaccatgccctggtgtccctggcagtggccttcaccttcccgttcatcaccacggtcacctgctacctgctgatcatccgcagcctgcggcagggcctgcgtgtggagaagcgcctcaagaccaaggcagtgcgcatgatcgccatagtgctggccatcttcctggtctgcttcgtgccctaccacgtcaaccgctccgtctacgtgctgcactaccgcagccatggggcctcctgcgccacccagcgcatcctggccctggcaaaccgcatcacctcctgcctcaccagcctcaacggggcactcgaccccatcatgtatttcttcgtggctgagaagttccgccacgccctgtgcaacttgctctgtggcaaaaggctcaagggcccgccccccagcttcgaagggaaaaccaacgagagctcgctgagtgccaagtcagagctgtgagcggggggcgccgtccaggccgagcgcagactgtttaggactcagcagacccagcaagaggcatctgccctttccccagccacctccccagcaagcaacctgaaatctcagcagatgcccaccatttctctagatcgcctagtctcaacccataaaaaggaagaactgacaaaggggatccatcggccacccctctgcaggggcttgtgatggctacaatggctcctagacactcaacgacttcatctgtggcagggagagaggaggccggaagaacaacccctgaacaatggaggcctttctttcccgctaggctcccagcctccttcccgctacagaatcgctcatcggcgaggctcagcagaaagaccctgaaggcaggctgcaaatgacccagaagagggacctgggagtcctggtggggacggggagggagtctcaatactcctttgcagtgcaaggtactctgagtcccctctgtagtgcctctgccagacacacactgcctgagttgaagagacacaggccacacatttcaggctggttgccagcggacgtcagcactcacggcctgcagggactcagcacagctctggattctggatctctcctgctgtaaccccacgcacaagcctgcaacccccagagctctttgacaggctcccaggcctcccagtcctggacaagcatgtgcagtcacgggagctcagctcaggccagggctgggctgtgcacctgcctcccactgacccagacccacttcctccagagaggcctctctccgcctgagctatttcccttgctagtgtgcagatatttccctaacatgtccttttttgtatttgtttgtacggaccataaatataactgtagctttaagactacacaggttgttatgtttggtcaacatgaagcgtttcccagaacttctctgacccaagaatggtgaagtggtggtacagtggcagaggcagcctcgtgggctctcttgctggggctctggcagctcacagcacatctgcccagattctgaggttctgcactgtggggctgggagggccaagtaggggcctcattcctcactctagctgccacccctgttggtccggagaacaggctgggggcgaggcggttttaagccaggagggatgagatccagtctgaagtgtagtgtcacttggtcctatttcgtataccttctctgtgggagtatccagctctctcagaggccatgaagacccgggtataggagacagaaggaagggaacgcaggaagggcctgggcacggggaagtgggaagagctcagggctgcggccagcaggagccagtgtgcacaccctccaggcggcagctgccagcgagggcccctgtgctggccacaagcggggccaaa

SEQ ID NO: 734497 - DNA, 2087 bp, Homo sapiens
aggagcagcccgacacaacaagggacccctcaggaatgaagcagcctttcagggccagaggggctgtggtctcccttcctctccttaaatagccagcgttccacccacagcggcaaggagccccctgccaccaccgacacccacgggcggagatcacctgctgccccgcagacccctgtcccttcctcccggaccagcagctagagcagtcctagggaaagtgccagccgagaccagccagaccaagtcagagtactgtggaacctggattcctggggaatggggtccccatgaggaactccacattggactaagaacagaccctgttcctggaagcagcaggaaaccatctctggtgttagaacttcaggcatcttgaaacactctgaagccgggggcaatcttttcaggctctgactccagccaaagcatgaatggccttgaagtggctcccccaggtctgatcaccaacttctccctggccacggcagagcaatgtggccaggagacgccactggagaacatgctgttcgcctccttctaccttctggattttatcctggctttagttggcaataccctggctctgtggcttttcatccgagaccacaagtccgggaccccggccaacgtgttcctgatgcatctggccgtggccgacttgtcgtgcgtgctggtcctgcccacccgcctggtctaccacttctctgggaaccactggccatttggggaaatcgcatgccgtctcaccggcttcctcttctacctcaacatgtacgccagcatctacttcctcacctgcatcagcgccgaccgtttcctggccattgtgcacccggtcaagtccctcaagctccgcaggcccctctacgcacacctggcctgtgccttcctgtgggtggtggtggctgtggccatggccccgctgctggtgagcccacagaccgtgcagaccaaccacacggtggtctgcctgcagctgtaccgggagaaggcctcccaccatgccctggtgtccctggcagtggccttcaccttcccgttcatcaccacggtcacctgctacctgctgatcatccgcagcctgcggcagggcctgcgtgtggagaagcgcctcaagaccaaggcagtgcgcatgatcgccatagtgctggccatcttcctggtctgcttcgtgccctaccacgtcaaccgctccgtctacgtgctgcactaccgcagccatggggcctcctgcgccacccagcgcatcctggccctggcaaaccgcatcacctcctgcctcaccagcctcaacggggcactcgaccccatcatgtatttcttcgtggctgagaagttccgccacgccctgtgcaacttgctctgtggcaaaaggctcaagggcccgccccccagcttcgaagggaaaaccaacgagagctcgctgagtgccaagtcagagctgtgagcggggggcgccgtccaggccgagcgcagactgtttaggactcagcagacccagcaagaggcatctgccctttccccagccacctccccagcaagcaacctgaaatctcagcagatgcccaccatttctctagatcgcctagtctcaacccataaaaaggaagaactgacaaaggggatccatcggccacccctctgcaggggcttgtgatggctacaatggctcctagacactcaacgacttcatctgtggcagggagagaggaggccggaagaacaacccctgaacaatggaggcctttctttcccgctaggctcccagcctccttcccgctacagaatcgctcatcggcgaggctcagcagaaagaccctgaaggcaggctgcaaatgacccagaagagggacctgggagtcctggtggggacggggagggagtctcaatactcctttgcagtgcaaggtactctgagtcccctctgtagtgcctctgccagacactgacccagacccacttcctccagagaggcctctctccgcctgagctatttcccttgctagtgtgcagatatttccctaacatgtccttttttgtatttgtttgtacggaccataaatataactgtagctttaagacta

SEQ ID NO: 734498 - DNA, 2334 bp, Homo sapiens
aggagcagcccgacacaacaagggacccctcaggaatgaagcagcctttcagggccagaggggctgtggtctcccttcctctccttaaatagccagcgttccacccacagcggcaaggagccccctgccaccaccgacacccacgggcggagatcacctgctgccccgcagacccctgtcccttcctcccggaccagcagctagagcagtcctagggaaagtgccagccgagaccagccagaccaagtcagagtactgtggaacctggattcctggggaatggggtccccatgaggaactccacattggactaagaacagaccctgttcctggaagcagcaggaaaccatctctggtgttagaacttcaggcatcttgaaacactctgaagccgggggcaatcttttcaggctctgactccagccaaagcatgaatggccttgaagtggctcccccaggtctgatcaccaacttctccctggccacggcagagcaatgtggccaggagacgccactggagaacatgctgttcgcctccttctaccttctggattttatcctggctttagttggcaataccctggctctgtggcttttcatccgagaccacaagtccgggaccccggccaacgtgttcctgatgcatctggccgtggccgacttgtcgtgcgtgctggtcctgcccacccgcctggtctaccacttctctgggaaccactggccatttggggaaatcgcatgccgtctcaccggcttcctcttctacctcaacatgtacgccagcatctacttcctcacctgcatcagcgccgaccgtttcctggccattgtgcacccggtcaagtccctcaagctccgcaggcccctctacgcacacctggcctgtgccttcctgtgggtggtggtggctgtggccatggccccgctgctggtgagcccacagaccgtgcagaccaaccacacggtggtctgcctgcagctgtaccgggagaaggcctcccaccatgccctggtgtccctggcagtggccttcaccttcccgttcatcaccacggtcacctgctacctgctgatcatccgcagcctgcggcagggcctgcgtgtggagaagcgcctcaagaccaaggcagtgcgcatgatcgccatagtgctggccatcttcctggtctgcttcgtgccctaccacgtcaaccgctccgtctacgtgctgcactaccgcagccatggggcctcctgcgccacccagcgcatcctggccctggcaaaccgcatcacctcctgcctcaccagcctcaacggggcactcgaccccatcatgtatttcttcgtggctgagaagttccgccacgccctgtgcaacttgctctgtggcaaaaggctcaagggcccgccccccagcttcgaagggaaaaccaacgagagctcgctgagtgccaagtcagagctgtgagcggggggcgccgtccaggccgagcgcagactgtttaggactcagcagacccagcaagaggcatctgccctttccccagccacctccccagcaagcaacctgaaatctcagcagatgcccaccatttctctagatcgcctagtctcaacccataaaaaggaagaactgacaaaggggatccatcggccacccctctgcaggggcttgtgatggctacaatggctcctagacactcaacgacttcatctgtggcagggagagaggaggccggaagaacaacccctgaacaatggaggcctttctttcccgctaggctcccagcctccttcccgctacagaatcgctcatcggcgaggctcagcagaaagaccctgaaggcaggctgcaaatgacccagaagagggacctgggagtcctggtggggacggggagggagtctcaatactcctttgcagtgcaaggtactctgagtcccctctgtagtgcctctgccagacacacactgcctgagttgaagagacacaggccacacatttcaggctggttgccagcggacgtcagcactcacggcctgcagggactcagcacagctctggattctggatctctcctgctgtaaccccacgcacaagcctgcaacccccagagctctttgacaggctcccaggcctcccagtcctggacaagcatgtgcagtcacgggagctcagctcaggccagggctgggctgtgcacctgcctcccactgacccagacccacttcctccagagaggcctctctccgcctgagctatttcccttgctagtgtgcagatatttccctaacatgtccttttttgtatttgtttgtacggaccataaatataactgtagctttaagacta

SEQ ID NO: 734499 - DNA, 2317 bp, Homo sapiens
ggccacgtgcctctctcacgggcagcacacggacaagagctcggtagtgtcggggaagcatctcggaggagctgcgggagggagcagagtgcccggacagagagagtgtggcaggggaagcatggctggggcctctgggggtcggcgctgcctctcactgatacaggggacgcatgcagaggcagccttggtggtcagtggaggagaatcccaaactgcttgtgcctcattgcgtttgggatgcctggtggacaccagagtggaggtgacatgtgggcagctgaggacagcgagagagaggcctgaagtggagcctggaattcctccagacacatgtgccatttagggctctaggattctgtctgcaagggcagccatgagggccgggcacggagccccagacgactccccatggagagacagggagaaaggtgactcagaggaggggagtgagcaggtgcagctgtgggggcgggcagaaccacaggaactcagggtcccgggtgccagaaggggggcgtttctgcacctcagcagctgtggtgagggctgctgaggggtcaagaggaggtgtgggtccctgggcagatgaggccagggtagcacacgcgaggggcagcgggtgtgctgggagaagccggggaggaaggcccagcagtgtttttaacccagctccccagcccagtccttcagaaaggacgagagagtggcgtggagaagcaagccctggagaaagtgtggggatgaacagggctcacagacagaggccgggctgcacgggatctcagagctagggccaggggaggtgggagacaaggccacctgctatagggacagtgcttgggaagggaggatgagagaccaagggttcgcagaaggtgggaacttctggagtacccatgaggtttgtggccctcaatttagagtaaatgtgggcatctccctccagccacactgagctgcacaggtacaggcaggagaaggtggacaggtggggtcagtagatggggtggccaggggggtggcagagtgtgaggatttctcatggctcccgagaggctgccaggagctcgctgagcgtggggccctgtaaactgggagctggactatccgccccggggtgacctggagggagggcagctacatcagtgcaggctgcagcaccgggacccttctgcgccctcagcaagtgggtagcacacaggaggggtggcaggtgtgccgggaagggctgtggcccagtcctctctggcccaacacggccacctcacctgccggcattcttcacaaagcccaggtcagccagctccacatcacacagctcgcagcggaagcagcccgggtgccagttgttgttcatggccttgatgacgcggccaatgatgaactcacctggaagaagacaggtccctgctggctggggagcacgtgcctgtcccctcttcggaccctcccaagccctgtccacctagcactccgcctgctctctgcctggcccatgggctccctcgtgggatggtgatgcctgtagggggcctgacggctgccgctcagagaggcaaggtggggagttaggaaagagctgggccagttctgtgtaccccctcggccccctgccccccgccactgctgcccacttcccaggcagcccaggatgtgtactgtcaccggccttaccgcaggatccacagcacggagcaaacagcatttggaagtcgtgttcgcagtacttccggccttcaaactgcaaaggggtcgcagagagaggacaagcaaaccacctatcatccccatgagcagcccaggcccttgttgggtcaggacctgacagcaggggatgaggcactgaggcaggggcatgccgggctgaggctggagcagtgggtcccaggcctggccagagaggacactggcccttttgggatggtggggtgcaaagggaggtgcccccgtggaagctggagaggtccgtgaggccacctgtcaaagggccactggtgtctactgaggatctggaccctgttggtccggagaacaggctgggggcgaggcggttttaagccaggagggatgagatccagtctgaagtgtagtgtcacttggtcctatttcgtataccttctctgtgggagtatccagctctctcagaggccatgaagacccgggtataggagacagaaggaagggaacgcaggaagggcctgggcacggggaagtgggaagagctcagggctgcggccagcaggagccagtgtgcacaccctccaggcggcagctgccagcgagggcccctgtgctggccacaagcggggccaaa

SEQ ID NO: 734500 - DNA, 1335 bp, Homo sapiens; identical to SEQ ID NO: 349006

SEQ ID NO: 734501 - DNA, 604 bp, Homo sapiens; identical to SEQ ID NO: 349002

SEQ ID NO: 734502 - DNA, 1523 bp, Homo sapiens
attgattggagagatgcctcaagaagatctgcacgcggtggtgaagaattgcttcgcggtggtgaatagctctgtctctgaaggcatgtcagctgcaattttggaggcaatggatttagaagtaccggtattggccaggaacatccccgggaatgctgccgtggtgaagcatgaagtcacagggctactgttttccaatcctcaggagtttgttcatctggcaaagagactggttagtgatcctgcattagaaaaggaaatcgtagtgaacggaagggaatacgtgagaatgtatcattcatggcaggtggaaagagacacctaccaacagctcatcaggaagctggaaggaagcactgaagattgagggccccgcctcatcagacacctgctctctgacacacagctctgggtgcacactcagagacagagttctggatcacgtgggcccagtgcagttcaaataaaaccagcctcagcggaatcctagaaaatgttagtcgtgagtccccagagccactgcattcatcccatatccttctgtgcgttcagatgctgtcccaggcgtgttcaccagccagtcctgatggaggtgcatgagtgactgggttgactgggacagggaaaggggaactggttttcagggaatttgggagagaatttgattacctgccttagggctttggtgtggacaatagaggcttattttcaagcagtcatggttcagactcctcccgcctgccttctgaccaacctctccccatcgttgccagtttgaaaggcaaaagcaaaacagacgtgtcagctgagccgagtcctcgcaggatttttgttgtgatctcaggactctgacaggcacgtgggtgacccgaggcttctctgaacactagaaagcgctgtgagtgagctcacgcccggcacagctcacttttcaatggtggaattgaaagttgtgctttttagaaaagtggccaggctgcccgcagcccccgcccacctcttggctgaatttgagtggaaaaccagggaaggaacaagcgccacgtcacgcattagcctgcaaatcgcccgcgtgaccctgagatggaggcctgaggctttggggtccaggggtgggctcttccccttcccacatcagggacccggggatggatgtcggaagggtcaccagcctccagcctttggcaggatggagcttgggtctgcagggctttgcagccacacagcgaggtcagtccggggccagccgcgccatcatggtaatggtggcctcgccccatccatgtcatccatgtcacatgaggacgtgcagtcttccttgtcctctcctagtggaatttgcctgggagaacctccactgaatactgaaattgttgcatgcctgtggattccttacgacaatggggaacgcggtgtttcccacctcttgtgggtagaaagcagtctgctttgaggaggcgagaaggcaaagccagggcagggcgttgctgtgggaagcgttcggtgaaagcgggtttcgacgc

SEQ ID NO: 734503 - DNA, 2035 bp, Homo sapiens; identical to SEQ ID NO: 422852

SEQ ID NO: 734504 - DNA, 524 bp, Homo sapiens; identical to SEQ ID NO: 728890

SEQ ID NO: 734505 - DNA, 1250 bp, Homo sapiens
caagttttattcacctcaaatcccactgggttcttaaaacttgaaaattcaaattgtagagaattatgagacacaatgtgatgtttagttaaagtcatgctatacctttctgggccacatattgctaactctgtggctaattatgcaattaattctcaacgtatcaaagcttttcactggcagtaaattctttgccctcaggtgaagtggattgaaaagacatcaaggatcaaggataatcactttgaatctgttggtttttccccctacattccagacactttaaatttggatgctttcattttttttaaatcaaaccacacaaatatgcagatactttcccagaatttcgcagttaaatggctgatcctcttgaaaactaaccttaatggaattctaaacatttcagtttagaatgactttgaaaaattccttagatttttaggatgttttattctgccaagtatgaaaaaaaaatggttaaatacaatggagttttaaaaattaacctggggattctatttgaactagaaaattcctattggaaaagaatttgcacatacttacagattcagctaataaattttaagaggattaggattctcataattctttaaatgaaaatttgttttagtgatacacagagatgccgtatactatagtgttatgttcagtaggaaaacttcaaatagttcgtatttaaaaaggtaattgatccttgctgtacttcccaacatctcatcttcttttagctgcagtaagatagaggtgactgtatggctacagttcatggtataaggtcatttagggtgcacactggcacacaggctggaaaacgggcactggacccagctttcaggtgtgtggtgctgggtaagtttcacctttgaagcctcagccttccatctgtaaagggcggtaatggtgcccacctttcgaggcattgcgaggctagatggtaacacacagaaagctcccacagtgggaccttgatgcagcgtagctggtattaacaaccgtggggacaccaggccactctttttctaccagttgttttatgaatccacctattaattttcatccatcttttggtcgtaggtaaaggtcaatcaggtttttcaaaaagactccctgtaataactttaagttcctgtatttctaagatatagggatttctacaaaacgactttgacatttagtcaataaagacttaaactcttcttaaatctatagttttaggagagtttttc

SEQ ID NO: 734506 - DNA, 938 bp, Homo sapiens
  misc_feature (886)..(886): n is a, c, g, or t
  misc_feature (895)..(895): n is a, c, g, or t
  misc_feature (898)..(898): n is a, c, g, or t
  misc_feature (902)..(902): n is a, c, g, or t
  misc_feature (917)..(917): n is a, c, g, or t
  misc_feature (924)..(924): n is a, c, g, or t
cagatagtaaagataagacttctggagtccggaatcgaaaacacctttcaacacgtcaaggaacttgtgtctgagaaatggaaaccgctcctgtatattctgtactgttttacttcgggcttctgttaaagctgttctatggccttggattttatggaggcagatctctgtatcatccagagcctgagtacagtttccttccaaatggacaatgacccaggtggccaaagaatgttcatgagttttataaaagtattgatggtcacaggtgataaagtcagtttttaccactatcttaggcttattatagctaacattaaattactctggaaaaagatgtatattgtttcttaatgaagatgaaaaatatgtaattcatataaatcaactgtttatatcccaagactttaaagaaagacattttttaatgcctgaatgatgagaattgtacagtttttgcctcataagcaaacttgaatcacctgtgtatgaacagggaatgaacacattgcaatggctttaaatgctcttttatctcgttgtaaaggtaaggcaagattttgatgtagtaggatgtaggtaatgtatttaaatatttcatatgaccatatcgtgtccaaactcagtctgagaatgtgacagctttccgcctaactagaatgcagaccagaatgagttcaactcattctgtgcaacttcacagggggtttattagaatgctcagtgtagaggacattcctgtcatccatgccaactacctaactcgttatcagagctgatagagcatgggaaaagtctgtccagcgattcagttgttcccctccttccaaaaacagcctccaataccacaacctggaaaggggccgaatgggttatttttacagcntacaggttntgntccngtatggttatttttnattgccnagggtcttggggtc

SEQ ID NO: 734507 - DNA, 452 bp, Homo sapiens; identical to SEQ ID NO: 728892

SEQ ID NO: 734508 - DNA, 1490 bp, Homo sapiens
gtccctgcgtctttccttccttctctctttcgctctctctgccaactgctatgggtttccataactctgcaatcaaagtggatggtcgggaaggattattacacagagtgaagcctccgctgttaatgtctccagtgtttaatcatcatacagtaaatggttttatgcatatttcatttgcatatcattaaactgtgttagtgaggggcattcagaaccaggagaagtacaaagttggggagagagggaagaaaaaaaggtccctatgatgcttatcttcaaacggggacttgttccatgatctgtcttctacttttgctaaaatcattatgacttggaaacctttgaagttggatacaaccttggattcttctaattcctgcagagcagtgtattttacaaaacagcagaaatgttcctgcactagacaattaaaggaatataaactccagtgggctgaaactagtagctctttggggaatgcagtagcagaggcttctacaaataccaacacttaaaaatatataataaacagcatcatattagaaacaaagaaaacgaagacaagaaatattaacacgtggattatatttgtttcttttggggggtaatgaactaaagagaatgaagaagccatcggtaatttatcccttcattaatgaacagtcacctttttgtatgtgtttgtttttgtcctttctttttgaagagggatgttgttacttttgaagcaattagtcaattattttgtagctctgatcttttccccctgcacccgacaggacagaaaggtggtggttagggaatatgtgagtacttggggagggggggacttggtggggagagaaagaatacagtgagttctttgtagatcttatacatgcacaacatattaattgggggcttttaaagctccctcaatgggctatttcattcctggtaaaacagcagctggttagccactactggtgactcttcaaatattacttcatttttattctgtcgccgttgttgttgtcttgctttgtttttcctcagttaagaatgaaaatgtagtatcaccccctctttagtgagtctcttctccatcttcttcactccaatttccaaactgtaaaacaatgttggcttaatactgagtcctggtgcacagtctaactggcacaacttgatttggaaatgagatgctgctttatatttaaattaccccggctccccccttatcctccaaagctttgtctctgttatgaatatgcagatgaggcctgatgtgattacactgtacaattactcctatccatggtggtgtcaggggctgctagggagacagagagtcagacagcctccaagccaatacagagttttgttttcggtatttttcctatctccttggcactgcggcacatgcagatgtcgctgttgttctttataaagccctaatgtatgcaaaagcataacgatttggtttggacgcaaagcatcaacgaaat

SEQ ID NO: 734509 - DNA, 723 bp, Homo sapiens
acagacgtctcaggaaactgggggcaacctggggggagccccgtgggctgtgggaacccctgcccccggcttggaagctgcccacagtggcctggttgcagcctggcagatgaggggtacatcactactcagaataaacggccccctctgcacccacctgtctagatgagggtgacaggcactatcacagggcccccacctgacgccttcccacctggccatgcccccccagaactgtcatggagcccaggaggcgcctgtgtggagcacggggacctggcacgctgctgcccctagatctcagactcccatctaaggaccagacctgctgcctgtgcccagggaggggccctgacaccctctgtccccgtcagaacagggccccaagccactgcattgctccgtcctcacatgccctccctttcctcgcaggggagcctggagctgttggtcagatgggcagccctgggcagcagggggctagcacccagggcctctgggagtgacaggacattttctgcactgccccgaggaacgctgagccttcctccctgggtttgtctggacaccgagagcgaccacatcctggagaagccaggagaaaagctcaggaagagcctgcaggtggaaggagagggaagcagcggcctcggccaaggcccaccccatactcttggctctgtagcatttccaagttcagataaacccctgagtgctcaccca

SEQ ID NO: 734510 - DNA, 1924 bp, Homo sapiens; identical to SEQ ID NO: 419448
  misc_feature (1118)..(1118): n is a, c, g, or t

SEQ ID NO: 734511 - DNA, 3917 bp, Homo sapiens
gccaagcgaggcgggagtcatttcctgggagagtgtcccccaccctggctctgtgcaccccaccttgaggccctgcagcttcagccgcagtggggaaggggaggggctgggctgatggcgaatcgggttcaggagggcagcagtgccctgtggccgtctcagtagctctaaaacaggctcaacaacatgccccgcccctttctctgggcctcatctaagcctggccagggccctgtgggcccgcctctctctgcgcctcacgcaggcaacagatggttccactgctggcccaccagtcacctgcacgatggctcctccctcagaacagcactcccaccccggccccagcaccttcacatctgggcacaggcaggtccctgcctgcctcatcgtcccctctgtccccagcccaagaaggagttcagatcctgtgtgtgaatggccacccctcacccacccagccctgtgctgagttccttgtgcagggacattgctttgagacttggcaccatcagcccctggtccttagggtctcagagcaaggtcatccctcagcaggcttctggcctgtgcgctcctcagcacctctgcccaggtctctcccaaccatcacagacgctgtgtgagcctggacttcctgccttatccccactgtggcccaaacagcatgggggcaagctcagaacacacacctgggcttctgggccttgtggcccgtgggggtgatgtgggaacttctacttcctttccaaacaaatattcagtaactagtccactgttaccacttaggcagctaagcaagaaaggtgccagaaatgaagagggaagccatatcattgaggagagaatgaaaagtattaaaaaggaacaaagagagacccttgatattgacagaaggaaaacccaccaagatcaccagtgcagcattgcgtgcaccaaagcataccccaaagaggtgagcgcaaaacagcttcagggcaaacacttcatctatgattcaactgttccaggaactgaccagacctggagaccaaatagagagtcataggcagggtcagcaggatgggagagagcgcctgcacccacaggagccacagccctgactgaggccaggaagcagccccaaatgccagctcccactgcagcatgagaacagaaacagaccactgaaaattcccaaagtctgtggacaaatcagacgtcgaagaagtcacgtggcatcgagacagattttgcactgagggacaaggagagcatgtggccaaagtaggtgcaggtaaagcagcatctggggcagagttatagccttcagtgcaggtatcagacacagttgttgagagcagcagcccaagccagcccctccgtcctgcagggaggacacctaggtcacttggcttctgttggggagctgagttgcttcagattgtgtgaccagcaaaacagcttggttgctctcacttggtttctccagggcggggaattacatgtccccagctgaactgagaaggctctttgagcagtggagtgagcaggctttgtcatgaggcaggagtggggctagaatcaagcccagagcccacagggcatccagagccttccaaaggagcccctctcctggggctctccaatttgatgaagggactgggcactgggtggctgagaccacattggcagccaggaggaggcagcctggccggggggaaccagggtggctctaatccccaccaccccctcagctgccctacccccgccacgctggtgtgacaccagtgatgctcagcctcaaaaggggagtccggctgtcttcgggaaactgactttatgctggaggccaattaaaatggcacagcaaaggcagcggccagctggtgcccaggcagcttagggactggtccctgaggccccacccgccccagcctgtgcagtggagctgagtacgaatcaaaggtgaggatggcaagggagctgagagcagcctccggatgcaccaaaccggcctggctcctgtttgcaggaaggcagcctccccgagacccagccgacctgcacgtctcccatcagccccgactccaccgcatccctctgggtccttttaggagcccccagggactgagccggggctcacgctcctggccagagcgctgggtttctggcaatgcctcccctcctgcctttacggccacagctctcccctccagaggcccctctgtagtgggcctcggtcccctctccacccccagaggcagcacagcttcagccctacgcagtgtgggggctccgggaggaaatgcagggaggtgcttggtcttggcccagagctcatggccttaggtgctgcccccagtcacccccgtgcccatgcagccggggatgttcagctcaggccagccaccgaggtggtgtgacgcaaggctgatctgacgctcagctcaggccgctggggtcatgggggttgtgggaaggtcatggaatcacggggctcacgctggggtcacagggtggtgtggctgtgtggactgtaaggggcgtgcagccatgcgtatctgacctgccctccctaggtctgcaggcagtgccgagtggctctgcctgaggccccaagagcgaccttggaagctccaggccttcacagcccctctgagagccacctgcaaggtggggagctgggaagaacggctcagtgatgagctcagagggaggggtgggcacagcgcccaggaaggcgggtgcgtgcaggcctgggaggaatgtgtagcaggaggcagggggtgctgtgcccgcaggaccagcaggtgaggcgtgtccacccacaggatggctctggcccaggcagtgtcagaaatggaagctgaggaaacccaaccccagctgtagaggagcctgccccgatgccatctgcacctggggggcgacgtatggctgccagcctcttcatctaccaaggaccagggcagtggggacgggagagctgggacacgtggactcacaccagggcagatggtgggggaagccagtgtctgtagattcagtgcatttcttggggaagggcgtggaacatttggacttgagccccagcacagagacgatgtcataatacagccccccatcgtgatctgatggtaagtacagaactccttgcccagtggagaaacactctcctctcatgtgtggaatatccacacactaaccatgaactgggccataagaaaccttacattccaaaggatcctgctgttcagaactcactcactcactgatgaaactggaaaaacaaccaatgataacaagctaaagaatgcctctagaagctaaaagacacacccatgactccacagtaattcatgggttaaagagaaaaaaggaaacgtgaagatacttgtaaccaaataatgatggatgcagcgccacgtcagaatctctgtgctgcagctgcagtggtacctagagggcaatttatagctgtaaatacagtgctttgttttgttttcttgttttttgagacaaggtcttgctctgtcacccaggctggagtacagtggcatgatctcggctcaatgcaacctctgtgccaccctgggctcaagtggtcctcctgctccggtcttctgagtagcaggaaccacaggcgtgcgccaccacgcttggctaatgttttttgtatttttttaaatagagacagggtgttgccgtgttacccaggctggtcttgaacttctgagctcaaacgatccaccctccttggcctcccaaagtggtgggattacaggtgtgagtcacctcaccggcccttaaacacagtttttagggaagattccaactcaaacaattttaaatagtagaaaataaaccctgaagcagtgtgcattcattagtactgtgtttgcctgtatttaattaaaacctgattgccattggct

SEQ ID NO: 734512 - DNA, 1881 bp, Homo sapiens
ccacggtgagcaggagcccaccctccaacctggccctggcctcggagacccccgacagcctgcaggtcagctggacgcccccgcttggccgcgtgctccattactggctcacctacgcccccgcctctggcttgggacccgagaaatccgtctctgtgccaggagccaggagccacgtgacactgcccgacctgcaggcagccacgaagtacagggtcctggtctcagctatctatgcagcaggcaggagtgaggctgtgtctgccacgggccagacagcctgcccagccctccgccctgacggctccctcccagggtttgacctgatggtggccttcagcctggtggaaaaggcttatgcgtccatccggggcgtggccatggagccctctgccttcggtgggaccccgaccttcacgctcttcaaggacgcccagctgacaagacgggtcagtgacgtctacccagcccccctacctccagagcacaccatcgtcttccttgtgcgcctacttcccgagacaccccgtgaggccttcgcgctgtggcagatgacagccgaggacttccagcccctccttggggttctgctggatgccgggaagaagtccctgacctacttccaccgtgaccccagggctgccttgcaggaggccaccttcgacccgcaggaagtgaggaagattttcttcgggagcttccacaaggtgcacgtggctgtgggccgctccaaggtcaggctctatgtggactgccggaaggtggctgagcggccccttggggagatgggcagcccacccgctgccggcttcgtcacgctggggaggctggccaaggccaggggcccccggagcagttcggccgcgtttcagctccagatgctgcagatcgtgtgcagtgacacctgggccgatgaggaccggtgctgtgagctccctgcctcgagggatggagagacctgccccgccttcgtgtctgcctgttcctgttcctcagagacccctgggcccccaggacctcaaggacccccaggcctccctgggaggaatggcaccccaggagagcagggcttcccagggcccaggggtccaccaggggtcaaaggagagaagggagaccatgggcttccaggcttgcagggccaccccggccaccagggcatccccgggagagttggcctccagggaccaaagggaatgagaggcctggagggaactgctggcctgcctggaccccctggccccagggggttccagggcatggcaggggccaggggcactagtggagagcgaggacctccagggaccgtggggcccacaggactgccagggcccaaaggggaacgaggagagaagggcgagccgcagtcccttgccaccctctaccagcttgtgagccaggcctgtgagtctgccattcagacacacgtgtcaaagttcgactccttccacgagaacaccaggccccccatgcccatcttggagcagaagctggagccgggcactgagcccctggggtcccctggcacccgcagcaaggccctggttcctggagaatgggggcgtggtggccgccaccttgagggcagaggggagcctggagctgttggtcagatgggcagccctgggcagcagggggctagcacccagggcctctgggagtgacaggacattttctgcactgccccgaggaacgctgagccttcctccctgggtttgtctggacaccgagagcgaccacatcctggagaagccaggagaaaagctcaggaagagcctgcaggtggaaggagagggaagcagcggcctcggccaaggcccaccccatactcttggctctgtagcatttccaagttcagataaacccctgagtgctcaccca

SEQ ID NO: 734513 - DNA, 1977 bp, Homo sapiens
ccacggtgagcaggagcccaccctccaacctggccctggcctcggagacccccgacagcctgcaggtcagctggacgcccccgcttggccgcgtgctccattactggctcacctacgcccccgcctctggcttgggacccgagaaatccgtctctgtgccaggagccaggagccacgtgacactgcccgacctgcaggcagccacgaagtacagggtcctggtctcagctatctatgcagcaggcaggagtgaggctgtgtctgccacgggccagacagcctgcccagccctccgccctgacggctccctcccagggtttgacctgatggtggccttcagcctggtggaaaaggcttatgcgtccatccggggcgtggccatggagccctctgccttcggtgggaccccgaccttcacgctcttcaaggacgcccagctgacaagacgggtcagtgacgtctacccagcccccctacctccagagcacaccatcgtcttccttgtgcgcctacttcccgagacaccccgtgaggccttcgcgctgtggcagatgacagccgaggacttccagcccctccttggggttctgctggatgccgggaagaagtccctgacctacttccaccgtgaccccagggctgccttgcaggaggccaccttcgacccgcaggaagtgaggaagattttcttcgggagcttccacaaggtgcacgtggctgtgggccgctccaaggtcaggctctatgtggactgccggaaggtggctgagcggccccttggggagatgggcagcccacccgctgccggcttcgtcacgctggggaggctggccaaggccaggggcccccggagcagttcggccgcgtttcagctccagatgctgcagatcgtgtgcagtgacacctgggccgatgaggaccggtgctgtgagctccctgcctcgagggatggagagacctgccccgccttcgtgtctgcctgttcctgttcctcagagacccctgggcccccaggacctcaaggacccccaggcctccctgggaggaatggcaccccaggagagcagggcttcccagggcccaggggagagcccgggccacccggacagatgggaccagaaggtcctggaggccagcagggctcgccggggacccagggccgtgcagtccaggggcctgtgggtccaccaggggtcaaaggagagaagggagaccatgggcttccaggcttgcagggccaccccggccaccagggcatccccgggagagttggcctccagggaccaaagggaatgagaggcctggagggaactgctggcctgcctggaccccctggccccagggggttccagggcatggcaggggccaggggcactagtggagagcgaggacctccagggaccgtggggcccacaggactgccagggcccaaaggggaacgaggagagaagggcgagccgcagtcccttgccaccctctaccagcttgtgagccaggcctgtgagtctgccattcagacacacgtgtcaaagttcgactccttccacgagaacaccaggccccccatgcccatcttggagcagaagctggagccgggcactgagcccctggggtcccctggcacccgcagcaaggccctggttcctggagaatgggggcgtggtggccgccaccttgagggcagaggggagcctggagctgttggtcagatgggcagccctgggcagcagggggctagcacccagggcctctgggagtgacaggacattttctgcactgccccgaggaacgctgagccttcctccctgggtttgtctggacaccgagagcgaccacatcctggagaagccaggagaaaagctcaggaagagcctgcaggtggaaggagagggaagcagcggcctcggccaaggcccaccccatactcttggctctgtagcatttccaagttcagataaacccctgagtgctcaccca

SEQ ID NO: 734514 - DNA, 761 bp, Homo sapiens
ttcataagctccagccttcctgtggccacagcaggaccagagtggaccagcacaccccaggagagaggactggggtcccaggagtaggaggagcccgagcaccatgagctccggagaccctgcacacctcggcctctgcctctggctgtggctgggcgccaccctgggaagagagcaagttcaagcaagcggtctcctgaggctggctgtgctgcctgaggaccggctgcagatgaagtggagagagtcggaggggagcggcctcggctacctggtgcaggtgaagcccatggcaggggactcggaacaggaggtgatactgaccaccaagacccctaaggccacagtggggggcctgagcccctccaagggctacaccttgcagatcttcgagctcactggctctgggcgcttcctgctagctcggagggagtttgtgattgaggatctgaagagtagctccctggacaggagcagccagaggcccctcggctctggagccccggagcccaccccctcacacacacggggagcccagaccctgagcaggcttctgagccccaagttgccttcacaaccaagccaggatccgcgcactcctgccggcccccagtaccgctgcctgccccccgtgcctgctgacatggtcttcctggtggacgggtcctggagcattggccacagtcacttccagcaggtcaaggacttcctggccagtgtcatcgcaccctttgaaatcgggccggataaggtccaagtag

SEQ ID NO: 734515 - DNA, 1207 bp, Homo sapiens
gggctgtggagaacctcccgtgccgtctcacaggtgcacgtggctgtgggccgctccaaggtcaggctctatgtggactgccggaaggtggctgagcggccccttggggagatgggcagcccacccgctgccggcttcgtcacgctggggaggctggccaaggccaggggcccccggagcagttcggccgcgtttcagctccagatgctgcagatcgtgtgcagtgacacctgggccgatgaggaccggtgctgtgagctccctgcctcgagggatggagagacctgccccgccttcgtgtctgcctgttcctgttcctcagagacccctgggcccccaggacctcaaggacccccaggcctccctgggaggaatggcaccccaggagagcagggcttcccagggcccaggggtccaccaggggtcaaaggagagaagggagaccatgggcttccaggcttgcagggccaccccggccaccagggcatccccgggagagttggcctccagggaccaaagggaatgagaggcctggagggaactgctggcctgcctggaccccctggccccagggggttccagggcatggcaggggccaggggcactagtggagagcgaggacctccagggaccgtggggcccacaggactgccagggcccaaaggggaacgaggagagaagggcgagccgcagtcccttgccaccctctaccagcttgtgagccaggcctgtgagtctgccattcagacacacgtgtcaaagttcgactccttccacgagaacaccaggccccccatgcccatcttggagcagaagctggagccgggcactgagcccctggggtcccctggcacccgcagcaaggccctggttcctggagaatgggggcgtggtggccgccaccttgagggcagaggggagcctggagctgttggtcagatgggcagccctgggcagcagggggctagcacccagggcctctgggagtgacaggacattttctgcactgccccgaggaacgctgagccttcctccctgggtttgtctggacaccgagagcgaccacatcctggagaagccaggagaaaagctcaggaagagcctgcaggtggaaggagagggaagcagcggcctcggccaaggcccaccccatactcttggctctgtagcatttccaagttcagataaacccctgagtgctcaccca

SEQ ID NO: 734516 - DNA, 356 bp, Homo sapiens
tgacgtctacccagcccccctacctccagagcacaccatcgtcttccttgtgcgcctacttcccgagacaccccgtgaggccttcgcgctgtggcagatgacagccgaggacttccagcccctccttggggttctgctggatggtgacgtgggccccgcgtcgcccccagcagtcaggaggagtaggggcagggaggccccagagccctgggaggccttcagaggaagtccagcctccaggccaggccctcagcaccctctgggtgggaggcaggtgtcccgggcagggggctgtgggccacattgagggtcacctccagcttggcaccctcagggctgctcctgtcctgtcgtgg

SEQ ID NO: 734517 - DNA, 1189 bp, Homo sapiens
gggctgtggagaacctcccgtgccgtctcacaggtgcacgtggctgtgggccgctccaaggtcaggctctatgtggactgccggaaggtggctgagcggccccttggggagatgggcagcccacccgctgccggcttcgtcacgctggggaggctggccaaggccaggggcccccggagcagttcggccgcgtttcagctccagatgctgcagatcgtgtgcagtgacacctgggccgatgaggaccggtgctgtgagctccctgcctcgagggatggagagacctgccccgccttcgtgtctgcctgttcctgttcctcagagacccctgggcccccaggacctcaaggacccccaggcctccctgggaggaatggcaccccaggagagcagggcttcccagggcccaggggtccaccaggggtcaaaggagagaagggagaccatgggcttccaggcttgcagggccaccccggccaccagggcatccccgggagagttggcctccagggaccaaagggaatgagaggcctggagggaactgctggcctgcctggaccccctggccccagggggttccagggcatggcaggggccaggggcactagtggagagcgaggacctccagggaccgtggggcccacaggactgccagggcccaaaggggaacgaggagagaagggcgagccgcagtcccttgccaccctctaccagcttgtgagccaggcctcacacgtgtcaaagttcgactccttccacgagaacaccaggccccccatgcccatcttggagcagaagctggagccgggcactgagcccctggggtcccctggcacccgcagcaaggccctggttcctggagaatgggggcgtggtggccgccaccttgagggcagaggggagcctggagctgttggtcagatgggcagccctgggcagcagggggctagcacccagggcctctgggagtgacaggacattttctgcactgccccgaggaacgctgagccttcctccctgggtttgtctggacaccgagagcgaccacatcctggagaagccaggagaaaagctcaggaagagcctgcaggtggaaggagagggaagcagcggcctcggccaaggcccaccccatactcttggctctgtagcatttccaagttcagataaacccctgagtgctcaccca

SEQ ID NO: 734518 - DNA, 1863 bp, Homo sapiens
ccacggtgagcaggagcccaccctccaacctggccctggcctcggagacccccgacagcctgcaggtcagctggacgcccccgcttggccgcgtgctccattactggctcacctacgcccccgcctctggcttgggacccgagaaatccgtctctgtgccaggagccaggagccacgtgacactgcccgacctgcaggcagccacgaagtacagggtcctggtctcagctatctatgcagcaggcaggagtgaggctgtgtctgccacgggccagacagcctgcccagccctccgccctgacggctccctcccagggtttgacctgatggtggccttcagcctggtggaaaaggcttatgcgtccatccggggcgtggccatggagccctctgccttcggtgggaccccgaccttcacgctcttcaaggacgcccagctgacaagacgggtcagtgacgtctacccagcccccctacctccagagcacaccatcgtcttccttgtgcgcctacttcccgagacaccccgtgaggccttcgcgctgtggcagatgacagccgaggacttccagcccctccttggggttctgctggatgccgggaagaagtccctgacctacttccaccgtgaccccagggctgccttgcaggaggccaccttcgacccgcaggaagtgaggaagattttcttcgggagcttccacaaggtgcacgtggctgtgggccgctccaaggtcaggctctatgtggactgccggaaggtggctgagcggccccttggggagatgggcagcccacccgctgccggcttcgtcacgctggggaggctggccaaggccaggggcccccggagcagttcggccgcgtttcagctccagatgctgcagatcgtgtgcagtgacacctgggccgatgaggaccggtgctgtgagctccctgcctcgagggatggagagacctgccccgccttcgtgtctgcctgttcctgttcctcagagacccctgggcccccaggacctcaaggacccccaggcctccctgggaggaatggcaccccaggagagcagggcttcccagggcccaggggtccaccaggggtcaaaggagagaagggagaccatgggcttccaggcttgcagggccaccccggccaccagggcatccccgggagagttggcctccagggaccaaagggaatgagaggcctggagggaactgctggcctgcctggaccccctggccccagggggttccagggcatggcaggggccaggggcactagtggagagcgaggacctccagggaccgtggggcccacaggactgccagggcccaaaggggaacgaggagagaagggcgagccgcagtcccttgccaccctctaccagcttgtgagccaggcctcacacgtgtcaaagttcgactccttccacgagaacaccaggccccccatgcccatcttggagcagaagctggagccgggcactgagcccctggggtcccctggcacccgcagcaaggccctggttcctggagaatgggggcgtggtggccgccaccttgagggcagaggggagcctggagctgttggtcagatgggcagccctgggcagcagggggctagcacccagggcctctgggagtgacaggacattttctgcactgccccgaggaacgctgagccttcctccctgggtttgtctggacaccgagagcgaccacatcctggagaagccaggagaaaagctcaggaagagcctgcaggtggaaggagagggaagcagcggcctcggccaaggcccaccccatactcttggctctgtagcatttccaagttcagataaacccctgagtgctcaccca

SEQ ID NO: 734519 - DNA, 1827 bp, Homo sapiens
ccacggtgagcaggagcccaccctccaacctggccctggcctcggagacccccgacagcctgcaggtcagctggacgcccccgcttggccgcgtgctccattactggctcacctacgcccccgcctctggcttgggacccgagaaatccgtctctgtgccaggagccaggagccacgtgacactgcccgacctgcaggcagccacgaagtacagggtcctggtctcagctatctatgcagcaggcaggagtgaggctgtgtctgccacgggccagacagcctgcccagccctccgccctgacggctccctcccagggtttgacctgatggtggccttcagcctggtggaaaaggcttatgcgtccatccggggcgtggccatggagccctctgccttcggtgggaccccgaccttcacgctcttcaaggacgcccagctgacaagacgggtcagtgacgtctacccagcccccctacctccagagcacaccatcgtcttccttgtgcgcctacttcccgagacaccccgtgaggccttcgcgctgtggcagatgacagccgaggacttccagcccctccttggggttctgctggatgccgggaagaagtccctgacctacttccaccgtgaccccagggctgccttgcaggaggccaccttcgacccgcaggaagtgaggaagattttcttcgggagcttccacaaggtgcacgtggctgtgggccgctccaaggtcaggctctatgtggactgccggaaggtggctgagcggccccttggggagatgggcagcccacccgctgccggcttcgtcacgctggggaggctggccaaggccaggggcccccggagcagttcggccgcgtttcagctccagatgctgcagatcgtgtgcagtgacacctgggccgatgaggaccggtgctgtgagctccctgcctcgagggatggagagacctgccccgccttcgtgtctgcctgttcctgttcctcagagacccctgggcccccaggacctcaaggacccccaggtccaccaggggtcaaaggagagaagggagaccatgggcttccaggcttgcagggccaccccggccaccagggcatccccgggagagttggcctccagggaccaaagggaatgagaggcctggagggaactgctggcctgcctggaccccctggccccagggggttccagggcatggcaggggccaggggcactagtggagagcgaggacctccagggaccgtggggcccacaggactgccagggcccaaaggggaacgaggagagaagggcgagccgcagtcccttgccaccctctaccagcttgtgagccaggcctgtgagtctgccattcagacacacgtgtcaaagttcgactccttccacgagaacaccaggccccccatgcccatcttggagcagaagctggagccgggcactgagcccctggggtcccctggcacccgcagcaaggccctggttcctggagaatgggggcgtggtggccgccaccttgagggcagaggggagcctggagctgttggtcagatgggcagccctgggcagcagggggctagcacccagggcctctgggagtgacaggacattttctgcactgccccgaggaacgctgagccttcctccctgggtttgtctggacaccgagagcgaccacatcctggagaagccaggagaaaagctcaggaagagcctgcaggtggaaggagagggaagcagcggcctcggccaaggcccaccccatactcttggctctgtagcatttccaagttcagataaacccctgagtgctcaccca

SEQ ID NO: 734520 - DNA, 8044 bp, Homo sapiens
  misc_feature (1927)..(1927): n is a, c, g, or t
gtcagggagaggacagacggggggacggctgaagggcatggcctcttccctgccacagcccgagcaccatgagctccggagaccctgcacacctcggcctctgcctctggctgtggctgggcgccaccctgggaagagagcaagttcaagcaagcggtctcctgaggctggctgtgctgcctgaggaccggctgcagatgaagtggagagagtcggaggggagcggcctcggctacctggtgcaggtgaagcccatggcaggggactcggaacaggaggtgatactgaccaccaagacccctaaggccacagtggggggcctgagcccctccaagggctacaccttgcagatcttcgagctcactggctctgggcgcttcctgctagctcggagggagtttgtgattgaggatctgaagagtagctccctggacaggagcagccagaggcccctcggctctggagccccggagcccaccccctcacacacacggggagcccagaccctgagcaggcttctgagccccaagttgccttcacaaccaagccaggatccgcgcactcctggtgggtcagagtggagagagaccggcccccagtaccgctgcctgccccccgtgcctgctgacatggtcttcctggtggacgggtcctggagcattggccacagtcacttccagcaggtcaaggacttcctggccagtgtcatcgcaccctttgaaatcgggccggataaggtccaagtaggcctgactcagtacagcggggatgctcagactgagtgggacctgaactccctcagcaccaaggaacaggtgctggcagctgtgcgccgcctccgctacaagggggggaacacgttcacaggccttgccctgacccacgtgctggggcagaacctgcagccggcggctggcctccgtccagaggcagccaaggtggtgattctggtgacggacggcaagtcccaggacgatgtgcacactgctgcccgtgtcctcaaggacctgggcgtgaacgtcttcgctgtgggtgtgaagaacgccgatgaggctgagctgaggctcctggcgtccccgccgagggacatcaccgtccacagcgtgctggacttcctgcagctcggcgcgctggctggcctgctcagccgtctcatctgccagaggctccagggtgggagcccgcggcagggcccagcagcggctccagccctggacaccctccctgcccccaccagcctggtcctgagccaggtgacctcctccagcatccgcctgtcctggactccagccccccggcaccccctcaagtatctgatcgtttggcgagcctctagaggtggcacccccagggaggtggtggtggaggggcccgccgcctccacggagctgcacaacctggcctcccgcacagagtacctggtctccgtgttccccatctatgagggcggggttggcgaaggcctgcggggcctggtgaccacagcacctctgcctccgccccgggcgctgaccctggccgcagtgacgcccagaaccgtccacctcacctggcagccctcggccggggccacccactacctggtgcgatgttctcctgcttcccccaagggtgaagaggaggagcgagaggtgcaggtcgggcggcccgaggtgctgctggatggcctggaacctggcagggactatgaggtctcggtgcagagcctgcgaggccctgagggcagcgaggcccggggcatccgtgccaggacccccaccctggcccccccgagacacctgggcttctcagacgtgagccacgacgcggcacgagtgttctgggagggtgccccgaggcctgtgcgcctggtcagggtcacctatgtgtccagcgagggtggacactcggggcagacagaggctcctgggaacgccacctcggccangctggggcctctctcttcctccaccacctacactgtccgtgtcacctgcctctaccctgggggtggctcctctacgctgactggccgggtgaccaccaagaaagctcccagcccaagccagctgtccatgacggagctgccaggggatgcagtccagctggcgtgggtggccgcagccccgtctggcgtgcttgtctaccagatcacgtggacgcccctgggagaggggaaggctcacgagatctctgtcccagggaacctcggcacggccgtcctgcctggcctagggaggcacacagagtacgacgtcaccatcttggcctactacagggacggggcccgcagtgaccctgtgtccctccgctataccccctccacggtgagcaggagcccaccctccaacctggccctggcctcggagacccccgacagcctgcaggtcagctggacgcccccgcttggccgcgtgctccattactggctcacctacgcccccgcctctggcttgggacccgagaaatccgtctctgtgccaggagccaggagccacgtgacactgcccgacctgcaggcagccacgaagtacagggtcctggtctcagctatctatgcagcaggcaggagtgaggctgtgtctgccacgggccagacagcctgcccagccctccgccctgacggctccctcccagggtttgacctgatggtggccttcagcctggtggaaaaggcttatgcgtccatccggggcgtggccatggagccctctgccttcggtgggaccccgaccttcacgctcttcaaggacgcccagctgacaagacgggtcagtgacgtctacccagcccccctacctccagagcacaccatcgtcttccttgtgcgcctacttcccgagacaccccgtgaggccttcgcgctgtggcagatgacagccgaggacttccagcccctccttggggttctgctggatgccgggaagaagtccctgacctacttccaccgtgaccccagggctgccttgcaggaggccaccttcgacccgcaggaagtgaggaagattttcttcgggagcttccacaaggtgcacgtggctgtgggccgctccaaggtcaggctctatgtggactgccggaaggtggctgagcggccccttggggagatgggcagcccacccgctgccggcttcgtcacgctggggaggctggccaaggccaggggcccccggagcagttcggccgcgtttcagctccagatgctgcagatcgtgtgcagtgacacctgggccgatgaggaccggtgctgtgagctccctgcctcgagggatggagagacctgccccgccttcgtgtctgcctgttcctgttcctcagagacccctgggcccccaggacctcaaggacccccaggcctccctgggaggaatggcaccccaggagagcagggcttcccagggcccaggggtccaccaggggtcaaaggagagaagggagaccatgggcttccaggcttgcagggccaccccggccaccagggcatccccgggagagttggcctccagggaccaaagggaatgagaggcctggagggaactgctggcctgcctggaccccctggccccagggggttccagggcatggcaggggccaggggcactagtggagagcgaggacctccagggaccgtggggcccacaggactgccagggcccaaaggggaacgaggagagaagggcgagccgcagtcccttgccaccctctaccagcttgtgagccaggcctgtgagtctgccattcagacacacgtgtcaaagttcgactccttccacgagaacaccaggccccccatgcccatcttggagcagaagctggagccgggcactgagcccctggggtcccctggcacccgcagcaaggccctggttcctggagaatgggggcgtggtggccgccaccttgagggcagaggggagcctggagctgttggtcagatgggcagccctgggcagcagggggctagcacccagggcctctgggagtgacaggacattttctgcactgccccgaggaacgctgagccttcctccctgggtttgtctggacaccgagagcgaccacatcctggagaagccaggagaaaagctcaggaagagcctgcaggtggaaggagagggaagcagcggcctcggccaaggcccaccccatactcttggctctgtagcatttccaagttcagataaacccctgagtgctcacccagccaagcgaggcgggagtcatttcctgggagagtgtcccccaccctggctctgtgcaccccaccttgaggccctgcagcttcagccgcagtggggaaggggaggggctgggctgatggcgaatcgggttcaggagggcagcagtgccctgtggccgtctcagtagctctaaaacaggctcaacaacatgccccgcccctttctctgggcctcatctaagcctggccagggccctgtgggcccgcctctctctgcgcctcacgcaggcaacagatggttccactgctggcccaccagtcacctgcacgatggctcctccctcagaacagcactcccaccccggccccagcaccttcacatctgggcacaggcaggtccctgcctgcctcatcgtcccctctgtccccagcccaagaaggagttcagatcctgtgtgtgaatggccacccctcacccacccagccctgtgctgagttccttgtgcagggacattgctttgagacttggcaccatcagcccctggtccttagggtctcagagcaaggtcatccctcagcaggcttctggcctgtgcgctcctcagcacctctgcccaggtctctcccaaccatcacagacgctgtgtgagcctggacttcctgccttatccccactgtggcccaaacagcatgggggcaagctcagaacacacacctgggcttctgggccttgtggcccgtgggggtgatgtgggaacttctacttcctttccaaacaaatattcagtaactagtccactgttaccacttaggcagctaagcaagaaaggtgccagaaatgaagagggaagccatatcattgaggagagaatgaaaagtattaaaaaggaacaaagagagacccttgatattgacagaaggaaaacccaccaagatcaccagtgcagcattgcgtgcaccaaagcataccccaaagaggtgagcgcaaaacagcttcagggcaaacacttcatctatgattcaactgttccaggaactgaccagacctggagaccaaatagagagtcataggcagggtcagcaggatgggagagagcgcctgcacccacaggagccacagccctgactgaggccaggaagcagccccaaatgccagctcccactgcagcatgagaacagaaacagaccactgaaaattcccaaagtctgtggacaaatcagacgtcgaagaagtcacgtggcatcgagacagattttgcactgagggacaaggagagcatgtggccaaagtaggtgcaggtaaagcagcatctggggcagagttatagccttcagtgcaggtatcagacacagttgttgagagcagcagcccaagccagcccctccgtcctgcagggaggacacctaggtcacttggcttctgttggggagctgagttgcttcagattgtgtgaccagcaaaacagcttggttgctctcacttggtttctccagggcggggaattacatgtccccagctgaactgagaaggctctttgagcagtggagtgagcaggctttgtcatgaggcaggagtggggctagaatcaagcccagagcccacagggcatccagagccttccaaaggagcccctctcctggggctctccaatttgatgaagggactgggcactgggtggctgagaccacattggcagccaggaggaggcagcctggccggggggaaccagggtggctctaatccccaccaccccctcagctgccctacccccgccacgctggtgtgacaccagtgatgctcagcctcaaaaggggagtccggctgtcttcgggaaactgactttatgctggaggccaattaaaatggcacagcaaaggcagcggccagctggtgcccaggcagcttagggactggtccctgaggccccacccgccccagcctgtgcagtggagctgagtacgaatcaaaggtgaggatggcaagggagctgagagcagcctccggatgcaccaaaccggcctggctcctgtttgcaggaaggcagcctccccgagacccagccgacctgcacgtctcccatcagccccgactccaccgcatccctctgggtccttttaggagcccccagggactgagccggggctcacgctcctggccagagcgctgggtttctggcaatgcctcccctcctgcctttacggccacagctctcccctccagaggcccctctgtagtgggcctcggtcccctctccacccccagaggcagcacagcttcagccctacgcagtgtgggggctccgggaggaaatgcagggaggtgcttggtcttggcccagagctcatggccttaggtgctgcccccagtcacccccgtgcccatgcagccggggatgttcagctcaggccagccaccgaggtggtgtgacgcaaggctgatctgacgctcagctcaggccgctggggtcatgggggttgtgggaaggtcatggaatcacggggctcacgctggggtcacagggtggtgtggctgtgtggactgtaaggggcgtgcagccatgcgtatctgacctgccctccctaggtctgcaggcagtgccgagtggctctgcctgaggccccaagagcgaccttggaagctccaggccttcacagcccctctgagagccacctgcaaggtggggagctgggaagaacggctcagtgatgagctcagagggaggggtgggcacagcgcccaggaaggcgggtgcgtgcaggcctgggaggaatgtgtagcaggaggcagggggtgctgtgcccgcaggaccagcaggtgaggcgtgtccacccacaggatggctctggcccaggcagtgtcagaaatggaagctgaggaaacccaaccccagctgtagaggagcctgccccgatgccatctgcacctggggggcgacgtatggctgccagcctcttcatctaccaaggaccagggcagtggggacgggagagctgggacacgtggactcacaccagggcagatggtgggggaagccagtgtctgtagattcagtgcatttcttggggaagggcgtggaacatttggacttgagccccagcacagagacgatgtcataatacagccccccatcgtgatctgatggtaagtacagaactccttgcccagtggagaaacactctcctctcatgtgtggaatatccacacactaaccatgaactgggccataagaaaccttacattccaaaggatcctgctgttcagaactcactcactcactgatgaaactggaaaaacaaccaatgataacaagctaaagaatgcctctagaagctaaaagacacacccatgactccacagtaattcatgggttaaagagaaaaaaggaaacgtgaagatacttgtaaccaaataatgatggatgcagcgccacgtcagaatctctgtgctgcagctgcagtggtacctagagggcaatttatagctgtaaatacagtgctttgttttgttttcttgttttttgagacaaggtcttgctctgtcacccaggctggagtacagtggcatgatctcggctcaatgcaacctctgtgccaccctgggctcaagtggtcctcctgctccggtcttctgagtagcaggaaccacaggcgtgcgccaccacgcttggctaatgttttttgtatttttttaaatagagacagggtgttgccgtgttacccaggctggtcttgaacttctgagctcaaacgatccaccctccttggcctcccaaagtggtgggattacaggtgtgagtcacctcaccggcccttaaacacagtttttagggaagattccaactcaaacaattttaaatagtagaaaataaaccctgaagcagtgtg

SEQ ID NO: 734521 - DNA, 2194 bp, Homo sapiens
ccacggtgagcaggagcccaccctccaacctggccctggcctcggagacccccgacagcctgcaggtcagctggacgcccccgcttggccgcgtgctccattactggctcacctacgcccccgcctctggcttgggacccgagaaatccgtctctgtgccaggagccaggagccacgtgacactgcccgacctgcaggcagccacgaagtacagggtcctggtctcagctatctatgcagcaggcaggagtgaggctgtgtctgccacgggccagacagcctgcccagccctccgccctgacggctccctcccagggtttgacctgatggtggccttcagcctggtggaaaaggcttatgcgtccatccggggcgtggccatggagccctctgccttcggtgggaccccgaccttcacgctcttcaaggacgcccagctgacaagacgggtcagtgacgtctacccagcccccctacctccagagcacaccatcgtcttccttgtgcgcctacttcccgagacaccccgtgaggccttcgcgctgtggcagatgacagccgaggacttccagcccctccttggggttctgctggatgccgggaagaagtccctgacctacttccaccgtgaccccagggctgccttgcaggaggccaccttcgacccgcaggaagtgaggaagattttcttcgggagcttccacaaggtgcacgtggctgtgggccgctccaaggtcaggctctatgtggactgccggaaggtggctgagcggccccttggggagatgggcagcccacccgctgccggcttcgtcacgctggggaggctggccaaggccaggggcccccggagcagttcggccgcgtttcagctccagatgctgcagatcgtgtgcagtgacacctgggccgatgaggaccggtgctgtgagctccctgcctcggtgtgccccgtcccttgcccctgttccacgaagcaagttagggcaagtgcccactgagggtcacagtgcctgggagggatggagagacctgccccgccttcgtgtctgcctgttcctgttcctcagagacccctgggcccccaggacctcaaggacccccagttccagcgccccacaggtgacggctggggcttccagagctggctctgggaccggtcaagcacactctctctgagctcagtgtccacagccttgtctactcagggggccggggtttgaacccagaactgcctgactatgagagggcctccctgggaggaatggcaccccaggagagcagggcttcccagggcccaggggagagcccgggccacccggacagatgggaccagaaggtcctggaggccagcagggctcgccggggacccagggccgtgcagtccaggggcctgtgggtccaccaggggtcaaaggagagaagggagaccatgggcttccaggcttgcagggccaccccggccaccagggcatccccgggagagttggcctccagggaccaaagggaatgagaggcctggagggaactgctggcctgcctggaccccctggccccagggggttccagggcatggcaggggccaggggcactagtggagagcgaggacctccagggaccgtggggcccacaggactgccagggcccaaaggggaacgaggagagaagggcgagccgcagtcccttgccaccctctaccagcttgtgagccaggcctgtgagtctgccattcagacacacgtgtcaaagttcgactccttccacgagaacaccaggccccccatgcccatcttggagcagaagctggagccgggcactgagcccctggggtcccctggcacccgcagcaaggccctggttcctggagaatgggggcgtggtggccgccaccttgagggcagaggggagcctggagctgttggtcagatgggcagccctgggcagcagggggctagcacccagggcctctgggagtgacaggacattttctgcactgccccgaggaacgctgagccttcctccctgggtttgtctggacaccgagagcgaccacatcctggagaagccaggagaaaagctcaggaagagcctgcaggtggaaggagagggaagcagcggcctcggccaaggcccaccccatactcttggctctgtagcatttccaagttcagataaacccctgagtgctcaccca

SEQ ID NO: 734522 - DNA, 1602 bp, Homo sapiens
gcgttcgcagccgccggtcatcccgcggaggagcgcgcaccccggggaggccggaggacgcgcccatagaatgcccaggggcgacaaactgtcctgagcccctctggtgcagccacctgcctgtcccatacgccccgcccaccatggagtccagagggaagtcagccagcagccccaagcccgacaccaaggtgccccaggtcaccaccgaggccaaggtacccccggcagccgatgggaaagcccccttgaccaagccctcgaagaaggaggccccggccgagaagcagcagccgccagcagcccccaccacggcacctgccaagaagacctcggccaaggccgaccctgcccttctcaacaaccacagcaacctgaagccagcccccacggtccccagcagtcccgatgcaaccccggagcccaagggtcctggggacggggcggaggaagatgaggctgccagtggggggcctgggggccgaggtccctggtcctgtgagaacttcaaccccctgctggtggctgggggtgtggccgtggcagccatagccctgattctcggtgtggccttcctggtccggaaaaaataatacctgggggccaggcggggggcacggagccacttcctgtacagacccgaggaagccagtgcatgcagagttcacccttacctattcgtacacacgcacattcattacacacctacatacgcccccaacacacgcgcacggtgaagaggacgcccgagcccacccctgctgacccaggacttccccaacctccagggcagaaagagcccaggctccggggtccacagcacaggatgtggggcgagggcacagctggggaacggcaagaaaggaatggaccctgtgtgtggccccccccacccctggcggctgggtgatcctgggcccccagggctggtctgagtgcaggtgggggtgccgggatgggttgggcctgggcccggccctcgtggggacattaaagggcgcggtggctccactcgccccatttctgctctttgcgtaccccccgggggtctgcctgggcgaatgcagtgggacggacctggggtgggcactcacctcagcagagcctcaatgccacctccccacaccacccaagcctagctgggtgggaagacggagccctgaagcctgcgtgtggagggggtgctgcccaagggtcgccttccccagcttgtgctccaggggagccccgacgccggcggggaggcagggatgtcgagggcccctcacagctgtgcccgccctgccccgctagactgcccctccagcttgcacccagcaccacctgagtctaaccagcgtataatgcaataacaggtagagtagaactgcttttggcggcgaccgtcacacactgtcctcagcccactgcacctggggaagcccctcgtgcagcccctccttagcacatccagtcccagcgtggcccttggcgcgcagcagcaggcgaactcccagaaggtggtggtgggcactgtgagaacgtggcctgccctcactgccagtggccacaggaaccccgggcctgagtggaggctgagtctgaaataaactctgtcgtctg

SEQ ID NO: 734523 - DNA, 381 bp, Homo sapiens; identical to SEQ ID NO: 667361

SEQ ID NO: 734524 - DNA, 1186 bp, Homo sapiens
gcgttcgcagccgccggtcatcccgcggaggagcgcgcaccccggggaggccggaggacgcgcccatagaatgcccaggggcgacaaactgtcctgagcccctctggtgcagccacctgcctgtcccatacgccccgcccaccatggagtccagagggaagtcagccagcagccccaagcccgacaccaaggtgccccaggtcaccaccgaggccaaggtacccccggcagccgatgggaaagcccccttgaccaagccctcgaagaaggaggccccggccgagaagcagcagccgccagcagcccccaccacggcacctgccaagaagacctcggccaaggccgaccctgcccttctcaacaaccacagcaacctgaagccagcccccacggtccccagcagtcccgatgcaaccccggagcccaagggtcctggggacggggcggaggaagatgaggctgccagtggggggcctgggggccgaggtccctggtcctgtgagaacttcaaccccctgctggtggctgggggtgtggccgtggcagccatagccctgattctcggtgtggccttcctggtccggaaaaaataatacctgggggccaggcggggggcacggagccacttcctgtacagacccacccagcaccacctgagtctaaccagcgtataatgcaataacaggtagagtagaactgcttttggcggcgaccgtcacacactgtcctcagcccactgcacctggggaagcccctcgtgcagcccctccttagcacatccagtcccagcgtggcccttggcgcgcagcagcaggcgaactcccagaaggtggtggtgggcactgtgagaacgtggcctgccctcactgccagtggccacaggaaccccgggcctgagtggaggctgagtctgaaataaactctgtcgtctgaaaaaaaaaaaactcaaccaactacaaaggggccgcgactacaaaaaacaccccgaagagcccaaacaaaacagacaccatatcgcgatcaagaccggcccaagaagagacataataacacgagcgaggccgcgaaacaacgacgtggtcggcgagagctagcacgcgactacgagcagggaaccaccagcggcggcaagaagacgcacaacagaaaaccgacgcaccaaacgacggcgacaacgcatcgtagc

SEQ ID NO: 734525 - DNA, 1856 bp, Homo sapiens
gcgttcgcagccgccggtcatcccgcggaggagcgcgcaccccggggaggccggaggacgcgcccatagaatgcccaggggcgacaaactgtcctgagcccctctggtgcagccacctgcctgtcccatacgccccgcccaccatggagtccagagggaagtcagccagcagccccaagcccgacaccaaggtgccccaggtcaccaccgaggccaaggtacccccggcagccgatgggaaagcccccttgaccaagccctcgaagaaggaggccccggccgagaagcagcagccgccagcagcccccaccacggcacctgccaagaagacctcggccaaggccgaccctgcccttctcaacaaccacagcaacctgaagccagcccccacggtccccagcagtcccgatgcaaccccggagcccaagggtcctggggacggggcggaggaagatgaggctgccagtggggggcctgggggccgaggtccctggtcctgtgagaacttcaaccccctgctggtggctgggggtgtggccgtggcagccatagccctgattctcggtgtggccttcctggtccggaaaaaataatacctgggggccaggcggggggcacggagccacttcctgtacagacccgaggaagccagtgcatgcagagttcacccttacctattcgtacacacgcacattcattacacacctacatacgcccccaacacacgcgcacggtgaagaggacgcccgagcccacccctgctgacccaggacttccccaacctccagggcagaaagagcccaggctccggggtccacagcacaggatgtggggcgagggcacagctggggaacggcaagaaaggaatggaccctgtgtgtggccccccccacccctggcggctgggtgatcctgggcccccagggctggtctgagtgcaggtgggggtgccgggatgggttgggcctgggcccggccctcgtggggacattaaagggcgcggtggctccactcgccccatttctgctctttgcgtaccccccgggggtctgcctgggcgaatgcagtgggacggacctggggtgggcactcacctcagcagagcctcaatgccacctccccacaccacccaagcctagctgggtgggaagacggagccctgaagcctgcgtgtggagggggtgctgcccaagggtcgccttccccagcttgtgctccaggggagccccgacgccggcggggaggcagggatgtcgagggcccctcacagctgtgcccgccctgccccgctagactgcccctccagcttgcacccagcaccacctgagtctaaccagcgtataatgcaataacaggtagagtagaactgcttttggcggcgaccgtcacacactgtcctcagcccactgcacctggggaagcccctcgtgcagcccctccttagcacatccagtcccagcgtggcccttggcgcgcagcagcaggcgaactcccagaaggtggtggtgggcactgtgagaacgtggcctgccctcactgccagtggccacaggaaccccgggcctgagtggaggctgagtctgaaataaactctgtcgtctgaaaaaaaaaaaactcaaccaactacaaaggggccgcgactacaaaaaacaccccgaagagcccaaacaaaacagacaccatatcgcgatcaagaccggcccaagaagagacataataacacgagcgaggccgcgaaacaacgacgtggtcggcgagagctagcacgcgactacgagcagggaaccaccagcggcggcaagaagacgcacaacagaaaaccgacgcaccaaacgacggcgacaacgcatcgtagc

SEQ ID NO: 734526 - DNA, 1189 bp, Homo sapiens
gcgttcgcagccgccggtcatcccgcggaggagcgcgcaccccggggaggccggaggacgcgcccatagaatgcccaggggcgacaaactgtcctgagcccctctggtgcagccacctgcctgtcccatacgccccgcccaccatggagtccagagggaagtcagccagcagccccaagcccgacaccaaggtgccccaggtcaccaccgaggccaaggtacccccggcagccgatgggaaagcccccttgaccaagccctcgaagaaggaggccccggccgagaagcagcagccgccagcagcccccaccacggcacctgccaagaagacctcggccaaggccgaccctgcccttctcaacaaccacagcaacctgaagccagcccccacggtccccagcagtcccgatgcaaccccggagcccaagggtcctggggacggggcggaggaagatgaggctgccagtggggggcctgggggccgaggtccctggtcctgtgagaacttcaaccccctgctggtggctgggggtgtggccgtggcagccatagccctgattctcggtgtggccttcctggtccggaaaaaataatacctgggggccaggcggggggcacggagccacttcctgtacagacccgaggaagccagtgcatgcagagttcacccttacctattcgtacacacgcacattcattacacacctacatacgcccccaacacacgcgcacggtgaagaggacgcccgagcccacccctgctgacccaggacttccccaacctccagggcagaaagagcccaggctccggggtccacagcacaggatgtggggcgagggccgagggcccctcacagctgtgcccgccctgccccgctagactgcccctccagcttgcacccagcaccacctgagtctaaccagcgtataatgcaataacaggtagagtagaactgcttttggcggcgaccgtcacacactgtcctcagcccactgcacctggggaagcccctcgtgcagcccctccttagcacatccagtcccagcgtggcccttggcgcgcagcagcaggcgaactcccagaaggtggtggtgggcactgtgagaacgtggcctgccctcactgccagtggccacaggaaccccgggcctgagtggaggctgagtctgaaataaactctgtcgtctg

SEQ ID NO: 734527 - DNA, 1421 bp, Homo sapiens
  misc_feature (71)..(71): n is a, c, g, or t
  misc_feature (73)..(74): n is a, c, g, or t
  misc_feature (79)..(80): n is a, c, g, or t
ttaactttaaccttcttaaatatttggagatgaatgataattgtaatatttgtttgcattaccttgctctncnncaccnncagccaccagcagggggtgtggccgtggcagccatagccctgattctcggtgtggccttcctggtccggaaaaaataatacctgggggccaggcggggggcacggagccacttcctgtacagacccgaggaagccagtgcatgcagagttcacccttacctattcgtacacacgcacattcattacacacctacatacgcccccaacacacgcgcacggtgaagaggacgcccgagcccacccctgctgacccaggacttccccaacctccagggcagaaagagcccaggctccggggtccacagcacaggatgtggggcgagggcacagctggggaacggcaagaaaggaatggaccctgtgtgtggccccccccacccctggcggctgggtgatcctgggcccccagggctggtctgagtgcaggtgggggtgccgggatgggttgggcctgggcccggccctcgtggggacattaaagggcgcggtggctccactcgccccatttctgctctttgcgtaccccccgggggtctgcctgggcgaatgcagtgggacggacctggggtgggcactcacctcagcagagcctcaatgccacctccccacaccacccaagcctagctgggtgggaagacggagccctgaagcctgcgtgtggagggggtgctgcccaagggtcgccttccccagcttgtgctccaggggagccccgacgccggcggggaggcagggatgtcgagggcccctcacagctgtgcccgccctgccccgctagactgcccctccagcttgcacccagcaccacctgagtctaaccagcgtataatgcaataacaggtagagtagaactgcttttggcggcgaccgtcacacactgtcctcagcccactgcacctggggaagcccctcgtgcagcccctccttagcacatccagtcccagcgtggcccttggcgcgcagcagcaggcgaactcccagaaggtggtggtgggcactgtgagaacgtggcctgccctcactgccagtggccacaggaaccccgggcctgagtggaggctgagtctgaaataaactctgtcgtctgaaaaaaaaaaaactcaaccaactacaaaggggccgcgactacaaaaaacaccccgaagagcccaaacaaaacagacaccatatcgcgatcaagaccggcccaagaagagacataataacacgagcgaggccgcgaaacaacgacgtggtcggcgagagctagcacgcgactacgagcagggaaccaccagcggcggcaagaagacgcacaacagaaaaccgacgcaccaaacgacggcgacaacgcatcgtagc

SEQ ID NO: 734528 - DNA, 1167 bp, Homo sapiens
  misc_feature (71)..(71): n is a, c, g, or t
  misc_feature (73)..(74): n is a, c, g, or t
  misc_feature (79)..(80): n is a, c, g, or t
ttaactttaaccttcttaaatatttggagatgaatgataattgtaatatttgtttgcattaccttgctctncnncaccnncagccaccagcagggggtgtggccgtggcagccatagccctgattctcggtgtggccttcctggtccggaaaaaataatacctgggggccaggcggggggcacggagccacttcctgtacagacccgaggaagccagtgcatgcagagttcacccttacctattcgtacacacgcacattcattacacacctacatacgcccccaacacacgcgcacggtgaagaggacgcccgagcccacccctgctgacccaggacttccccaacctccagggcagaaagagcccaggctccggggtccacagcacaggatgtggggcgagggcacagctggggaacggcaagaaaggaatggaccctgtgtgtggccccccccacccctggcggctgggtgatcctgggcccccagggctggtctgagtgcaggtgggggtgccgggatgggttgggcctgggcccggccctcgtggggacattaaagggcgcggtggctccactcgccccatttctgctctttgcgtaccccccgggggtctgcctgggcgaatgcagtgggacggacctggggtgggcactcacctcagcagagcctcaatgccacctccccacaccacccaagcctagctgggtgggaagacggagccctgaagcctgcgtgtggagggggtgctgcccaagggtcgccttccccagcttgtgctccaggggagccccgacgccggcggggaggcagggatgtcgagggcccctcacagctgtgcccgccctgccccgctagactgcccctccagcttgcacccagcaccacctgagtctaaccagcgtataatgcaataacaggtagagtagaactgcttttggcggcgaccgtcacacactgtcctcagcccactgcacctggggaagcccctcgtgcagcccctccttagcacatccagtcccagcgtggcccttggcgcgcagcagcaggcgaactcccagaaggtggtggtgggcactgtgagaacgtggcctgccctcactgccagtggccacaggaaccccgggcctgagtggaggctgagtctgaaataaactctgtcgtctg

SEQ ID NO: 734529 - DNA, 754 bp, Homo sapiens
  misc_feature (71)..(71): n is a, c, g, or t
  misc_feature (73)..(74): n is a, c, g, or t
  misc_feature (79)..(80): n is a, c, g, or t
ttaactttaaccttcttaaatatttggagatgaatgataattgtaatatttgtttgcattaccttgctctncnncaccnncagccaccagcagggggtgtggccgtggcagccatagccctgattctcggtgtggccttcctggtccggaaaaaataatacctgggggccaggcggggggcacggagccacttcctgtacagacccgaggaagccagtgcatgcagagttcacccttacctattcgtacacacgcacattcattacacacctacatacgcccccaacacacgcgcacggtgaagaggacgcccgagcccacccctgctgacccaggacttccccaacctccagggcagaaagagcccaggctccggggtccacagcacaggatgtggggcgagggccgagggcccctcacagctgtgcccgccctgccccgctagactgcccctccagcttgcacccagcaccacctgagtctaaccagcgtataatgcaataacaggtagagtagaactgcttttggcggcgaccgtcacacactgtcctcagcccactgcacctggggaagcccctcgtgcagcccctccttagcacatccagtcccagcgtggcccttggcgcgcagcagcaggcgaactcccagaaggtggtggtgggcactgtgagaacgtggcctgccctcactgccagtggccacaggaaccccgggcctgagtggaggctgagtctgaaataaactctgtcgtctg

SEQ ID NO: 734530 - DNA, 123 bp, Homo sapiens
gccatggagaagtgtaaagatgcaggattggccaagtccatcggggtgtccaacttcaaccacaggcagctggagatgatcctcaacaagccagggctcaagtacaagcctgtctgcaaccag

SEQ ID NO: 734531 - DNA, 81 bp, Homo sapiens
ccttctctctctctctccctctccctctcctgccagccaagtgaagacatgcttacttccccttcaccttccttcatgatg

SEQ ID NO: 734532 - DNA, 60 bp, Homo sapiens
tttatcatttcaggatctctctccgtggcagcagaaaatcagccatattcttattgcctg

SEQ ID NO: 734533 - DNA, 512 bp, Homo sapiens
gtgagtgtcatctatccaaacatctatgcagcaaacccagtgatcaccccagaaccggtgacctcaccaccaagttattccagtgagatccaagcaaataagtaaggctacagattctggaagcatctttcactgggaccaaaagaagtcctcctccctttctgggcttccataacccaggtcgttcctgttctgacagctgaggaaacgtctctcccactgtttgtactctcaccttcattcttcaattcagtctaggaaaccatgctgtttctctatcaagaagaagacagagattttaaacagatgttaaccaagagggactccctagggcacatgcatcagcacatatgtgggcatccagcctctggggccttggcacacacacattcgtgtgctctgctgcatgtgagcttgtgggttagaggaacaaatatctagacattcaatcttcactctttcaattgtgcattcatttaataaatagatactgagcattcaaaaaaaaaaag

SEQ ID NO: 734534 - DNA, 419 bp, Homo sapiens
gtgcagctggaggttcagaagaagtggcagcaatggcacctccgtgagttcccactgcaccccgtggcctccttcagcaacagcaccaaggccagccacttggagcagagccagggcacctgcaggaccagcatcatctgagaggctggagcagggtcacccatggacagagaccaagagaggtcctgcgaaggctgggcactgctgtgggacagccagtcttcccagcagacaccctgtgtcctccttcagctgaagatgcccctccccaggccttggactcttccgaagggatgtgaggcactgtggggcaggacaagggcctgggatttggttcgtttgctcttctgggaagagaagttcaggggtcccagaaagggacagggaaataaatggtgcctgggatgagattcaatcta

SEQ ID NO: 734535 - DNA, 3720 bp, Homo sapiens
gtgaagtgcttcttctgcatgattttggctgaagaatgctctgcatttccttgatttctatggagacctcagagctggttttgcttctgctgacacctcatctagcaccttctctacctcccagggtctttgcctctatctgtggtttggcattgtacctgggtacaggaagcctttgatgaacttaaaaggagagcctggagaatcatcctgatagactttgagtagaaatggctggacatacttcaaaccacatcttaacatggttcgagccatcactagaaggcaagtgctaacagtaaaggcttatttgcattttatttacatttaatggactgagcattggccaatttccatggcagaaaaatatatttcattttctaggcacaacttctggctgtcagacacttgctgcctttgaatcttgcagcaacatcactaaccacatcccagacatatttccaaatttcaacatctacccccaaaacataggtgtctgagagactccagcattttcggacttcttagtcttgagagtgccaggctatttatctcgaccagccaagctctggagagcaatgttgaatccctgagaagagagagcatggggcgtgctgatttaaaaacagaaaatgcaaagttggactgaaaatatccttagtcttccaagcaatctgcttaagggttccaaacttaccttaatttggtgagaaaagaagctgccctatttttctttcttcttcttctacaactggaaccagccatttccgaaaaccaccaccatggaggttgcaatggtgagtgcggagagctcagggtgcaacagtcacatgccttatggttatgctgcccaggcccgggcccgggagcgggagaggcttgctcactccagggcagctgcagcagctgctgttgcagcggccacagctgctgtcgaaggtagcgggggttctggtgggggctcccaccaccaccaccagtcacgcggggcctgtacctcccatgaccctcagagcagccggggtagtcggaggaggaggcgacagcggtctgagaagaagaaagcccactaccggcagagcagcttccctcattgctctgacctgatgcccagtggctctgaggagaagatcctgagggagctgagtgaggaggaggaagatgaggaggaggaggaagaggaggaagaggagggaaggttttactatagtgaagatgaccatggtgatgagtgttcctacacggatctgctgcctcaggatgagggcggtggcggctacagttcagtccgctacagtgactgttgtgaacgtgtggtgataaatgtgtcaggcctacgctttgagacccaaatgaaaactctggcccagtttccagagactttgttgggagaccctgaaaagaggactcagtactttgaccctttgcgcaatgagtatttttttgacaggaaccgccccagctttgatgccatcttgtattattatcaatcaggaggccgcctgaagaggccagtcaatgtcccctttgatatcttcactgaggaggtgaagttctatcagttgggggaggaggccctgttgaagtttcgggaggacgagggctttgtgagagaagaggaagacagggccctccccgagaatgaatttaaaaagcagatttggctcctctttgaatatccagagagctccagtcctgcaaggggcatagccattgtgtccgtcctggtcatcttaatctccattgtcatcttttgcctggaaaccttgcctgagtttagggacgacagggatctcgtcatggcactgagtgctggcgggcatggtgggttgttgaatgatacttcagcaccccatctggagaactcagggcacacaatattcaatgaccccttcttcatcgtggaaacagtctgtattgtatggttttcctttgagtttgtggttcgctgctttgcttgtcccagccaagcactcttcttcaaaaacatcatgaacatcattgacattgtctccattttgccttacttcatcacactgggcactgacctggcccagcaacaggggggtggcaatggtcagcagcagcaggccatgtcctttgccatcctcagaatcattcgtctggtccgagtattccggatcttcaaactctccaggcactccaaaggcctgcagatcctgggccacaccctcagagccagcatgcgggaactgggccttctgatcttcttcctcttcattggggtcatcctcttttctagtgctgtgtattttgcagaggcggatgaacctactacccatttccaaagcatcccagatgcattttggtgggctgtggtgaccatgacaactgtgggctatggggacatgaagcccatcactgtagggggcaagattgtcgggtccctgtgtgccattgcgggtgtcttaaccattgctttgccagtgccagtgattgtctctaactttaactatttctaccacagagagactgaaaatgaggaacagacacagctaacgcagaatgcagtcagttgtccatacctcccctctaatttgctcaagaaatttcggagctctacttcttcttccctgggggacaagtcagagtatctagagatggaagaaggagttaaggaatctctgtgtgcaaaggaggagaagtgtcagggaaagggggatgacagtgagacagataaaaacaactgttctaatgcaaaggctgtggagactgatgtgtgaatctttttccacctgccactgctcccccctcagcatctccaaatatatttatgcatagagagtgcagttatgaaaatgaaatatgcaaatgatccaatgcatacagtagtacactatttaatggttatacatggcataattgttactaaacttgtattacatatcaaataaatgatacatcttggagaagagggaggaataggagcaaatctatctttatatttttattagaatgcaagaattttgcacattaactggaaaagatgttaacagtaaagatggagagagagagtgtgtgcgtgtgtgtgtatatgtgtgtgtgtgtgaagtaaattgtcaatgttagtaattgtgcagtgaagggaaaagttggcattttgaagtatttactatgtaagaactaatgaatctgagcagtcatttatcagtgctttaacagcatatcgtatgtctttggattctgtagttgttttttaaaaattgtaagaaatactgtgtagagaaaaaagaaagtaaattatttaatagactataggtcacaattttatcttggatttaattaaaatttatttttaactggaaattaacttttaaaaaggctgcaagggcctttagaaattgattatattttgttattaattttgggaagacttaacagcaaatgtctaacattatagaataagtgaaattggagaatatgtaataagttttgtttgcaggtaacaggactggatttttttttctttgcactactttatatgctggagattgagagagacttcaaactgtgaatgtttactaatgtaacagttcaatgacaatcattggaagaatgatttctttagtcttattttattgtttttttttcattgtgtgagactaatgatcatgcagataacatcacaggattctctcctcttttaaaatctaaataactgattgacaaaggaattatgaagtaaaatttagcaactga

SEQ ID NO: 734536 - DNA, 739 bp, Homo sapiens; identical to SEQ ID NO: 262871

SEQ ID NO: 734537 - DNA, 306 bp, Homo sapiens
cacacagatatttttgttgtagtttcctttaaaggaataagcagctaataaagatgggttctatttatagtagtgaataaatatatttaaacatttaaaatttggtttctaaatttctatgtcttattctaatcactgatttgtaatgttatttattgtttcttttttcctacttaggtgaaatctattcttgaaagaagtaaagaggagctgtcccgaacagtgaagtgtcgtaatgcggccctgaaagagagtcagaagttgaaagaagacctcgaggctgtggaggacagggaaaacaagaag

SEQ ID NO: 734538 - DNA, 309 bp, Homo sapiens
gagaactgtcagaatgaggagatcctgaacagtctcaagtatgtccgtcctgggggtggataccagcccaccttcacccttgtccaaaaatgtgaggtgaatgggcagaacgagcatcctgtcttcgcctacctgaaggacaagctcccctacccttatgatgacccattttccctcatgaccgatcccaagctcatcatttggagccctgtgcgccgctcagatgtggcctggaactttgagaagttcctcatagggccggagggagagcccttccgacgctacagccgcaccttcccaaccatcaac

SEQ ID NO: 734539 - DNA, 222 bp, Homo sapiens
tatcagtccccttcactgcagagccttgcctttcccctctgcctgtttccttttcctctcccaaccctctggttggtgattcaacttgggctccaagacttgggtaagctctgggccttcacagaatgatggcaccttcctaaaccctcatgggtggtgtctgagaggcgtgaagggcctggagccactctgctagaagagaccaataaagggcaggtgtgg

SEQ ID NO: 734540 - DNA, 511 bp, Homo sapiens; identical to SEQ ID NO: 222694

SEQ ID NO: 734541 - DNA, 443 bp, Homo sapiens
ctccacttctgcatgcacggccagtggtcagccacgcctttcaggatcacgggcctccctggaaccaaaaactgctccctgaaatgctggagggacggacggtgcagccgggggactgttttttctaacttcacatctggaatcaaaccatggtccgcccttgctttctgtttaaaatcaaaacagaacaaaatagcaaccacctcaggaagtcgacatttgaggtattccaccaggaacctgtgtcaggggtaggagagcttagctgtcaagagtaccagtaacaacaatagacaacgtttgttattattactgctactattactatttgctcctcatgagatcaaggtggtttttttcttaaccatttcatcaaaaatgtttgtttcattataaactgctttcacagacattctgcaataaaggaaaacttactatctcca

SEQ ID NO: 734542 - DNA, 581 bp, Homo sapiens; identical to SEQ ID NO: 271814

SEQ ID NO: 734543 - DNA, 242 bp, Homo sapiens
tgatatctgtacaccagtgttcatagcggcattattcacaatagccaaaaggcggaaacaacccaaatgtccattgacgcatgaccagtgtgatagttaatttcatgtgtcaacttgaccagcccagggaatacccggatagctggtagaaaattatttctgggtatgtctgtgagagtgtttctggaagaggttagtatttgaatcagactgagtaaaaggatccaccctatccaacatag

SEQ ID NO: 734544 - DNA, 137 bp, Homo sapiens
gtacacagctgtggccatgcccatgctgtacaatacgcgctacagctccaagcgccgggtcaccgtcatgatctccatcgtctgggtcctgtccttcaccatctcctgcccactcctcttcggactcaataacgcag

SEQ ID NO: 734545 - DNA, 1860 bp, Homo sapiens
caggcgacttcttgagctgggctttgaacagctgcggcgcaagtggggacttagccgactcctgcttcctggaggggcctgcgcccacaccccctcccggcctcagctacagcggtagcttcttcattcaggcagtgcccgaacacccgcacgacccggaggcactcttcaacctcatgtcgggcgtcttaggcctggcacccttccccggtccagaggcagcagcgtccagatccccgctggatgccccttttcctgcggggtccgatgccttgctgccgggtccgccggacctttactccccggatctgggcgctgcccctttcccagaggcgttctgggaggcctcgccttgcgcgggtgccccctcgcagtgcctgtatgagcctcagctctccccgcccgacgtcaagcccggcctccggcggcctcccgcctcgccagcgctggacgctgtctctgccttcaagggtccctacgcgccctgggagctgctttctgtgggggccccagggaactgtgggtcacagggagactaccaggccgccccggaggctcgttttcccgtaatagggaccaagattgaggacttgctgtccatcagctgccctgcggaactgccggccgtcccagccaacagactctatcccagcggggcctatgacgctttcccgctggccccgggtgacttaggggagggggctgagggcctccctgggctcctgacccctcctagtggggagggagggagtagcggcgacggcggagagtttctggccagtacgcagcctcagctttccccgctgggccttcgcagcgccgccgcggcggacttccctaaacctctggtggcggacatccctggaagcagtggcgtggctgcaccacccgtgccgccgccgccgcccacccctttcccccaggccaaggcgcgacgcaaggggcgccgcggcggcaaatgcagcacgcgctgcttctgcccgcggccgcacgccaaggccttcgcttgcccggtggagagttgtgtgcggagctttgcgcgctccgacgagctcaatcgccacctgcgcatccacacgggccacaaacccttccagtgccgcatctgcctccgcaacttcagccgcagcgaccacctcaccacgcacgtgcgcacccacaccggcgagaagccttttgcttgcgacgtgtgcggccgccgcttcgcgcgcagcgatgagaagaaacggcacagcaaggtgcacctcaagcagaaggcgcgcgccgaggagcggctcaagggcctcggcttttactcgctgggcctctccttcgcttctctctgagcaagagatgggtttatgggttggggcgccgccgttcggcgcgcacgagttccgggccgttcccctccccgctcttcttccaactcctcctcgcacgcccgagggccggcctccggtcccgcttccagtttccttgaagcgcccgccgcacacgccctattcagcaccagctccgcggacagttcccgcggtccaggcgctgtcacccttgtcagccgcgctttgggggaagtcttctgagaccacccagtgaataggcactaccctgggattcaagacagtcttttgtaactggcacacgccccacgccttcctctataacccccagagacaggctggggcagcgccaaggcggtctcgcgcgggactttgtacagcagtgtcttatccagcagccattggatgtaacgttttgctttgggttttttttccttttgttgttgttaatttttgtaaagcagacgctactctcaagcagttgacaaaactgtttatttttgcaattaaaattattgtgctaaaagcttactgaatc

SEQ ID NO: 734546 - DNA, 75 bp, Homo sapiens
acatgctgatccacggactacagtttgtcatcaaggtctaagccttccaggaaggggctggcctctgctgagctg

SEQ ID NO: 734547 - DNA, 148 bp, Homo sapiens
cttcccagtgctcacagatggctggcccatgtgctggaagatgacacagttgccttctctccgaggaacctgccccctctcctttcccaccaggcgtgtgtaacatcccatgtgcctcacctaataaaatggctcttcttatgcatca

SEQ ID NO: 734548 - DNA, 111 bp, Homo sapiens
ctcacctttgtggattttctcacctatgatatcttggatcagaaccgtatatttgaccccaagtgcctggatgagttcccaaacctgaaggctttcatgtgccgttttgag

SEQ ID NO: 734549 - DNA, 139 bp, Homo sapiens
gctggaggggcgaggaccgggtataagaagcctcgtggccttgcccgggcagccgcaggttccccgcgcgccccgagcccccgcgccatgaagctcgccgccctcctggggctctgcgtggccctgtcctgcagctccg

SEQ ID NO: 734550 - DNA, 66 bp, Homo sapiens
tacatggatcaggccagtggaaatgtaaagaaggccctgaagctgatggggtcaaatgaaggtgaa

SEQ ID NO: 734551 - DNA, 20 bp, Homo sapiens
gtagaagccctcatgctgag

SEQ ID NO: 734552 - DNA, 161 bp, Homo sapiens
gtgaagaagcatctgcaggacctgtccggcaggatctccagagctcggcacaacgaactctgaaggcattggggagcccagcccggcagggaagaggccagcgtgaaggacctgggctcttggccgtggcatttccgtggacagcccgccgtcagggtggc

SEQ ID NO: 734553 - DNA, 517 bp, Homo sapiens
tgcttttcttctaaacggaaatgattttacagttatctgagtgtaccttttatagttagtagaaaatgattttaaagaatgtttagtattgtacttaaatggtatgcagaggcacagatgtaaggtttataactggaaataggtggtaagaaaaatatatagaaagcacaatgatttgaatatttttccacttaggatttcctaatctccttgtcatccaattcaagctcaagatgaagcacaattctttgatctccctttgccagttgaattttatagatcatctaatgttgagcacagtatgagaataaatattggggttgtcaacattactcagttactctttgtggtttagctctaacatttcaacaagttgtcaattaattgtatctgttgggttgtatataatgttgctcaaaataattaagtggacttccaaaaataagatttccattgtaacaggatgcattgtgatgggctttgacttacattaaagaaatgtggatagtcaactgca

SEQ ID NO: 734554 - DNA, 143 bp, Homo sapiens
ctccagccccaccgagtcactcactgtggaccctgcctctgaataatcaggaacggtggcttcagagacgtctcttgggccttccctctggccacgtctgcacccacccctcctgggcaccctcctagcctgccatccctcac

SEQ ID NO: 734555 - DNA, 42 bp, Homo sapiens
aggctggcatgggggcagccgctgcccctgcctgggtgttgc

SEQ ID NO: 734556 - DNA, 1795 bp, Homo sapiens
atggtttgtgtagagtggaggatgagagagcccatcctgagcatctaaagagctacagagtcatccagcaccaggacactcatagtgaggggaaaccaagaaggcacactgagcatggggcagctttcccacctggttccagttgtgggcaacagcaagaagtccatgtggcagagaagctgttcaaatgcagtgactgtgggaaggtgttcttaaaggcctttgccctccttgaccatctgataacgcattctgaagagagacccttcagatgcccaacaggcagaagtgctttcaagaagtcagctcatattaacccccgaaaaattcacactggagaaacagcccatgtgtgtaatgaatgtgggaaggccttcagttacccgtctaagctgaggaaacaccagaaggttcacacaggcataaaaccttttaagtgtagtgactgtggtaaaaccttcaaccgcaaagacgcacttgttctacaccagaggattcacactggagaaaggccttacgagtgcagcaaatgtggtaaaaccttcagtgttctgtctaccctcattcggcaccggaaagtgcacattggagaaaggccctatgagtgtgcagaatgtgggaagttctttaaatacaataatagcttcattcttcaccagagagttcacactggagaaaggccttttgaatgcaagcaatgtgggaaaggctacgtgacccgttcaggcctctatcagcactggaaagtccacactggggaacggccctatgaatgtagcctgtgtgggaaaaccttcactaccagatcctaccgcaatcggcaccagcagttccacactgaagagaggtcttatgaatgtacagagtgtgggaaggccttcaaacatagttccaccctccttcagcacaagaaagtccatactccagaaaggcgtcaggaggacagggcacatgggaaggtcgttagctgctagcaccgtgttcatcaggaaaggtcttattccagaaaggaggttaaggagagtggccgtgagagtgccatccgaaagaagctaaaccttgcacatcccaacacccaccccagggagagttcccgtgtgtgcctggtgtgtgggacgctttcgggagccacattgcactctgacttgcctggggctgttggcagtgtcacatcactgagtttatccaccgccatccacctctatccaccccataaggtccctacagcaagtgggacagcagaccttgtgctccttgctctaaacagtagagaatcgttaatagtggagcccaaaacaggcctcattccctacccttgactggtttagctgtggacatgacccacctctggccggaggagctgagctggtatctgctgggggcttcctgggaaggtttaccattttcatggaaatggttgacattacacatggtatttgtcatgccctagcatggactgtctcatactgctctggactatgtggtaataaaggctttattgtttaagccgcttaaaattttttttttattttttttttgagatggtcttattctgttgcccaggctggaatgcagtggtgccatcatagctcaccacagccttgaactgctggtctcaagggatcttcctgcttcagcctcctgagtagctggcactacaggtgtgcgccatcacacctggctaatttttttttttcatttgtggacagggtcttgctatattgcccaagctggtctcgaactctgagcctcaagctatcctcctgccttggcctcccaaagtgctgggagccac

SEQ ID NO: 734557 - DNA, 631 bp, Homo sapiens; identical to SEQ ID NO: 89170

SEQ ID NO: 734558 - DNA, 1464 bp, Homo sapiens
gtagctggtggtgttggattatcccattgaagctgggacagctgttcctttctcatagtgataacttgggtctgttgtcctctaaggaacgtgaaacatacacttcttaagctgaaccacgtaaacttgaaattctgcgcactgggagaaatgtgtcctgtgtttcaaaggataaaactgttctaaaggcttccagggtcatgatgggattttttaaataaatgcaaaaaataaaaataaaaaagaaaaaagaaaacaaaaaaaaaaaagaaaaaaatgctaggttggggaggcgctgttctgaatcccaaccggctggaaccaagaatgtcgtttctatttttatagaagttttatacagctccggggtggagaatatttattacctaaattatatctctggaaaaggccaggattttgtagaatccagaatgtgattgttatacacacagggtgctgtgtatgattgaaactactgactttctgtggcccgtttgcagcccagctaacctgcccaaggggaaggtgttaatgctgtgaattggcagaggagagagctgtgctccatagggtgctgccggtgctgtgctccctagccttctgttctgtcttcctccttagccagaacgccactcccttcccacatccccttcttctctccgccttcccccatctcaccattatttgtccatggatttgtcctgggctctgggaccttatgaaacccctttcctaatgacataagaggccaaggtgcaatccacccacctttgataccagaccctgagggcttcatacctgctgatgggttttcttttctaaaaggaatgctcgccccagcagggtcctgggctgcttgagcagccagctggtgagaccatgcacttctctgttctctcctccccctgcccagtgagttagcacagcagtagcactgcccttgagcacagttctttccccaggccaaagatggttttgtgaagaagctgctcccctacaagtctcacgtgtgaaagggctcagctcagagtggagactcgctgtcaagtcttaagcaatccttttctgttgtgtgaaggtttcacttacaatgtgttttctgctgtagttttgtttcttacttgggttacatcatgaaattgatttgccttgaatgcagccagaccactgtctcctgggttccccttgagtggccaggcctggatggaagctaagagcttggatttctgggaacaaagggccatccccataagattgagcagaaattctggtcctcttccctgaaaaattttccccaccccagccagcatcttctgcttccccttgggttgtgaccagggagtggggagagaggctgaggctctgctcccctggagaccttctcttaggagttgggtgcttcatggaaaatccaagccttaggttcccttctgtctctggcaattagatgtgttcttggtgtcc

SEQ ID NO: 734559 - DNA, 1140 bp, Homo sapiens
atgtacttttagctagtttttaatattttataaaacttcatttaaatttgtatttttaacttgaagttccatttcgttatcaaggatggtatttagatttttttcctcttaaccttttttcaaaaactattttcaactgtgaggaaacccttatttttctttctttgtggataaaactttcaaaagcaatttaagatattcatagtgttaggaaacaccaaacctgcctatgtgccatctcacaaaagaaacttttaatacctacaataaatcaaaagaataaaccagctgttcttatatattgtttcatttttaaaactaaagatgcatttaagaagcaatacaagtaaatattttacctaataggaaaaaaaaaagttgcctttcatttaaaccattccaacagaaattcttatgctaatttaaaacatatatatatctggtaggtttgtggttggataggttttctaaattcctaatgttaaaaacaatctttatgttaatatacactaaatctatacacaaaaaaagtcaatgaacttttctgacctttactgtgagttaccttttcctaagaggaaagctatagtaataagtaaaatttaatttttaggcaatcctgatttttaatgaatttaattgagtgttcttgtatactacattgagcagtttgcttctataccgtgtcacaaaattcatgtatttcttgagaagccctaaaagctcataaaggaaaatgccgtgaactatgtagctcaggcttggtaaggtgccatctaaattacaaaacaaactaatgcataattttgcttaaatttcatcccagtatgattgtcttcccaacaccagcatatagtatagattgtctgtcttttttatattttttagttcttcctgtacatgtttttggcaataaagttataggaagaacaaaattattttgttagaattaaaacatgcttaatatttagtctgtttgtggagggcaggtattcacgtggactgagatacaatgttggatacagaaaataactttcattgtcttcctgacactgtgctaaggacatgctgttaaagcttcaaagtgaccagatgaggaaggaataattaattattactcctgatttgtagataactgag

SEQ ID NO: 734560 - DNA, 219 bp, Homo sapiens
gccatccggctgtccttagagcaagccctgcctcctgagccaaaggaagaaaatgctgagcctgtgagcaaactgcggatccggacccccagtggcgagttcttggagcggcgtttcctggccagcaacaagctccagattgtctttgattttgtagcttccaaaggatttccatgggatgagtacaagttactgagcacctttcctaggagagacgta

SEQ ID NO: 734561 - DNA, 37 bp, Homo sapiens
gtgaaggcctctgccaggcatgtgggcagctggacag

SEQ ID NO: 734562 - DNA, 55 bp, Homo sapiens
cttctgccttttgctggtgtttctggaatttgctttccctcacctctcacttcct

SEQ ID NO: 734563 - DNA, 91 bp, Homo sapiens
atacactggaattcgcaataaatccagtatggtggttatagatgtaaaaatgctatcaggatttactccaaccatgtcatccattgaagag

SEQ ID NO: 734564 - DNA, 953 bp, Homo sapiens
cctcattagcacacagatttttaaaaatcaattctcttgccatgcctcctatgtgttcacatctctgcatacactacagatataagtgcataatcattcatataaacatctggtaggtattctgtaaaactgtgtttactttagtgcatgttattgtcatgttatgatgtgactggggtgtttctttgtcatgaaactttgcttcttcacagaattagaatactgctctctctatattgaactacatatacagcgttttcttgtatcagcccccaaagtctggatgcccggtgttgtgtttacatgtgattgtgcctaggagtctgttcacatagagacacctgtaagtatttattacaaaacggaatgtaagcaaatatatccacattggttttatttgaatcaaggtgtttttttgttttttgttttttttccttttgaggaggaacagggagcctcctcctccatgagcacttacagaattgtgtaaaattctgtgaaacagtggtaagcatgggcacccgatttcagctgtcctgctgccgctgccctccaacctgctctgtgtgtgtgtgtcgctgtgcttggtggcagtgtgccgtgctcgtgccggctcttcccagcagactggtatctggctgtaacgtttgacgtcttcatattgccagtctgtattgaggggtgatgtacatggccatacagccaaatgggtctgtgtaccagtgtggggattccaagaacactgcctgtcccccacagcaaatattgatgctgttggtcagccaaagattttcctctcctttgctgcttaaacttgtgccttaatattgtacataataaatggataaaatggcaaaatgactcttttctctcgcttgctcctttcttccttaaagaacttataaactgatgctcaataaatgtttcatttcattgtaccccacttaatgttt

SEQ ID NO: 734565 - DNA, 144 bp, Homo sapiens
aaaaatttaatgttaaaaaaaaactatagacattgacatggaaaagagatttaatgttttgaaaaaaaactttatattaactgagtaacatcctcctgatgagaagtactatattaaatataaacccattatgttataagttaa

SEQ ID NO: 734566 - DNA, 628 bp, Homo sapiens
ggaggtgggactaggggcactttgggggtctccttttagtcaaaagcgagaaaatgacaagaaagagattaaaattcaatgtttcctttatagtgttaaacactaaaattttaaaaaagatgaaaaagaaaaaaaaactttgtaaaatgcgagaacagaagcaaaagacactacgctctgtcattttatctttcttttgttgaaagactaaaaaaaaactgaaatgttttttagacaatcaaatgttaggtaagtgcaaaaacttgttttttcttactggtgtagaaattaatgcctttttttatttttcagttattttataataacgaaataaaaagaaccccccagctgccaggcgggttttggtgtttgaaatgcggggcaaagcactacatcactgcaaatagatacagagttagtctgcatgtctgtaggctgtgtgattgcggaaaatataaatgctgctaatatatttcctttttacaaaagcatatctaaatagatgattgttttgatgttaatctttgtaaattatgtattaccaattttaacattggatgtaattgcatacaaagcttgcatctcaatccttgaaagtctagtattaaatggaaaaaacttttcctaa

SEQ ID NO: 734567 - DNA, 2122 bp, Homo sapiens
cgcttcaaggttcacacgccgcgtggcagctcggatgcagcccggttccgaggcggtcggcggtcgagactggggcctcgagccgagaagcgaagaacaaagcggccgcgttagcccgccgccccgagggacagcccgggcgcgcccgccgctccgcccacaccccgcccctcggccgcgcgaaatggcggcggccgcaccacaaaatggcagtcgctcggtcgcggagaagcacctgctaaatgccgtgactccctccccctgccctgccccgctagcgccaacgtcgttctccccgcccaggcgccccggtcttcccacgccgccccgcccaggggcaacagggtccggagcccgccaacaacgcggcgcctttgtgcgggcgcacgccacctttactcagccacacgggcccctctccggggggctttttcttaaaggggcaaccgctggaagaaacggagcaccgccgcccgggacgcccctcaggcccggggttactacggtttccccaactcgcagcgttagcgtcaggccaccaaagtgaagatgggtggtgaaaggaccacagagcccgataggagagaaaacctaggaaaaattagtgaaagacgcccccaaccaatgctttggcggccacgctgagtcctaacgtactgagcccactcgacggggcccgtgcgcacaggcggctccaaagggcgggtttcggctttccttccacctcgcaaaagtccagtgagcgctctaggtttctcatggctaccccctgccctctccccgtgctggggagtctcgggggctgagcagtggcagagggaggagcgctgccgcggtccctgtgctttttctctggcgtgagggtctcagtggccttgggctctgcttgggccgtggctcgaaggttggaggtgtcgcggtgcgcttgggttttttcgctttctttcaaacgcttgcttcctggcgctccccaccccccagcgtccctttggctccatctttccagaaacttctctgagaaactcagcaaaaagcatccaatttcgccactgcttccccctccgcgcatgcgcgagacgccaagcggaaagcctttggcgcgccggagtgtgagagtggtgcgtgagcgcgcgcgcgctcgccgtgcgggggcggttctctctgacaatgaagggaaagaattccccctcccctcaacattccgtcctcgcgcaagcgcgtcggagccacttccttggcctttgagggaagggggaggggtcgtcccgaagcgcgctagtcgtgtttccgcgcgcctgcgcacggggccgttttcgtctcgctgtgttgtccgcgagtctttgctgtgaagtgcgtctgaacagctcgcttgtgcccgacctactttttccttaaggcccactcgcggaaactagtttcttgtggggttatcgattctgtaccccgagtttcctggagattagtctcccctttgtgccccggggatgaggctggacggcgtcgcgctggcttgtcttccaccccttcccgcgccatgtttggaacggctgttgactggatcccgtgtggagtgtgatggagccttctcgaaacgggaaaacagtcctggccgaaggcttgggtggtgcctgggccggcttatattaggcactgcgtagaatgtttgctcactaagcccaaagaaaggtgtctcttttttttttttttttttgagacgggagtctcttgtcatccaggctgtagtgcagtggcgcagtctcggctcactgcaaccttcgcctcccgggttcaagcgattctcctgcctcagcctcccatgtagctgggactacaggcgcccgccaatacgctcgggtaatttttgtatgtttagtagagatgggtttcaccatgttggtcaggctggtctcgaactcctgagctcaggtgatccgcccacctcggcctcccaaagtgctggaattacaggcgtgagccaccgagcccggctttgcccccagcctgggaacggggtcttgctgtgttgcccaactgttttggaagtcctgacgtcaagagatccttccgccagggccttccaaagtgctgagattacaggtgtgagccgccacgcccggccttt

SEQ ID NO: 734568 - DNA, 1449 bp, Homo sapiens
cagggacctgagctttgctacccaaccagattcctcatagagattcctaatcactagtttcttgtattcataaactcagagatacagagggcttggtttgaagttggggtgagatgaaacctttgctctgagccaaagctctggggccttgcattccctgcattgggttgatgactgtcagcatcactgccgcaggccatgcttgactaaggtacctggttttagccacagccacctccttgtatgttacctttcagctctggccaagagtgggacagggttttaaccacaaataggagcagcatgcaattcctagtgacttgctgcacagtattgtatcataattacaggaagtttttatttttaaaactggatctggggtatattcatttgccccatcacctctgtctaaaggcccaagtcctagggctgccatggtcacaagcacactgatgctccttaagattgtttatctggagcccacatagtgtggaacaaaaagtcacctagaaagcatccttggtcatcattgtctccttcccacctggcccagagatgcttaaatccaagttgtttctccagctgtcacctcccccaggagatcaggattccactgacgtcctgggcagccagtgaatttaattttccatgagaaacaacagagttaacctgtggcattaggagacctacttcatgtggaccctttttttccttcagtttaacttttctggagcagtgtgctgcgtagttcggcctgagtttgtgcagcttgttaagacaactcttgtgtacgctatgttgaagctcaacaaaaaagtcatgggaccacttctagaaatctttcagctgtcaggcctgtcagtctcatgacagtttgttggttgtgccaaacactttatttgggaaaggaaagcccagatttgaatgggtctttcccctgggccttatcctatagaggcatttgtaatatggagaaaataatttttcatttttgctcatttaattctataaattctctttataaatgaattttgtgttctttagttctccttaaaagaacttttgaattataaaaataaaatctttacctgtcgaattgttgctgcagatgattgttgtggaaaatctggatcattgacctctgtgctttcattcctagagatgttttatagttacatgagcaaaagctgttgccccaaagtgatggccctggaggcggggctgaggaacagggaaatgccgctgtgaagtcttaaagcacttctgcttaaactccatgtgtgaggagtgtgcctccctgtgccctctcagctctgaggctggccgtctttcggggtgttccttttggcaaatatacactgtaatcttgagtctaaatttatatgttgaaatgctaccttttttaaaataagaaactaaataaaattattttactatcagtaaaaaaaa

SEQ ID NO: 734569 - DNA, 179 bp, Homo sapiens
tcttggtgatgccttggacagcagcaactccatgcaaaccatccaaaagaccaccacccgccggatagtggatggcaaagtggtgtctgagaccaatgacaccaaagttctgaggcattaagccagcagaagcagggtaccctttggggagcaggaggccaataaaaagttcagagttc

SEQ ID NO: 734570 - DNA, 476 bp, Homo sapiens
gtctgtaaggtcattgtttgccagtcgtgggcagcgcggcaaacctgctgggaaaaggttttctggttggaataggatgagtaccgcaccagctttgccttccagctgagatgtaaatttcaggcctccatcctgtggaacgtgggaaaactatcttgagtgttggcatgttctaagtatgacataatagtttaatgtatgataaatcatgggtgtttagacgaaagatttacacatataaattggaggctttagcggtcttagtgtaactaacttttcgtccccttaacccttgatgcctgttctatgggtctctagagcggaaggagcattatactccggaaacatttgctggaaggggttatgagaaattcctctctgtatgctaactccgtaatacaagcgtttgtgtattttaaaatcacagctgttccaaatataatctagcctcgttttccccctccgtcggatgatag

SEQ ID NO: 734571 - DNA, 85 bp, Homo sapiens
atccgcagagatgcccctgctggccgcaaagtgggtctcattgctgcccgccggactggacgtctccggggaaccaagactgtgc

SEQ ID NO: 734572 - DNA, 954 bp, Homo sapiens
cgtatagagaaatccagatttcaattaattcatttattgggtgctaacaaaattcagggttagagtaaatttaggtctgttggtccatgtggcctggtttcctagcacccattaaacataatgctatcttttaagcctgaacatgtgggttttttaaatcaaattggaaaaaaattagacaactgatgtcatgctgtcttggtatccatactaaaaaagtatcaggaaaatagattatttttgtgctgtgaaacactattcagtggaaagtttagtggcaacttttccatatcattcatgacttaatacctgaaatgcacttttaaatgtttgccttatatccaagtgtttacttgtatccatgacctaaccgtctattgaaaagaatgtttgcagatgcagattgcaatgttgtttgtattcataggcaaaagtcctcttctctagtataattttttaaatctgagagaattgaaggtacagaaaaaaattctggagtgcctgaaccacagtttgagagcacaaaggtcacattctttcagtaaatttgggggaaataaatttcagctacctggttagcttcagtgactacttacacacagggctttggttccattacttgtttccaccacagccacatcctaaatacttggaatatccgaaaacaacttctaaaatcactcaataaaagtattcacttctaaccaactcctcctcctttatacctgctctgtgttagggcgtagtctgtttccacctctgtaagtcctatctaggcttcctgatctatcaattcagtatcatgattgttaacccaaacgacttcctggaaaattcccagccctagatgtatccaagccctcctaccctcaccagttatttctggagaaagatcaccaaatgtataaatccgtattagtaaaaattggttttaactgacctcagcactgccca

SEQ ID NO: 734573 - DNA, 1370 bp, Homo sapiens
ggtgcggcccggctcagcgctggcggccgctgtagcgcccccggagccggctgagcccgtgcgagacgtgagctgggacgagaagggcatgacgtgggaggtatacggcgccgccatggaggtggaggtgctgggcatggccatccagaagcatctggagcgacagatcgaggagcacggccgccaaggggcgcccgcgccgccgcccgccgcccgtgccggccccggccgttcgggctcggtgcgcaccgcgcccccagatggcgccgccaagcgtccgcccggcctgttccgcgcgctgctgcagagtgtgcgccggccgcggtgctgctcgcgggcgggacccacggccgagtgatctgcccccattttgtacgcccgagtttccgaccttctcaggctcccttcttgatcacaggcccctagaaggggtcccctctgcgtgccacaggcctccgaggggttgtgcagcctctagggctgttgcgtccccgtctttccagcccctcccatcacaaatacagaagaaccccttctaccaagctccctcgtggccacgaggccacgaacccggccagccctgacgccccactgtcccctcacagccctcagctctactcccggtcacactgggcgaccacgggggcctgctcagcaccctcacctcccaccccctgagagctggggcaggctcctgagatgtctagactggtgcgttgtggtctccggtggggccagatccccagaacagggagagactgcatacaagtctgagtggcagaagcttcaagtgggtgaggatcggtgtgtgagacccgcgagtgggcacgtctctgaatgtgaggtctcgggcagcacgtgaggtagaacgagtgtgagcgtctccacgcagtggctggccccgtggccggggcgtctcttgcatgctgttggtggtccttccccagttcctatctcccacccgcctggttccagccccatcccctctcccactgagtcacaggtttgagattcccagagaggccaaagacagctacaggaagtaccctgggggctcagctgagagagagtcacagaaaggccagagggtctcaggaaggtctggaggtcacagctgggctcacagaagctcttgggccctggcatcctgggtgaccggtgttcttgggtattggggacaggacagagagctcattctataaccacagttgtcttttaaaggccaccctctccagccccttgtcccccctgtgctgtgagcccaagtcccttgtgaccactcagtgtcccgtccccacccctccagccgcagtttttggctacaaactgtcacagtatacattggtaataaaatatttccccaaaaactg

SEQ ID NO: 734574 - DNA, 328 bp, Homo sapiens
atggcatctgagcgagaaggctctggaagttctggcactggggaacaaaaggaagatcaaaaggaggaaaaacagtaataatagcagaaattttgaagccagaaggacaacatatgaagcttaggagtgaagagacttcctgagcagaaatgggcgaacttcagtctttttactgtgtttttgcagtattctatatataatttccttaatttgtaaatttagtgaccattagctagtgatcatttaatggacagtgattctaacagtataaagttcacaatattctatgtccctagcctgtcatttttcagctgcatgtaaaaggagg

SEQ ID NO: 734575 - DNA, 212 bp, Homo sapiens
tggacaccctttccgccggacctgtggggcccgggccgttcctaccggctgcttcacggggcaggagggcacctggaatcccccgccaggtccctgccccagcgcccggcacctgatccctgcagggcccccagggtggagcagcagccgtctgtggagggtgccgcggccctgcgcagctgccccatgtgccagaaggagttcgcccccag

SEQ ID NO: 734576 - DNA, 920 bp, Homo sapiens
atgaagacatcaggttgggtcctgccccactgcccctccccctgttcctgccccaagccgtcaatcagattgtggagcagtacacagtcagatgaaaatactgtaaatgcactcattgggggttttttggttttacttcatatcatgtgcaatgttgtggctttaacattttatgcaactatttatgaagacctctgttgtacctgtaataaatatatagaaaaagcacatacttcgtatggtgagctttatggttttgtgtgtgtgttggggttggcgggtgggtgggtagggtcgtagccctgtgccatcggttcaaagagacttttcgtgaaatttgttggttttgaggactgtaaaagtgatttcatactctgaatataaaactggataatagggtaatgttttaaaatttattatgctattattcagaatgccaaagtattattttttttcccaaaatcagtctggacatttactactttttagactttttgacgttgaactttctgtataaaaattggctgggttttgagcttttggtaagaaataaaagccgattaagcactggccgccccgcggctggtacccaatgcccgagtcactgtggcagcattcgcactggtgtggggagtcctttcaactcaaggaggctgggtttctgggcaccctcgaagttttctggatgtctttttatctttctcgtgtgaactgcactacaaaagagaccagcccgcttcccaagccagccagacacctgggtcttgagccataaactggcgtagttaagctttgcagcttccagtgtattttatttattcttttgttgggtttttgtttgtttcttcttgtaaaattgtacagaaactttttaaaagaaattggattcgaaactggatgtgtattcgtaacctcataat

SEQ ID NO: 734577 - DNA, 1839 bp, Homo sapiens
tgaaatactccacgttgcacacgcagtctgcagagccgccgccgccgcccgaaccagcccggatctgagggccctgtccagctgcaggcatgcacaatggtgccaccgcttgtcacccggctccccccaccccttcatttggacccgcagctgctgtgctgctctgtgccatcggctccttgttggtctgagtttcccggatgagctctgggtgtttgtgagtttggtttctctgccctgccccaagcgtgctgagacttggtgccgaaattcaagagccagctctgatagaaagccagcaccagcctcgggagctgctgagccaccaactcccaaagccagcctgcctccagctttactgagcacaggatgcgggggccaagatgatgctgaggcctgatgacatttatgcttaggggacaagagtttgaactcaagggactgtgacccctgcacactggagtggctcattgtggcaggtttctgccaatagacagcccctgacagtggcctcaaggagctgcaggtggggggctcagcctgcacccacttggagcccctgcaaggagcgaaccggtcagcaccaagtaacaccacacacacgcagcacccaggatgatggtttcacttcagtcttccccatcccaggttttatgttgctgggcttccggagagccggtccaagcggaggctttcagtgatttaagtacaaacatgcatctcgtgatagtcctgccttgagagcttaggaatcttccggataagtatgaagcaattcgtaggcctgtttcccatctgattccatagggggctgggtgtggccttcgggttgacatgagaaaggtctttagcaatcatttctgcaccggagatgagttttatcctgtgttggggagaggtgctcaccctccaccctgtgtccctgttttggtagcaagagtgaccgatgtcaagaacgagcatcaaagccagaatcctgcttgtttgcttaaaaatgtaattgggggcggcgggggaggagaggggaaagagacattcgcttggtttagtgaaacgcaggtgactttgtagctctgtggtcagcctacttgtctgctctgagggagagtgcgtggggagccatgctcaccgtggcaaacacaggaaccccatgactcgcccctcacctggcgtggagctgcctggtttgggctggagcagagctggtttcctggaatgttcctttggcccacatatggttctgtcccggtgagctctgttgtcagaggctcacgggacagaaccacatgctagggtctagggcccctgtctactgatagtcagtttgctgtgtcagaaagcacttctgaaagcagatatgagtcaccagacaggcaggatcttacaaaactcacgggcctctttggtctgcatgatggccccatgcgtttcataggctgtccactgagcgggattgtctgctgagtgggatgagccaactccagtttcttaaggaaaccactggaatctgcagcccccacatgcatctgtctaacgcatgcctcgtgttcgttttgcaaacatgcctgtggtggagggtggtcagttgtagccctgtgcgtctcaaggctgccttgtgaggccattcccagtgcgtgcccttgagctccttaccaccccttttcctgctcggccctttaatccctgacagacctggactgtgtggctgaagggggacctgcagcactgcagaaatgcctctgcgtggtgccatgaaggaaagaaaccttggcctggtctcgagaagcttcccatgcttcaggaagttagtaagggtggggtggcttgcaggattggcct

SEQ ID NO: 734578 - DNA, 1791 bp, Homo sapiens
acatggctgggcagctgcccctggggccgcacctccaggacctgttcaccggccaccggttctcccggcctgtgcgccagggctccgtggagcctgagagcgactgctcacagaccgtgtccccagacaccctgtgctctagtctgtgcagcctggaggatgggttgttgggctccccggcccggctggcctcccagctgctgggcgatgagctgcttctcgccaaactgccccccagccgggaaagtgccttccgcagcctgggcccactggaggcccaggactcactctacaactcgcccctcacagagtcctgcctttcccccgcggaggaggagccagccccctgcaaggactgccagccactctgcccaccactaacgggcagctgggaacggcagcggcaagcctctgacctggcctcttctggggtggtgtccttagatgaggatgaggcagagccagaggaacagtgacccacatcatgcctggcagtggcatgcatcccccggctgctgccaggggcagagcctctgtgcccaagtgtgggctcaaggctcccagcagagctccacagcctagagggctcctgggagcgctcgcttctccgttgtgtgttttgcatgaaagtgtttggagaggaggcaggggctgggctgggggcgcatgtcctgcccccactcccggggcttgccgggggttgcccggggcctctggggcatggctacagctgtggcagacagtgatgttcatgttcttaaaatgccacacacacatttcctcctcggataatgtgaaccactaagggggttgtgactgggctgtgtgagggtggggtgggagggggcccagcaaccccccaccctccccatgcctctctcttctctgcttttcttctcacttccgagtccatgtgcagtgcttgatagaatcacccccacctggaggggctggctcctgccctcccggagcctatgggttgagccgtccctcaagggcccctgcccagctgggctcgtgctgtgcttcattcacctctccatcgtctctaaatcttcctcttttttcctaaagacagaaggtttttggtctgttttttcagtcggatcttctcttctctgggaggctttggaatgatgaaagcatgtaccctccacccttttcctggccccctaatggggcctgggccctttcccaacccctcctaggatgtgcgggcagtgtgctggcgcctcacagccagccgggctgcccattcacgcagagctctctgagcgggaggtggaagaaaggatggctctggttgccacagagctgggacttcatgttcttctagagagggccacaagagggccacaggggtggccgggagttgtcagctgatgcctgctgagaggcaggaattgtgccagtgagtgacagtcatgagggagtgtctcttcttggggaggaaagaaggtagagcctttctgtctgaatgaaaggccaaggctacagtacagggccccgccccagccagggtgttaatgcccacgtagtggaggcctctggcagatcctgcattccaaggtcactggactgtacgtttttatggttgtgggaagggtgggtggctttagaattaagggccttgtaggctttggcaggtaagagggcccaaggtaagaacgagagccaacgggcacaagcattctatatataagtggctcattaggtgtttattttgttctatttaagaatttgttttattaaattaatataaaaatctttgtaaatctctaaaaacatctg

SEQ ID NO: 734579 - DNA, 416 bp, Homo sapiens
gctgtgtttgagatgaaataagaggttgtgggtagaggggaggcacctaaaggaaaagaggaaaggtgcctgggctacctatgcagataacctggagtggacttcactgtggactcgtggtactaaggcttggcctggacaggcagtctagggggtatgggaatacacggtgtggttgttcaactatttgcaaaggtcaaccaaatagaccacatgttcgcaaagtatcatctgaggaaattaagtaccttcttagccctctcagtcataaatttgaacaaattttaatacacttccctcatgcccttctatataaaacttaataccattagttccccattcttgacattttatttcagtttttattatatatttatttgaaatatttattaaattatctgacctacagaactaaa

SEQ ID NO: 734580 - DNA, 54 bp, Homo sapiens
gtctgctgtgcacgtgctgcagaactccatagacagcctcactttgtgctcggg

SEQ ID NO: 734581 - DNA, 143 bp, Homo sapiens
gtggcctgctacagctgcacgtctggacagtggtcatctgtctgcccactccctgctgggcacggtgagcctggcattgctgtgctggacaacaggatctatgtgttaggtggccgctcacacaaccgcggcagccgcacagg

SEQ ID NO: 734582 - DNA, 1500 bp, Homo sapiens
ttggtgtctgcagtcctcatattaacagtctgtcacagaatgcagttaaagtattgattggcatatggtaatagagcaaccatagccttaacttacagacctgtgaaataaagggcattttgacctaatacaattaattttctggataactcttaaagagaagtcattttaactgtttttgctactccatatattgtcattcaaaatatattttaacccaaaataagttaaataatttgtgcatgtttgtgtgtgtatatatgcatacacttttttatattaaaattttgaggctatacagccactgtgccctgtggaataaagccatatatataaatgttttatatgtatatgttttatacataaataaaacatttcatctaatatatatatgtgtgtgtgagtatatgtgtgcatgtttagcagatatttgtataaaatataaacactctgttgtcatattggctatatgcgaaattgttaattttaaaataacctcaggccacagacttgtagtaatcatttgaaggcctcacctagtgtccccttggtgacgtatgcagcagctcaaattaaacctttgtgcattgggttatgaataatcttttcttccaaagatggcaaaagcctcggtttgatttgatactaaagaataaatttctctgactttcccagtgaatctaaatgtattcagttgacaaaatggacacataagggctttttctaaataccgtacataattacacattttcacacttagagggtaatcctatgatacactgtcaatctctattttaaaagactatcaccagaaaagagagaaaagaaaattcatataagaaaaagaaaatgtgaaaaagatcataggcttgggaattccctcaaatccagaaaattccaggttaaggcttgaagttgaatcattcccaggtctagctctaaggttaacaagagtacaaggcaaacaatttctttggggacaagcagcattatttcaattagaccttctcctgcagggcaaaaatcattcttccccacactatgaatggactccaagtatcataataagcaggtaaactcacaagaaccaaagctgacatatggataaaagcagcaagatcacagtacaccaaagtatcatatatatagaagaaataattcaatgtcttagatttgtctataaaaatttgtgatctatataggacttcattcacatggacactaacgataaggagtatttgctttggcggtagtggatcacacatctgcttatcttgctttgatattttttacataatgtttctgagtgatacagatgtgagtcaggtagcatttgatttccccacatatacacaactgaggtgccctgccattggcatcccctgggatccttgattcactgacgttagccatacgaatccagtgttcaaactcagaataataagcttagtttctgcattatcagtcagcataaataataaatccagaaaacgtgctgta

SEQ ID NO: 734583 - DNA, 418 bp, Homo sapiens
gatgggacgtggagaagggaaatgctggagggatccagccagacttgctcatctccctcacagcccccaaaaaatctgcaacccagtttaccggtcgctaccattacctggggggtcgttttgtgccacctgctctggaaaagaagtaccagctgaacctgccaccctaccctgacactgagtgtgtctatcgtctgcagtgagggaaggtgggtgggtattctccccaataaagacttagagcccctctcttccagaactgtggattcctgggagctcctctggcaataaaagtcagtgaatggtggaagtcagagagcaaccctggggattgggtgccatctctctaggggtaacacaaagggcaagaggttgctatggtatttggaaacaatgaaaatggactgttagatgccaa

SEQ ID NO: 734584 - DNA, 175 bp, Homo sapiens
ggatgttgctatagtgacatgcagttatatattttgtttttaaaagggggggagcaaaagaaacaccagtgttagcttaatcttaatgtctggtgtttgtcatggtgaaattataactattacagtgttggagaacaacaaatatgttctctgaatgagcctttgtgctttttgt

SEQ ID NO: 734585 - DNA, 221 bp, Homo sapiens
caaaagtgtaataaggtcataactgcatttatcatgaacactaaaaatgtacacattttagttaatgtgcattaaactgtaacaaggcttctggcaattgtagatttagtttgacgctccccaaagtgcatgagacacatgctaaaattacaaattaaaattttgggtcagactttgccataatgatagactcaatttagctctctgaactagttggtaat

SEQ ID NO: 734586 - DNA, 1114 bp, Homo sapiens
agactgtcaaatgaacttttacagaatgcattaaaaaaaaaaaaaaactcctgtgtcggtcagaacaacttgctacttatcatttttgtataaaaaggaaattagtctttttctttttttggtaaatttttgaaaaatattgctaaaagtgcatttaaggagattgggagacaattagcagaatggagaaagtaagtcttttttttttccaaattattaattgtcctgtgtctatgtacctctagctgttcttttttgtacttttctggttccaaaccagtttattctgtggttctataataagttttgatataatcttggcttcttaaaaactgtgtatcattaaaatatatgttctgcaagaattaaaactgagtccatgaaaataccataggaagacataaaactttaaaaggcaactcaaagatgatggaaacgcacttacaagtggtgaccaaaatttttaggtgaagtcgagcactctaattagagaactggaggaaccacatataacacttaacttcccctaccctgcccctccccaaaagaaaccatgacaaacctagcttttaaaaaatattttaagaaagagaatgaactgtggaatttattggcagccaaggaatgtgtccaagacacatgctgaggttttgaataaaaagtgaacttttgtaatttgaattgggtcccgcttagttcttgaattgttatgaaaatcctatatctgtttgtatatttgcaaaccctttgtattataattgttgatattttccctttttaaaaaataccattgaaatcagcatgacaaaaataacactgttggcacttataggtaacgtgattgattcagtatcttagagtttacagtttgtgttttaaaaaaactgaaggttttttttttaagtgcaacatttctgtatactgtaaaagttataataactgaactgtttggtcgagtctttgtgtgttatattccaaggaaaattgaaagtattcagaaattaaaatattatttgatatctgaaacctggctgtccccactcactgtctttacatctagaagagcccctgtgagctctcgcttagctggccgggcggggggtggtgggggggg

SEQ ID NO: 734587 - DNA, 167 bp, Homo sapiens
aaaagtgaatcggggtgcggagagtgggaaccttttgaatttatgattgtcacagagatggtagaaattatgatctgactggaaaacaatcctgtatcccctcccaaagaatcatgggctttttttttgaattaaaaagcagacaaatagactttctcgggatttca

SEQ ID NO: 734588 - DNA, 67 bp, Homo sapiens
gtaaggggcctggataccaagaagtgactgctcatctaatccataaagctatgttaacagattggag

SEQ ID NO: 734589 - DNA, 281 bp, Homo sapiens
aataagaataacatggtccattcacctttatgttatagatatgtctttgtgtaaatcatttgttttgagttttcaaagaatagcccattgttcattcttgtgctgtacaatgaccactgttattgttactttgacttttcagagcacacccttcctctggtttttgtatatttattgatggatcaataataatgaggaaagcatgatatgtatattgctgagttgaaagcacttattggaaaatattaaaaggctaacattaaaagactaaaggaaacaga

SEQ ID NO: 734590 - DNA, 195 bp, Homo sapiens
ggctgttttttaaggaagagaatttatgtggcttctcatttttaaatcccctcagaggtgtgactagtctctttatcagcacacacttaaaaaatttttaatattgtctattaaaaataggacaaacttggagagtatggacaactttgatattgcttggcacagatggtattaaaaaaaccacactcctatgac

SEQ ID NO: 734591 - DNA, 946 bp, Homo sapiens
tttttttttcttgaatgtgcttcgcaagccaggctatcttccaaggaaggcagacagtgggagagcagagggactgactgcaggcaagcacattgaagaaagacactggcgggtttccccaccctcaccccaaagcagaaaactagcagacgtcagctcagccccgtcctgggcacagacactacacaaggagacgctggaagttaagcaatactttaatactgtaatatgtttgttttctttttctttcttttttttctaccaaaaaaaagtaagtaaactaaaacacaaaaacatataaataaaatccatccctcttgtcggggacctgcaggggggcaaccttaatccaaacacctggctatcaaataatcagaatgtattgtctcagacaggatttcagttccgggaggcaggggcatgatgggggagggggccggaggctgagagacaaaagttccagagcctccctcgaaggttctctactactgtattctgtacataatgtaccatcccatgtggaatctgtgagtgtcctcttaagtagcgtgggctagccaatctgccgttcatggtgtattgtaaactccgaattccatatgtaataggatgcaagtctaagcgtttcatgtggacataaatgtatctaaataaaactttccctagcactgtggctgacctcacccttacttttatactttagtatgaaactgatgagaactttggtagtgagtattttttttatatatatacatatatatgtactatctatatatatatctcaagcatctttcaggtctttgtgtgtggctttcttaaagccctgttgtaaaaaattactatgtggatggcagtctctcacatcacagatgtggaaagtataattttatatttgtattttcaaataaataagtttgtgaaaggtttccatcctctactgtggtcc

SEQ ID NO: 734592 - DNA, 559 bp, Homo sapiens
tagtctgtgtgggactgtacacactttatttacttcgttttggttaagttggcttctgtttctagttgaggagtttcctaaaagttcataacagtgccattgtctttatatgaacatagactagagaaaccgtcctctttttccatcataattctaatctaacaatggaagatttgcccatttacacttttgagactttttggtggatgtaaataaccccattctttgcttgaacacagtattttcccaatagcactttcattgccagtgtctttctttggtgcctttcctgttcagcattcttagcctgtggcaataaagagaaactttgtgctacatgacgacaaagctgctaaatctcctatttttttaaaatcactaacattatattgcaatgaaggaaataaaaaagtctctatttaaattcttttttaaattttcttcagttggtgtgtttttgggatgtcttatttttagatggttacactgttagaacactattttcagaatctgaatgtaatttgtgtaataaagtgttttcagagcattaaaaaaaaaa

SEQ ID NO: 734593 - DNA, 160 bp, Homo sapiens
gtatatgaagattctggcatcccccttccagctgagtcacccaagaaagggcccaagaaggtggcatctggtgtcttgtcacctcctccagctgcccctcctcccagcagctccagtgtccctgaggccgggggtccccccataaagaaacagaaggctg

SEQ ID NO: 734594 - DNA, 201 bp, Homo sapiens
tggaagattttataaaagaatttttgtgggtcggggggacagtaaacttcctgggccacgtgggtccttcaggagtttttcaggcaagtttttcctctgtttttaatatataactataatatatatgaatagataaatataactaatgtgcgtgagaatgggcctggcacacctggggtgctcgggggtagggctgccatg

SEQ ID NO: 734595 - DNA, 2970 bp, Homo sapiens
ccccaaatccagtgaaagaaattctcccagtaaaagttgcttcctaactctgtttttctcagaatacctcttacctttctcaaagaaagcttcaaccaccatcatcagaaagaaggtggcctaaaaactgacacatggccagtgcccggaggggtctggaggcataagtctagatgcccagagagcatccaggcactgaactgctcagagcttgagatgaaatgacatacaagcttcagggtaaaactgtctactagcaagattacctccctcaattctaccattgcagatttcttctgaccccaaatgcaaccttacagagaatgctgaatgaggaaggccaattccttacaatgatggcagaacccccaagcgaatgccctattgaggagaaggacatcactgtatttggaattctgcctgctagtgatagctcacacatcacatcccagaatcccactcccaatgcattatttcctgaggcaagaacttaaggtcctcacctaattcctccatcacaaccattaactcttattggacaagctcctcctgtgagtggggcctgtactcacttcctcttagatcataattccatcttcaagagactgatttccagaatagtaatctttttccagcgttctctcttctccaatgccctggttgttatttttcccacctctcctaatattgatcttcttgtcttttggttagaactgcaacttcggagttgagttcatttcctattgctgctcaattcagtagcaacatagctggcttgttcccagacccaggaagtataagtcattgacagtttcctgagtggctcttgcaatccataccacccttggtactgtgaaaaggcttcttggcagccaggtggcattgaggatggtattcagggcgctttccttctgtcatatagttgtgggatctctaccaagtgtgaaggtgaatgaggtaagggagatcagaaccatgcttcctggtttttcatacatccaaggaagaagtcctggtgtgggttgtttgacaccttctttccactttcaccttttattttttattccttcctttctacccccaaccagtcgagcaaatgagcaattttgtgtttctaatacaggatctggaagtagtgctttctaatcctcatttcctgtaggatgttcctgcactataacaagattatgttttcttccttctgcagcagctttctgcttcttgggtactactagctattgttcaattcaggtgaggcctgtgatgacatatatgtagcatgtgctctgcgctccctgcaagctgagcagatacaaccaatgcatcactgtatactcttgctgagaatgtggatgcagcctcacagatctttgcaacactccaaccagccaggaccagttgatcagaactgatcttattggtctgataaccaatcttatttgtgaactgattcatatctgtctttccactcttggttctcttgccgtagaacaaaaacagtttaggaagcataattacgaacatttaggaaccaatatgtataagtaattcggagactccaattcacctgcccctcccccatcccaggttgtggaggctcgaggaagctgacttcttaggctaaaggacaaaaaaatctctttacctccttggccattttcatgttctctgccaattactataggcagtcttcattttgcagaggtgaggtaagacttcatcttattcttcatgtaatcccaccttctaacaaaaaataaataaatatttaaattccaaggagaagtgttctttgtgtatttctagcagaaaacagatgcttaagcctaagaaggaagatccgtccatgacaaaggaaagtggaaaactgaaccagttatctgaatacttcatgccaggacagttgctattagcaactgttttgcaccttcagggctttaaaatgggctctgcagacagcatttgcatatgcaagactcagtagccaagcctccactgccaattgttgaaggcagtttcagatcgccaccttttgaggtacatttctttaagcacaagagaagtagaaatggcctttgccttgtctccagtggtttgtccctctggtgcctcagcagataccagagcttattcttatgaccatttggaagtagtcctcaaagtaaagatcaagaaaaaattggattctttttccattttctcataatagtagcctagtcaacacaagactcccataaaatatgactcactattgggagccatactattttataagcttacttcctgctgacaaaactagctttcctcaaggaaatataaaggaggggaaagtcacatagtgttaggaaaacattcctgtgttttgaatacgatgaatccataggatagagaaaaatctgcttgttctattctgagagttctctgagatatcccttcactctgcttggcatttggccattgatattcaacaggtcactgaccaagcttttctaaatttttcagagagagttacttaccaataaggtctgttcttaaacctacctagttgattttcatatctttccataaagtgtcatgattctatcatagaccctgacttaacattgtaaggactatgagtcctccattttttaattaatttttttttagcaaattaggacttcggcaggttttcctctcctaaactcattctttcctccacaggattgctttgtccatctcctgctttcatttcaagtgcataaacaaaacctcaaagggcctgggaaggtgaggcaggccagagtctgtgttctgtgttgagtgtcaagctatttgttaagaaggtctgcaacaggcctttggtgtgggctctgccagagactgttctgaacactttgcttgagatccgtgccctgtaaaatggatatgatgttttactgatgtctgtaatacatttgtaaacttccaataaaatttgaataaaagaaa

SEQ ID NO: 734596 - DNA, 71 bp, Homo sapiens
aggatgatgagtttacacacctgtacacactgattgtgcggccagacaacacctatgaggtgaagattgac

SEQ ID NO: 734597 - DNA, 142 bp, Homo sapiens
gccacccgggaccttgcccagtacgacgcagcccatcatgaagagttcaagcgctacgagatgcttaaggaacacgagagacggcgttatctggagtcactgggagaggagcagagaaaggaggcggagaggaagctggaag

SEQ ID NO: 734598 - DNA, 31 bp, Homo sapiens
gagatgcgcaaattcactccccagtacaaag

SEQ ID NO: 734599 - DNA, 405 bp, Homo sapiens
catttacaagtgctgcaagttagtgaaacagctgtctccgtaaatggaggaaatgtggggaagccttggaatgcccttctggttctggcacattggaaagcacactcagaaggcttcatcaccaagattttgggagagtaaagctaagtatagttgatgtaacattgtagaagcagcataggaacaataagaacaataggtaaagctataattatggcttatatttagaaatgactgcatttgatattttaggatatttttctaggttttttcctttcattttattctcttctagttttgacattttatgatagatttgctctctagaaggaaacgtctttatttaggagggcaaaaattttggtcatagcattcacttttgctattccaatctacaactggaag

SEQ ID NO: 734600 - DNA, 488 bp, Homo sapiens
gtaatttatggttttcattttatttaaaattcagcaaaatcatacgccatctaccgtgatgactgccaactccatggcagaccctttctgggattcaaaaaccaattcatcagatcgctgcctctgagggatgtacagattggctggggagctgagtgctacaataaaggaggaagtaccggggaacagtgcagggcaaaggcaggaaagagatctgagctgcctggagatcatctggggtgcggagtacaaagctttgcaagggtgtggttttggaatgacgctaaactgaaggtggagagaacagataaaaaggttggaagttgcacactgtacactgttaagaagttgagcttttatcttagaggcagcagaaggtttggagccaaggaatgaaatgatgaggcgtccttcaggtaatgaacttcagctgcagtgtgaaaggggcaggaagactggcagctgtcaaaactggaacagtccagtga

SEQ ID NO: 734601 - DNA, 69 bp, Homo sapiens
gttggttcattattgaatgtgctgtaaattaagtcgtttgcaattaaaacaaggtttgcccacatccaa

SEQ ID NO: 734602 - DNA, 240 bp, Homo sapiens
tttttttttctttcccctctatggcccttaagactttcattttgttcagaaccatgctgggctagctaaagggtggggagagggaagatgggccccaccacgctctcaagagaacgcacctgcaataaaacagtcttgtcggccagctgcccaggggacggcagctacagcagcctctgcgtcctggtccgccagcacctcccgcttctccgtggtgacttggcgccgcttcctcacatc

SEQ ID NO: 734603 - DNA, 33 bp, Homo sapiens
ccgctgctcactttccaccctctctccacctgc

SEQ ID NO: 734604 - DNA, 98 bp, Homo sapiens
ctatgtcctaaggacacactaatcgaactatgaactacaaagcttctatcccaggaggtggctatggccacccgttctgctggcctggatctccccac

SEQ ID NO: 734605 - DNA, 34 bp, Homo sapiens
acagctcgaagagcacctcctccttcccctgccc

SEQ ID NO: 734606 - DNA, 149 bp, Homo sapiens
gcctccactgaggcacctctctgggaataacgttccccagcaccccaaatggatttccagtcaattcagaagcattttaccagtgaagccctcattattccagttcactgttaaagccagtaattctctatattaaactttccctgttc

SEQ ID NO: 734607 - DNA, 99 bp, Homo sapiens
agtagcacagaagagggaggatgctgtttccaaagaagtgactcgaaaactttctgaagctgataatagaaagatgtctcggaaggagaaagatgaaag

SEQ ID NO: 734608 - DNA, 104 bp, Homo sapiens
gatgaccggaaagaagggatgaccgcgtttgtggaaaagagaaaggccaacttcaaagaccagtgagaaccagctgcccctgcttcacacctctgcttggagag

SEQ ID NO: 734609 - DNA, 50 bp, Homo sapiens
agcggtggttgatggcgccttcaaagaggtgaagctgtcggactacaaag

SEQ ID NO: 734610 - DNA, 81 bp, Homo sapiens
gcactgggcttcctgacctaagcagtatgactgaggaagagcagattgcttatgccatgcagatgtccctgcagggagcag

SEQ ID NO: 734611 - DNA, 62 bp, Homo sapiens
ccaagtacaagtgcaaattaactgccgtggtcaagtgtgtcagtgactgcacattggtttct

SEQ ID NO: 734612 - DNA, 258 bp, Homo sapiens
aagtccaccagtctctgaaattagaacagtaggcggtatgagataatcaggcctaatcatgttgtgattctcttttcttagtggagtggaatgttctatccccacaagaaggattatatcttatagacttgtcttgttcagattctgtatttacccattttattgaaacatatactaagttccatgtatttttgttacaaatcttctgaaaaaaaacaaaacaatgtgaaacattaaaattaaaaggcattaataata

SEQ ID NO: 734613 - DNA, 153 bp, Homo sapiens
gttcatggatcaacatccggagatggatttttccaaggctaaattcaactagcccctgttttttcctccctgaactcttggggctgagctgcaaccacccaactttctttcccactcttctctgggacttgtgggcctcagggcttggggcag

SEQ ID NO: 734614 - DNA, 130 bp, Homo sapiens
gtgctggagctggcaggtaatgcttctaaggatctcaaagtaaagcgtatcactccgcgtcacttgcagcttgcaatccgtggtgatgaagagttggattctcttatcaaggctaccatagctgggggtg

SEQ ID NO: 734615 - DNA, 51 bp, Homo sapiens
gtgggcgtggacttcactggctccaatggagacccctcctcacctgactcc

SEQ ID NO: 734616 - DNA, 37 bp, Homo sapiens
acacataaacctttttaaaaatagacactccccgaag

SEQ ID NO: 734617 - DNA, 31 bp, Homo sapiens
gtggccaataatcaagacaaactgggatttg

SEQ ID NO: 734618 - DNA, 632 bp, Homo sapiens
gaacgactgagacggctaaaccacagtgttgccaaggaaacagcccgcaggagagcaatgctggattcgggaatttacccccctggctccccaggcaaataacagatgagcctatggactcagtagcacaagtactgttccccagctgccttgtttcaacagacatgcaaagatcctaggagacagtccccatagaccttcagacattaaaaagggagccgtacagtttgtttgaagcacttcgtcttacccatttatgtaggggccccaggaaacctacacacagccagaatgaggttcccaaaggacttacattaattatggctcttgcttcctttcacaaatgagctgaggcctctacttttttttttaaagctgcatacttgaggcttaccttcttcaggactagttaaccagaggggcttcctttgtatgttacatgcctggttacatgggcctggacagcatgtcctctacctgtgacttctcattttcctgtttacactggggatttggagggggcaggcaaagtcaaagtgaatgacctctgtccacccacttttttattgcactggcttgaatacagtagcagtgttgatagaatcattttattcaataaatacttaaaatga

SEQ ID NO: 734619 - DNA, 545 bp, Homo sapiens
gtggctgcattgatgacaccatcctcagcaggcagggctttatcaactactccaagctccccagcctgcccctggtgcagggggagcttgtaggaggcctcacctgcctcacagcccagacccactccctgctccagcaccagcccctccagctgaccaccctgttggaccagtacatcagagagcaacgcgagaaggattctgtcatgtcggccaatgggaagccagatcctgacactgttccggactcgtagccagcctgtttagccagccctgcgcataaatacactctgcgttattggctgtgctctcctcaatgggacatgtggaagaacttggggtcggggagtgtgtttgtcacttggttttcactagtaatgatattgtcaggtatagggccacttggagatgcagaggattccatttcagatgtcagtcaccggcttcgtccttagttttcccaacttgggacgtgataggagcaaagtctctccattctccaggtccaaggcagagatcctgaaaagatagggctattgtcccct

SEQ ID NO: 734620 - DNA, 33 bp, Homo sapiens
gtggtggccaagctctcaccagccaaccagcgg

SEQ ID NO: 734621 - DNA, 29 bp, Homo sapiens
tctcctataaatgtaaatgggtcacgctc

SEQ ID NO: 734622 - DNA, 226 bp, Homo sapiens
ggccgcatcatcgagtgcacacactgtggctgtcgtggctgctctggctgaggctggcgcgctccaccctggactctggacttcgcaggttcctgcctgtcacgccacccccttcctgggagcagcgagcagtgccccaggcccgagttggagcacggtctctatggggaaggcttcgctgtctatcagctgtgatttgtaaaaataaaatctttaaatctctcga

SEQ ID NO: 734623 - DNA, 172 bp, Homo sapiens
gtgttctgttcctgctcctacgatgccaccacacactttgagacaacctgcaacgacatcaaagacatctacaaacgcatggctggcacggcctttgactttgagaacatgaagcgcaaacagaacgacgtctttggagaagctgagcagtgattgtggccgcccccagccc

SEQ ID NO: 734624 - DNA, 125 bp, Homo sapiens
atgacctttactgtgttagctctttgaatgttcttgaaattttagactttctttgtaaacaaatgatatgtccttatcattgtataaaagctgttatgtgcaacagtgtggagattccttgtctg

SEQ ID NO: 734625 - DNA, 214 bp, Homo sapiens
gtctgcgtttcaccctccagctgctgtccttgcccaggccccacctctcctccctaagagctaatggcaccaactttgtgattggtttgtcagtgtcccccatcgactctctggggctgatcacttagtttttggcctctgctgcagccgtcatactgttccaaatgtggcagcgggaacagagtaccctcttcaagccccggtcatgatggag

SEQ ID NO: 734626 - DNA, 258 bp, Homo sapiens
aacctcacatcttgctgttccggcgcccactacccaagaaaccaaagaaatgaagctggcaagctacttttcagcctcaagctttacacagctgtccttacttcctaacatctttctgataacattattatgttgccttcttgtttctcactttgatatttaaaagatgttcaatacactgtttgaatgtgctggtaactgctttgcttcttgagtagagccaccaccaccatagcccagccagatgagtgctctgtg

SEQ ID NO: 734627 - DNA, 130 bp, Homo sapiens
tgggctcgtgggttggcagtatgagagttgtaatggcccgactgttgagtgagggggagcaggggatcccaacggcttgcgctgcctttgcgcagcagccggcgggcggccacgtcgcggcctggctggg

SEQ ID NO: 734628 - DNA, 191 bp, Homo sapiens
tgggataatatagaagaaattgtgttaaaatagaagtgtttcatcctttcaaaaccatttcagtgatgtttataccaatctgtatatagtataatttacattcaagtttaattgtgcaacttttaacccctgttggctggttttttgttctgttttgttttgtattatttttaactaatactgagagattt

SEQ ID NO: 734629 - DNA, 332 bp, Homo sapiens
acgctgctggagttgtggggcatccctccaaggcctgactccctttcactacctcgacttctctttctgctccacacgttgcctccaggatcatcgccgtcaggcagggaggccctcttcctgatctcttacagctctacctggggccaactcagggacctgagagggcacattcacagcagccctaggttttttcttccccgtgaaaccagagatgatttggaagatgggggtgaaggacactcgggaactagggcaaagacagggctagaggtatgtggagctggtactgtctctggaattttaatcacaataaagtttggcaaggaatg

SEQ ID NO: 734630 - DNA, 30 bp, Homo sapiens
atgttgggtgtccatcctggggcagggaag

SEQ ID NO: 734631 - DNA, 357 bp, Homo sapiens
ctcttgagtgtatgtccccatagtgggccccttgacccacatgctgaccggtgccttgggatttgactagagttgctggctcgaggcccagcacgaggacttaccctggggttttgttaggtttggaagcagctgtccctagggggtgaagtccccccccttttttttttttacccctgcttctcccacggcttcacctccctatgtgaactgtagactcagatcccaataaagtgctgttgcagctatgatgctaggtggtttctaagcacaggggacaccccacaccccctgcctgaatggatgggtccatcccaggcactggtacttgcccccttgttctgtatccccctttgc

SEQ ID NO: 734632 - DNA, 485 bp, Homo sapiens
tgtcaagatggattttccccttttatctctgccctcctccactccctttttgtaactcccttacagcccccagacccttcttgaaacgagagccagcaagctgagcacagaccagcagcgacctcccttccagcccccagaaagctcggtcacttgagtgttttctagaatcctggggtgctcccgggccgctctcagagaagtggcaggtttcacgttcagccgtgtggcggatcgtgtggcttccaaagccttttacagcccccgccccccatcccgtggtctgtctgcaggaactctcccgtctgtgagaagcctctttccgagtcgacctcccggccaccccggccctgtgcctgctcggaagagctcactgccagctgcggcctgggcaccgcgggccatgtgtgtttgcatgaggaactctttagtggcagacacctaagagacggctgcggtcaccccacgcctccgcggctcaggag

SEQ ID NO: 734633 - DNA, 306 bp, Homo sapiens
tcagaagaaaagaaatgaatgtgaaagaaagccaagcatcacttgcacttaaatcattaccacggaagatatattagcttcaactttagtttaaaattatgtgaataaatattttgatttctacaaatcttaacatttaaccatgttggtttaaaaatattattgcttgctacttggacataactaatttttccttgtgcatttaatacctctgggcagaatccaaatactgggttctcccgtagttcgtctttagttactaagaaagggtgtaggacacattagccttctggaaacaagtagaag

SEQ ID NO: 734634 - DNA, 81 bp, Homo sapiens
ggcctgaaggccaggaggagtcaactccgcaatcagatgttacagaggatggtgagagccctgaagatccctcagggacag

SEQ ID NO: 734635 - DNA, 155 bp, Homo sapiens
ctttattgttgagcatgttggcattgtcccctttatttttttctctttttgggacatatgaagcaagttattctttttctgtatctttttttcttttgtaaactttttttttgttttgtttaaaaatggctttataaaagggcttttataaccca

SEQ ID NO: 734636 - DNA, 105 bp, Homo sapiens
ggaccgtaagaagaagcggtttgtgggacagtcaggacaggaagacaagaagaagattaagacagagagcggccgctacatcagcagctcctacaagcgagacct

SEQ ID NO: 734637 - DNA, 45 bp, Homo sapiens
tatttggaataataaagcaggaacttttcctgaagttgcaattta

SEQ ID NO: 734638 - DNA, 100 bp, Homo sapiens
tatctcagagatgttaactgtcctttcaagattcaagatcgacaagaagctattgactggcttcttggtttagctgttagacttgaatatggagataatg

SEQ ID NO: 734639 - DNA, 246 bp, Homo sapiens
attcaaggtggatctcaccccctaccctaccatcagctccatcaacaagaggctgctggtcttggaggccttccaggtgtctcacccctgccggcagccagatacacccactgagctgagggcctagctcccaaatcctgccccgttggcacagggccacaggagcagaagctgggtgggctgaagaggcctggaaacgagagtcttaattgaggagatgggagactcgaactctagccctggatc

SEQ ID NO: 734640 - DNA, 118 bp, Homo sapiens
atttggcagagagtgatttggcatatacccgggccatcatgggcagtggcaaagaagattacactggcaaagatgtactcattctgggaggtggagacggaggcatattgtgtgaaat

SEQ ID NO: 734641 - DNA, 71 bp, Homo sapiens
aggcttgctatacttggtctgcttcaaggaggtcgaccttctaatgtatgaagaatgggatgcatttgatc

SEQ ID NO: 734642 - DNA, 446 bp, Homo sapiens
tacctttgcggtcatgtctgtgtctgatgagtgtagaatctctggatgtgcactgtcagtcatgtgtccaccaggcctcgaatatcatatgggaaatgtcatagttaaaaacgtacagccaggcccgtgtgctgttaatagtgtgaaattgtcatgttaaaaaaaaaaacaaaacaggaaccaaatgtgaccttgtgcatatattggtagctgaaaatcttcaaggctactgatgggtggccccttaatcttgtctttgattgctgtgtgcagggaaaggtgtccccgtttgttcatgctgttttggggggtgggggggtatttgcaagaatactcattttgacataataggtcctcttgtcagagatcctctaccacagacattaatagctgagcaggagccacatggattgattgtatccactcaccattgacgatggcattga

SEQ ID NO: 734643 - DNA, 37 bp, Homo sapiens
ttatttttagcctagatctaaccattttcatactctt

SEQ ID NO: 734644 - DNA, 148 bp, Homo sapiens
gtgtcctctgaagtaactgcctgttgcctctgctgccctttgaaccagtgtacagtcgccagatagggaccggtgaacacctgattccaaacatgtaggatgggggtcttgtcctctttttatgtggtttaattgccaagtgtctaaa

SEQ ID NO: 734645 - DNA, 130 bp, Homo sapiens
gtatccctgttgatccgccgggagctgacagagagggccaaggacttcagcctcatcctggatgatgtggccatcacagagctgagctttagccgagagtacacagctgctgtagaagccaaacaagtgg

SEQ ID NO: 734646 - DNA, 346 bp, Homo sapiens
cttccctgcttcctgggaatcaggagcctggacactgccatctctagagcagagtggaggcctggactccctttgctcactccattcgggtccacagctgaggttgcctctgacaagatgaatgggcactgcctgcccttctagtgaaaaggcttggctatggccctgtgtgactccaggtcccaggaaccttgccttcgtcatctgtggatccatccagaacagcggtatctgaagcccaggccatactccctgcctcctttcttctgcctaccagaggctccagagttgagcttgtccttatctagaaacatgtgaagatgcccaagagcctggaggcactgct

SEQ ID NO: 734647 - DNA, 2008 bp, Homo sapiens
acctagatggtcacagtgatccagaggaatcctttgccagagaccttccagacttcccttccattaatatggatcctgctggcctggatgatgaggacgacactagcattggcatgcccagcttgatgtaccgttctccgccaggggctgaggagccccaggccccacctgccagccgggacgaggctgcgctgccggagctcctgcttggtgctcttcctgtaggatccaacctcaccagcaaccttgccagcctggtctcccagggtatgattcagctggccttgtcaggggcctcccaaccaggcccttctggagcacctgcccagagagcaacgagaggcttcctccggtcccccagttcagacctggacactgatgctgagggggatgactttgaacttctggaccagtcggagctgagtcagctggaccctgccagttctaggagccactgaggcagagactccttttgggagtcactgtggtttaggtttttttctccccatcccacttaaggtgatggggcaagggaagaactcagctcccctcccctgaattatatttgtatgctgggtggcctggctgatgctcagaggcctccttagagaggacactcactcccctcccaccagctggatgcccatttctgagctcagtcactgaagtgagagtgtgctcccccaagggaggcttctctccatcaggatggtactttgggggaacaaaatagtcagggatattggttcccctttgaggaggtgctgctgtttgcttttaggtatgagtgctcaggggccctcactgaaagagcccatgcctgccttcctcctttcatcgcctctctagagcccccaaagtcaggcagcagctggagtagttacattgtcatcatctttttttttgagacagtttcgctctgttgcccaggctggagtgcagtggtgtgatcttggctttctgcaacgtctgccttccaggttgaagaggttctcctgcctcagcctccttagtagtgggattacaggtgcccgctactatgcccggctaatttttcttttggtatttttagtagaaatggggtttcaccatgttggccaggctggtctcaaactcctgacctcaagtgagctgactgccttggcctcccagagtgctgggattagtcgtcatcttttgttaaaccaggatttgatttttttcttttcttttcttttcttttttttttttttgagacagagtctctctctgttgcccaggctggagtgcagtggcacaatctcggctcactgcagcctccgcctgccgggtcaagcgattctcctacctcagcctcctcagtagctgagattacaggcatgcaccaccatgcccggctaatttttttgtgtttttagtagagatggggtttcaccgtgctggccaggctggtctagaactcctgactgcaaatgatcagcccgcctcagccacccaaagtgttgggattacaggtgtgagccactgtgcccagcgtgattttttttttttttaaagcaaacttgtcctttggttttgcagaacaggcctgctccctctcatctagcccaccatttcttggggcctgaaccccagtggtccaaagtattgcttgtgaaatttaaaaaatgtgaatatgatgtggggatgggcctcttctacattaccttggcccagggggatcagctggctgggaggattagtgagcacctctgtattttgaggtctgagtcttctggagctgtgtagttaatcttcggtttctgataacccctgggtccatctggccatcagcctcagcagtgagcaaagcaataccatactcatttctatgttcctgttccttcctctgctcctcctttggagaagcaataattcatgggggatgatacagtagcactttacaaatggctccatgtcattcatcccaggggccataatctcttgcaccacctattcttacttcctgttcagctcctttacagctttt

SEQ ID NO: 734648 - DNA, 43 bp, Homo sapiens
cgcctgtagaagagagcacagcatatgttcccaaggcctgagt

SEQ ID NO: 734649 - DNA, 443 bp, Homo sapiens
ttctcttcagacttgggtagaagtgcagagccacagaattgctttccttccccgcctttgacatgaggccttcagtaaagagctacagaacatgagtacattgttataccacagatttttcttgcattagggcacagtgttaaattttttggaggtaaatatactatttataatcactatatatagtaggagggggtatgtgtctcaggcttttctgaagttgcaagacttaaagaaataatccatctgcatcccaagtcctattttataaggatattcataaaaattccatggtgaatccttgtctgaaataggtcctcccttcccagtttctgtgtaagtctttgcatttaagacatccaatcaataatgaaggaaatttttttctgaatgtaggtttgagtgaggggcacctctgctttcccttagcaaccctcatatac

SEQ ID NO: 734650 - DNA, 301 bp, Homo sapiens
agaggagcatttggcctcctgcttccttctgtggcctctgccgggctccattcccaaggaaaagagaggagcttgggctcacagaaagagaaggggatgaaaccccaaggggccctatctttgggatttacatggaattttattttctacaagtttgaccttagccatggtttgcaagtgaacagaacattctgacctctgtcttgctctgctcctttcatcctcgtctcccctgccccgtctggtgcttacattctgaatatatgtcatctcccaagaggcttcactgcctctgcttcca

SEQ ID NO: 734651 - DNA, 45 bp, Homo sapiens
gctgaaggggatgctaagggagataaagcaaaggtgaaggacgaa

SEQ ID NO: 734652 - DNA, 25 bp, Homo sapiens
cgccacggagcaggccgccacccag

SEQ ID NO: 734653 - DNA, 60 bp, Homo sapiens
tgtctacccctgagctggctgcccaatctgatttcatcgtcgtggcctgctccttaacac

SEQ ID NO: 734654 - DNA, 95 bp, Homo sapiens
aaaatgttctatttaacaactgggtcatgtgcatctggtgtaggaagttttttctaccataagtgacaccaataaatgtttgttatttacactgg

SEQ ID NO: 734655 - DNA, 122 bp, Homo sapiens
gtcttgatcttagcagtcaaatcaagggctgtctcgtgactgcttcagctgacaaatacgtgaagatctgggacatcttaggagataggccaagtctagttcattctagggacatgaaaatg

SEQ ID NO: 734656 - DNA, 111 bp, Homo sapiens
aagtcgcttagctcttcggtggttgtcacacgtccggaggcctagccgtcgcgtacctaggatgccgcgtggaagccgaagccgcacctcccgcatggcccctccggccag

SEQ ID NO: 734657 - DNA, 121 bp, Homo sapiens
ccccacctgatgagccaggagctgccggaggactgggacaagcagcctgtcaaggtgcttgttgggaagaactttgaagacgtggcttttgatgagaaaaaaaacgtctttgtggagttct

SEQ ID NO: 734658 - DNA, 88 bp, Homo sapiens
ttacagaatgtctgaaggggacagtgtgggagaatccgtccatgggaaaccttcggtggtgtacagatttttcacaagacttggacag

SEQ ID NO: 734659 - DNA, 84 bp, Homo sapiens
ggtatctgcttcatccggaccagccgcccagaaaatgccatcatctataacaacaatgaggacttccaggtcggacaagccaag

SEQ ID NO: 734660 - DNA, 27 bp, Homo sapiens
cctgggggtctcagggagaacctttca

SEQ ID NO: 734661 - DNA, 101 bp, Homo sapiens
gcccgtggaaaggatgcatccccatctgtccaaaggctatgcgtacgtagagtttgagaatccagatgaagccgagaaggcgctgaagcacatggatggag

SEQ ID NO: 734662 - DNA, 1013 bp, Homo sapiens
ggcagagtggggaggggagtccatgggcctggggccccaagccggggcgtctgagctccccaggcatgaccaaacctcagtggaggggcctctgcttcaggccccgcctggctgacattctgagcccccctcggaggccccgccacagccaacctgcccagtctttcctctgggcttgacccgccaggggagttctccaggcctagggccaggagagaggccctggcaccctggcgtgggtgcccgccaaacgccctgcgaccgctcagaagcacaaatgctgtccatggccgtgaggctgcctgccaggtgaatggacatagcgtgagaggcggtgaggccagggcttccagcctcgtgctgtctcgggactcctgaccgtggtgtgcgtgtgtgcccgtctgtgactttctactcaccaaggttgaagaaaggaaacggggaaaatcaaaaggggttcaaaccccacctcagtaggtggaggggagcgcctgccattggttgtatttttgttctgagttttcggtgccgtgttcctaactactccatcccatgacctcgccacacctactggggcatctggctggtgcctgctgccatggccagcccccactctcaccctgcacagggggtcttgcagcccccaggcccacagcctcgttgggaggacagggtggccctggggacaagagggaggagcccaggggcttacctcactgagagtgctccccagcaggcatccactaccccagggccccccacatgtcatggcaaggttggtagtgaatgggcctggttgggagcagcccctggcccattgcccacccacccatctcactatgcaattcgagttccaagcaacatttgctcctgccctggggccagctctgccccagccctgagaggggtggtgaggcagccccctggaccccagaaccccagacaagggggcaggcgggggaccagggcctctcctgtgggatctttgttttgtgtttaaccataatggttgt

SEQ ID NO: 734663 - DNA, 687 bp, Homo sapiens
taatttttctttacctattttctaatgtcatgattcctgtttgcccaatggatcatttgtatgttaaccactgtatgtaaccaacccttatctggcaacataattgcagcacaataatgatttgcatgataccttgaaattggggggagggggcatgccaagttgggcatcactttgtcttagcaattaatgggatattgattactaaaataagttaatattaagcaaggtgccggttgtacaatctctgatcagtgtcttttcagcactttgagcatttacttggctcatttagtcttccttttgtagcgcatggttgggaggaaaaagtgcatgcatcattccttcactcttctctttttcccgcccccccctcccttcgcacataggcatttggtttgcttccatctttttttatgcagtgcctgtttttttttaaccaattaaaatcccttttgttgatgagctattgagagctgcagtagtttgcttttagtattgttgttgcacttgagcagagacaaacctttattcatagtgtctacaggacatatgaagagtgcaatggcaaaacaagagcaaaaagcacttcctcccatgaccttacagtaaccatactgattgaatccccagggacattccatcattgcaatagctcagatttttcttcctttttctttgcacacc

SEQ ID NO: 734664 - DNA, 21 bp, Homo sapiens
gccccagcgcctcagccccag

SEQ ID NO: 734665 - DNA, 238 bp, Homo sapiens
tgccccctctttgtagctcctataaagggcccacacctggtggatacctggttgagcgtgtggtctctgccccagcctgtccttgtcacgatcacaggccttgcttttgtaacaatgatgaccccggcctgtctcatcttctgaagaggaaaagtcaaagtgttgctgtggctccatatttcaactaaaaatatatctgttggagaaagaaattaacaataaagaattttcataggtt

SEQ ID NO: 734666 - DNA, 36 bp, Homo sapiens
gtagaggaagaagaagaagaaaagaaaccaaagact

SEQ ID NO: 734667 - DNA, 71 bp, Homo sapiens
ctcgtggccatcggtgtctggcagatgcggcacctcaagagcttctttgaagccaagaagcttgtgtagct

SEQ ID NO: 734668 - DNA, 173 bp, Homo sapiens
attctacaagggggttgctcctctctggatgagacagataccatacaccatgatgaagttcgcctgctttgaacgtactgttgaagcactgtacaagtttgtggttcctaagccccgcagtgaatgttcaaagccagagcagctggttgtaacatttgtagcaggttacatag

SEQ ID NO: 734669 - DNA, 113 bp, Homo sapiens
gagactataaatattcaggaagagatagtttgatttttttggttgatgcctccaaggctatgtttgaatctcagagtgaagatgagttgacaccttttgacatgagcatccag

SEQ ID NO: 734670 - DNA, 222 bp, Homo sapiens
tggaccgcatcattgccaaacttcaatccaaggaatattcacagtactgaattcagtgcttagaactgaagttattgagaggacagctttaaaagatgaatgaactcaaaagttcgagttgtgctcttcacgttggttcgataatggcctttatttgaaagctttttaatttttctttacagtaaatattccattctgatttcataaattaaacatttatgc

SEQ ID NO: 734671 - DNA, 147 bp, Homo sapiens
ctgatccaccttgagatcaagccggccatccggaaccagatcatccgcgagctgcaggtcctgcacgaatgcaactcgccgtacatcgtgggcttctacggggccttctacagtgacggggagatcagcatttgcatggaacacatg

SEQ ID NO: 734672 - DNA, 184 bp, Homo sapiens
tgtaatggaagacctttgagaacctgggtgtattaactttgtgtatatagtgtaaatatccccactgtactgttagaggccaacaattctagtatggcttgttggcaaagagtgctacaccgtttcaatgaaacaatgtatgtttgttttaactgaactaaaataaatacatgcttaatcctga

SEQ ID NO: 734673 - DNA, 105 bp, Homo sapiens
tgacttgtgccagcagcatggactgcgtgcctctccgccggaggtctagctgtgggcggccaagaagggtcacccttgaggacaaacctctgtgcaggaccttgg

SEQ ID NO: 734674 - DNA, 297 bp, Homo sapiens
atgtggctgtagatcccaagatgactggggtgggaggtcttgctagaatgggaagggtcatagaaagggccttgacatcagttcctttgtgtgtactcactgaagcctgcgttggtccagagcggaggctgtgtgcctgggggagttttcctctatacatctctccccaaccctaggttccctgttcttcctccagctgcaccagagcaacctctcactccccatgccacgttccacagttgccaccacctctgtggcattgaaatgagcacctccattaaagtctgaatcagtgca

SEQ ID NO: 734675 - DNA, 261 bp, Homo sapiens
accaagacggagagggaagagtccacagctttctggaagctaaggcattctggtggtagaaaagtgtgccccaagccttcatggacgagttataggtcttaagattagtctcctcttgtttggattccatacttgctaaataacctgataataacctggttttccatgtaactgcctctaggaagaaaatgtactgttcatgctgacacagatatttcagtctgcatggtaaaagttctaaatcttactacaaaataataa

SEQ ID NO: 734676 - DNA, 748 bp, Homo sapiens
attaccagctccggacccagtgaggggctgtcgcagccaacaccccggcctcggggctcctggtggcagcaccaggggacacacctgccaaacccaccagatggaggggccctccctggtctctggccaccctcccagcctctgcccagggacccctgccttccccaggccatctgctctgccgtcgacactcgtctcagaagcccctttcccagaagaggctggtcttcaagaagtctcgtttctttgcccctgaagtcagtttcaggggaaggatgtgaaatttttccgtgtagaggttacagccttttatgctgttgagctcccaggtaccaaaaagcttggccaacgcttgccagccagccagctgcaggtggcatctgccacgaaggaagcgccagcctcgccaggccagcaggggcgtcgttttgttgccattttgttgaacgttatgggtttatgggtgttcctggaacttgtctttgtgcattcgttgctgtttgtgttaccctcactgtccccatgtcccacccacgtcctacggcactcaggaagcacttggtgaggacgagccctcacccttcttgtcttccttcccagcagcgcccgcagcgggccatttacacgtcgaggctggcacctggcgcgctcgggggccactgtagcgtctgcctgctccctggactcgcaggcctcgcctgtggcgccttcccagggccagcctgggtcacgagatgctgtcactcag

SEQ ID NO: 734677 - DNA, 2884 bp, Homo sapiens
gtgacactgatcccaactcatgactcagaagtgatgagggaatggtaccaggagacccatgagaaacagcaagatctcaacatcatggttttagcaagcagcagcacagtggttatgcaagatgaatccttccctgcatgcaagattgaactgtaaaaaccaaggccagccacaccacaggatctgaactttgtttccagaaattcttcaatttgaaatcaccttttctaaaaagtcaattcatctagttaagtcgctgaacaattacctgccaaatgctatactgtgtcatggtgatgcaagtcactaaatttctcagtttttgctgattgctaagggaaataacagtatttccacaatagggttcaaattcctgcaaaattacctaccccagttcatctctgctgaacatttggaaaccatgcactagccaacccaactgacttctgctaggtagaggcatttgtcttagagagagagagagcgcgggagagagtgagagagagtgagagcacaaagataacgcaggagagagagagagaaagaatgagaaagaaaaggaatgcaagagaaggagatgtaatgacagagagttctggtgagatacccagagagaaaaagagagagcagggtggggtaaggaggagaaaataaaccaacaattaggtctgcattttctcaggcagtaggcattctttagtctacataggcaaagttttccatttttgtcagtctgagtcatcaaaaagagtcttaattttctaaaacaagttggctagaagaaagtaaaaagaacaacacttgttatgagggcatgtgatattttcacatcttaattaagctccttcagtttgaaggctgcacactgacataatgtagtgagtgtagactggccatgcaagtggtttgggccccattcagaactctcagactctaaacacacaagtagattgatctaaggcatgctcccagcatttgtccacccacttagtccactctgagtcgattaacctgcatgcagcaacacccaagtccaccccaattaactgaagcaaataccaaagcagttgggagtacatatggtagacaatttgccttaggaagtgacttgaatgtacaaagatacttgatgcacttattttttaatgtgagacagcaagtttataaaacatccatataggattatagatacttaaaggaacacgtgggtgagcgtgtgtgggggtactagaagctgatctgattggtccaacagtttgatgctgagtcatgcgtgttgaatcccacttcagtgcacctgtggcctctcagtcaaacaagttgtgcctttcacagcttctttactactgcaagttcaagactgaaatggcttctatgatcagaactgggaaaacagtgaatcttatggtggaagaggttctcagcaagtgtacagtatttaccttcctttgtcttacattggctttttaaattttccattaatttcaacataattatgggaacaagtgtacagaagaattttttttttaagatatgtgagaacttttcatagatgaactttttaacaaatgttttcatttacaggaaattgcaaagaaaattctcaagtgatagtctttttttttaagtgtttcgtaagacaaaaattgaataatgttttttgaagttctggcaagattgaagtctgatattgcagtaatgatatttattaaaaacccataactaccaggaataatgatacctcccaccccttgattcccataacataaaagtgctacttgagagtgggggagaatggcatggtaggctacttttcagggccttgacaagtacatcacccagtggtatcctacatacttctttcaagatcttcaaccatgaggtaaaagagccaagttcaaagaaccctagcacaaatttgctttgggattttcttttctggaaaaaaaaaataaaagaaatagtacattgaaaacaaatgaattctcaactcctacggttcatgtagagtttagagaaaatttccatcattgtcatcattgaactgtgaacctgggaagccagatcatgattaacactgacatcaagtttcaagttgcagatcaatgcacccagtgttcagatgaggcaaacttctccgtgacaactgtgctgtgctctgtcacattacatttcctgcagactctaagatctacggagtagagaacaatgacctcattttattttctatgttagttatttatttcaaaattaacattttagttgatttttgtctgataagtctatgttttgcactgctaactatgatgagggtttaaaaaaatgcttcttcagggtcctttcactgaggacctatgcagtctacttaatgctgtgaattacatttttcaaatgtttaattttttaaagaaaattaatattctatttttgttaggcttctctagaaatgcagcttttatttattaccccatttctttcaagtccttggaaaataacatattaagggtacaagaaattaacacatgatggaaaagtcattgtgacgccaatgaatttcattgagtataaactcatctacttcaaatttattttataagacaacctaagatactcaagataattatttaatggttagctcttaagttgaattggtctacataatgcgtgggaagaaaaccagatttttagccttcttgccaaatccagacctctggttgatttttctttgacagaagatgcaagttattttccaatttcacaattaaatgtatttaacctgaacattattttgctttaaaaactataaacattgtaggagaattatagccagtcttcagttataaccactccaccctcctcactttctctctctctctctcttttt

SEQ ID NO: 734678 - DNA, 690 bp, Homo sapiens
atacaaaagttgggactacaagcaagtgacataaaaagcttctcagctctcgcagagcttgttgctgctgccaaggaccaggcaacagcagagcagccttaagcatcttggaagatcccgaggttagattcttaagcaagagaagagttggacttccaggctgaaggggagaaagtgactctgttctcttagcaaccgtctgtagcaaagaagtgcttccagcatcactccagcaacacgcccatgcgtcttctctcagcgtatttgggtcttctttgcccaaaagaacacaaaagcctttttccattgtatggaagatagtttttaagacatttgaaactttctactatagtttacagaacaaattattttatttttattgtaaatcttagtgtggaagagctgatttctaaaatatgattaaagtaaatatatacctatgaatatcaagagtcgtctccctgagcctgtagttggaagtgacgactgtaatggaatgatgtcttgtatagaaatgcccttctctgaaataaagagaactcctgggctttctaaagaggctgcgggaagccatcctccactcccactgtgtgtgagagcagtgcttctgatcctgctgtcaccccgacctctggcaggagccggcgccagtaggaaagacctccttcctaaataaaagaagtgtctccc

SEQ ID NO: 734679 - DNA, 98 bp, Homo sapiens
gactccttaaagttccatttgctaatgattaatacactgtttgggctggccagtttttcatgcatgcagcttgacgattgagcacagtcaggcctttg

SEQ ID NO: 734680 - DNA, 83 bp, Homo sapiens
ctcttgaaagcatctgtttgagggaaaggtctctgggcaagcaagtggttatttggattgcttgcttccctttttccacctgg

SEQ ID NO: 734681 - DNA, 66 bp, Homo sapiens
gacccggaggaccctccgtgggcacctggcaaagatctatgccatgcactgggggaccgactcaag

SEQ ID NO: 734682 - DNA, 340 bp, Homo sapiens
cgagatgtacgaagacgacgaggaggagtcggaggcccagggccccaagtgaagctgctcgcagctggagtgagaggcaggtggcggccggggccgaagccagcagtgtctaaacccccggagccatctcgctgccgacaccctgctttcccctcgccctagggctcccttgccgccctcctgcagtatttatggcctcgtcctccccacctaggccacgtgtgagctgctcctgtctctgtcttattgcagctccaggcctgacgttttacggttttgttttttactggtttgtgtttatattttcggggatacttaataaatctattgctgtcagata

SEQ ID NO: 734683 - DNA, 243 bp, Homo sapiens
cattgctgttgaatggtgagcacgtgaccatgccgaccacaaaggtgtctgcggaaactcgaggacattcaccacgatgattttcctctctttgatgtacttcaagtgcaactcaaaactatatctgcagggatgaatctgtaacttaaattgggccaatcagaattgttatctttgttcaggtaaaatgagttgcaagatattgtgggtacttttgtgtgctcatttgtgttttccccccct

SEQ ID NO: 734684 - DNA, 33 bp, Homo sapiens
gctttaaggagttttaagctgagtgtcactgta

SEQ ID NO: 734685 - DNA, 161 bp, Homo sapiens
ccctaccactctcaaacctttacgagaccctgggagtcgttggatccaccaccactcagctgtacacggaccgcacggagaagctgaggcctgagatggaggggcccggcagcttcaccatcttcgcccctagcaacgaggcctgggcctccttgccagct

SEQ ID NO: 734686 - DNA, 193 bp, Homo sapiens
gtcaggctgccagatgggacctcactgacccagacgttccgggcccgggaacagctggcagctgtgaggctctatgtggagctccaccgtggggaggaactaggtgggggccaggaccctgtgcaattgctcagtggcttccccagacgggccttctcagaagctgacatggagcggcctctgcaggagctgg

SEQ ID NO: 734687 - DNA, 49 bp, Homo sapiens
cttccttctgggactggacagctttgctccgctcccaccgcccccgccc

SEQ ID NO: 734688 - DNA, 37 bp, Homo sapiens
ctctgcaatctgcaaataactcctccattgaaataac

SEQ ID NO: 734689 - DNA, 316 bp, Homo sapiens
tctgtttatgtcagggggatggggccattgcatccttagccattgtcacaaaatatgtggagtagtaacttaatatgtaaagttgtaacatacatacatttaaaatggaaatgcagaaagctgtgaaatgtcttgtgtcttatgttctctgtatttatgcagctgatttgtctgtctgtaactgaagtgtgggtccaaggactcctaactactttgcatctgtaatccacaaagattctgggcagctgccacctcagtctcttctctgtattatcatagtctggtttaaataaactatatagtaacaatgaaggca

SEQ ID NO: 734690 - DNA, 76 bp, Homo sapiens
gctgaaaatatttacaatgatgaagagtcagatgtcacgacatccgaactggagggacaaggatcttaaacccaaa

SEQ ID NO: 734691 - DNA, 193 bp, Homo sapiens
tgggtaaaggaagaagccccagatatactgtgccttcaagagaccaaatgttcagagaacaaactaccagctgaacttcaggagctgcctggactctctcatcaatactggtcagctccttcggacaaggaagggtacagtggcgtgggcctgctttcccgccagtgcccactcaaagtttcttacggcatag

SEQ ID NO: 734692 - DNA, 25 bp, Homo sapiens
aaatttcaattctcgtggtaatacc

SEQ ID NO: 734693 - DNA, 59 bp, Homo sapiens
gagctccagggactgtcttttctgtattcgctgttcaataaacattgagtgagcacctc

SEQ ID NO: 734694 - DNA, 32 bp, Homo sapiens
gcaagcacctcccagcctgcctttcggagcag

SEQ ID NO: 734695 - DNA, 113 bp, Homo sapiens
ataatcccagatccagctggaaagctgaagtatttcgataaactgaattgagaaatacttcttcaagttatgatgcttgaaagttctcaataaagttcacggtttcattacca

SEQ ID NO: 734696 - DNA, 216 bp, Homo sapiens
tgaggagtgtgcacggatgctgaatgtttgggaatgagaggatgagtgagtgaggcttgaaaacacaccacattgaaaatcctgccacagcagcagccgcagccgccaacagcagcgctgttagtgagctaagtaagcactgacttcgtagaaaaccataacatcggccatcttggaaaagagaaaaacaatggagttacttatttaaaaaaaaag

SEQ ID NO: 734697 - DNA, 56 bp, Homo sapiens
aaaaactccccttttttgcccacagcttgcctactctcggcctagaagcagttatt

SEQ ID NO: 734698 - DNA, 47 bp, Homo sapiens
aaaaagcctttagtggatatttgggaacagatcaaagtaaatggaag

SEQ ID NO: 734699 - DNA, 33 bp, Homo sapiens
tggacatcggtggtgctgaccaggaattctttg

SEQ ID NO: 734700 - DNA, 128 bp, Homo sapiens
cggctggagcgggagcgcatggagcgggaacggctggagcgcgaacgcatgcacgtggagcacgagcgcaggcgcgagcaggagcgcatccaccgtgagcgcgaggagctgaggcgccagcaggaact

SEQ ID NO: 734701 - DNA, 739 bp, Homo sapiens
aaattggtgtcacatttgtaaaagtaattttaatagttaatcatctctgagagtaacctgtattttaattgttgaaacttaaccaaaataagatactgtctcagctagggcttgtcatttgtgtatttagtgttaagataggaatgctagtgtctctttaattaattggaaatagatggaggctaaaaatgaaggtttttctttgaaactgaattaacttgggaatatttgttgttaaaaacttctttttgcccaaaataactcattttgtattatctgaaaatatataatttctggtcatgtgtatgttaaaatagaaaattttgaggaaaaatggaaatagggtggaaaagtactcggtaaacagtagtaaccaaatattttcactccagatttgtgttttctctggcacagagtagatcttttgggaaatatatatgaaagtggattaagtttgactacccttatgttagccacatctggatgagaacagttacaaagagtttggtctctaagttgatttgtacccagtgggtcaacttctgcaaaattccgtaatggtgtattagtattagaatagtgaataaaatgggaaagttatacatgtatacttattatcttgctcagtattttatctcacttgttctagaattttctgtaaaccctgctactgggtttgaagagttttagtcatcctttaacaatttttaaaaatttagcttctagattccatttggta

SEQ ID NO: 734702 - DNA, 255 bp, Homo sapiens
tgagaaaatacatgaacagaaactgcccaggtggaacagcacgtaacctagtgagtgactgtactcctttctaggaatgctgattcagagtgcacctctttgactaggtcccaggatccccttgtccctggagtagggactaactatagcacaaagtaatatgtgccaatgctatttgtgaaatgtttggtctttctaaacgactaaaggatttgttgggtttttgcttaagttttgaaccaaatcctagagcca

SEQ ID NO: 734703 - DNA, 40 bp, Homo sapiens
ctaggttcaggtcagctctgcccctccgcccccctcctgc

SEQ ID NO: 734704 - DNA, 150 bp, Homo sapiens
ggtggatgatgtgaccttccttgggggactgcggaagggacgagggttccctggagtcttacggtccaacatcaggaccaagtcccatggacatgctgacagggtccccagggagaccgtgtcagtagggatgtgtgcctggctgtgtac

SEQ ID NO: 734705 - DNA, 165 bp, Homo sapiens
ctgtagtgtaaagtggccactatgaatccctatgtatgagaggagggaggcaggctgcagcttcagccacagaatggggactatggaagacagcaggagctcatttcctctgcacattttggctgttagacctgtgtgtgtgtttaaaaaaagagaagtcagtgc

SEQ ID NO: 734706 - DNA, 80 bp, Homo sapiens
ggcccagatattacactgtcaaaactttacaagttaattgaagagtcttgtccacagctggcaaattcagtgcagatcag

SEQ ID NO: 734707 - DNA, 45 bp, Homo sapiens
catttttttgtgtgtacagcgtcatataggctttgcctttaatga

SEQ ID NO: 734708 - DNA, 2800 bp, Homo sapiens
gccactcagggagctgcctgggctccgtgtctctgagccccgggtggcaggacccaccggcacctctttcttcctctgtcatatggctcctctgtcaccagccccagtgtgcacagaagaattggaccaggtcactgtacgtagaaatttgtagaaaagcagacttagataaacatctcctttggatatttatttccgcttttggcagcaggtgaacatttatttttaaaacttctatttaaaagaagtccaaaaacatcaacactaaggtttgatgtcatgtgaaaagtgtaataataacagttaagatttcatgatcattttcactggacctttcctgatattttgtttcagagttcttagtgtggctttttccatttatttaagtgattctttgttactcactaactctgcaagcctgtggaataatgaagtaccttcctggaaagtttggattattttttaaacaaaaacaagggagatacatgtattctcaggtacacacagagctgagagggctgaatggttttctgctatagcagccgagaggcctcccatcatggaaagatttctccaggaaaaggaggaatgtagccagctccccactcaggacgcttcctcatttctcttcaccaaaaccaaacagagacagcttccagcaccttcttcagtgttaccatctctaagaaggaaccagttgggaccgtgaagactcccgaccctgtggccatgatggaaatcaaaggaagacaccctctacgtcacctgccctcgactgtgtgtgcccacatgtgccgagagatggcccagagccagttcccctccagctgcaagggcatggtgtccccagagctctgagtctgtcactctccctctgctactgctgctgatctgaatatggaaaccccatggttcccttccccattcggactgggtgtgtacaagcaaggacccagatgcatcagacacagcccccaagatgttcctttctactcggccagctcgggagccagacacagcactcacagcccaggccgtgatccaccctccccaagtccaccagggccagcggcccctcacctctctggtcactggtgagaccttccacaactttcctccagacctgccagcagatgtgcccaccaggggcattaggtatccgccggagcctggccatagggtagtctcgggagccgcgctgagatcttttgccacctgcattttagaagaacatggtctctgtctcctcggcccagccagctgtcccggcaaggcctgccgagggcagttttcaacctcatgaaggaaacacagtcctgccaaggagggggagtggcgcccatggggacaggcctcagtccttagaagccctctgggtagctgtgcccacccagccttcatggctgcaggtacaaggacctttgcttccatagagaaaacgcacagctcagaaagggggccacatgggcagaaacccaaaggaaggacaaaccacgaccaccgtggccatctgcagaatccctggaagagaaggaaggcagggtggagcggggggaagaccatcatggagagaaggaccacagcatcaggagacgggacacgccacacccagcaggcagcctgtgtgttgcttaattttttaagagcaagaggggtagagaggatcaagctggccctggctggagatggctagcccctgagacatgcacttctggttttgaaatgactctgtctgtggggcagcagaaactagagaaggcaagtggctgccccaccccaaggcgtgaccaggaggaacagcctgcagctcactccatgccacacgggtgggccaccagcctgctgtcagaagtctctgggctccaactggtcttgtaaccactgagcactgaaggagagaggtcttggtcagggctggacagcatgcccgggaggaccagcagaggattaaaggtgactgggaggaccagcggaggataaaagacactgctcagggcagggcttctaccctgcatccctggccaagaaaagggcagtccccatgtgggcttgcagggtcactctcaggggcctctttcagctggggctggcaacttgcgtctgggggacacctccaggtgtgtggggtgaggatttcctataaccagggctcccagaagctttgcttatgtaaggaggtctgggagccagcccattggaggccaccagccattttggcttcaaaggaccccacctcacccaggtctcagcggcagtgggcacagctatgtcttcaggagctcccgtcaaacctcatagctggggcgctcccagacaggccagtccagacaggacacgctgggcccctggcatccagaggaagagccaggagtgtgggaaggcccacagtgggggctgtggcttctgacactcaggtcatagcctcagaggtctgaggtcagcccccacagacccatccggcccgccccccaagtccctgcagagagcacttagagttatggcccaggccctggtccacccttcccctgtgcacctccggctgggtttgccaagtcagggagcagggctggccgcaggaactcccaaaccttggctttgaatattgttgtggaggtgtgctcgtccctttctggacgtgcaaggtacctgtcccagcaggtcagatggggccagctgaggcgctcccccaggcaggaagggccagccttcaccatcgcgtgggattgggaggaggggcctccgtgagcagcccctcctctgccgctgtcccagcccagtccctctcccggagccttggcag

SEQ ID NO: 734709 - DNA, 1596 bp, Homo sapiens
aaccttgtccacagccattttaaatatccacttagccctgtgtagttggtaggtggacaccactttcataagtgaacttgagctcactactcaattgtgcagcttaatatgctgactagggacattcccctatggattatctttatatcactgtctttctaagcccagagatgtcataagtgacaagaaaagtgataggatcaagaaatgggtgtcactgcttcatttggaacatgttattaactatggtctctttcaaataaatagtagttttatatttcaacacaagttgctataagcagtccttgatgggtttttgattgcatcagctggaaagcctcaaatctaagagggcttcccatcctagatataaaataggtgttgcctattgctgtgcttataaaatgaaaaaggaaattgaggacacttttgcaaatgccagaatgtaagattcattcagtgtgctccctgggcctttatggcatgggttgacaggatttgtttattttctaaaattagcttcattcaatatttatcatcctcctttccctctctgagaatgaactatgtataaaataagcttctgcctatttgcatttatcttccaaacccaatctagtaggatgttctcattttaaaaacgaggggaaaagaccagagtttttcaggagaaaactggaggaaaatgggcacaaaaactcagaaggcagctattcccagcagcttcctagttaacaacccccatgctgcctccagtctttgtctgtattcttctgtatttaaccttcagattgtaagccttttctggcaagcttttcttctttttttaaactcttttcctgaaactttttatgaatggctatggcaccattaatgctgctgaatatctttaaactctgcacaagcaagtgtgtagcttaaggccactactggtaaggaaaccaagtgtcctctgtgccttttttctttctgtgaagtaatttaagaatatccaaaaaaattagactttaaaaagttatcttggtacaacaccgtgtgtatatacacttggaagcttaaaaaggtgttttgtctggaacttagaagcagctctaaatctagtagagcagactttctaacatacctagttttgtgtattggctttgctggagtatgatagcaaaatgaagactcttttactcagctctggtattgctcataacttaccaagaggctaatactaaacttggaaaattgtttaagtatgttttatcaagcagtctgggttttgttttttaatatactttttaatggatatgtgaaaactgaaggaaatgttaaaggttttttaatggtgcaagtgaaggtgccagttgctatttgatatcacactctacaaaagcttcattactttatttgatggtggttgctaagcagccattgcacagagcataagtctactgggtgcctttacatgccagaggctgatgctgcactgttgatgtcatgtgaggaaataatgcacatgctctaactgctcaacaggaaatgaacctagaaacagaaaatgaaaaggttgattgaaataaaacttgatcaacgcgactgtattttgaa

SEQ ID NO: 734710 - DNA, 70 bp, Homo sapiens
tgaccttggggtccatgtggatggcttcatcgctaatgtagctcacacttttgtggttgatgtagctcag

SEQ ID NO: 734711 - DNA, 65 bp, Homo sapiens
ctgcgggcgatgcccagggcacagtgaaggtgtggcagctgagcacagagttcacggaacaaggg

SEQ ID NO: 734712 - DNA, 101 bp, Homo sapiens
gctctgacagattaccgggcagagctccgggatgacccaatcatcagcacacacttggccaagttgtatgataacttactagaacagaatctgatccgagt

SEQ ID NO: 734713 - DNA, 44 bp, Homo sapiens
tgtaaatacaacagaacattaataaatatctcttgtgtagcacc

SEQ ID NO: 734714 - DNA, 291 bp, Homo sapiens
aagctaaaccagccccagaaatatttgaaaatgaagtcatggccctgctgagagactttgctaaaaacaaaaacaaagagcagagactgcgtgccccagatcttgagtacctctttgaaaagccacgttgagctgtgctccacggcctggcatgggggttcagtctgtggatggtaactacttatgatggacgttagccttgcttccggcttcttagatgcccagctgccctaccccagaccactggtcctgcctcaagtgatggacataaccctctcctaggacatacat

SEQ ID NO: 734715 - DNA, 51 bp, Homo sapiens
ctccccgttgtcggcggccgcggccaccgccgcctccttctccgctgcggc

SEQ ID NO: 734716 - DNA, 417 bp, Homo sapiens
cctaggccgccctgagcatcctggttcaaacgggtgcctggtcagaaggccagccgcccacttcccgtttcctctttaactgaggagaagctgatccagtttccggaaacaaaatccttttctcatttggggaggggggtaatagtgacatgcaggcacctcttttaaacaggcaaaacaggaagggggaaaaggtgggattcatgtcgaggctagaggcatttggaacaacaaatctacgtagttaacttgaagaaaccgatttttaaagttggtgcatctagaaagctttgaatgcagaagcaaacaagcttgatttttctagcatcctcttaatgtgcagcaaaagcaggcgacaaaatctcctggctttacagacaaaaatatttcagcaaacgttgggcatcatggtttttg

SEQ ID NO: 734717 - DNA, 1657 bp, Homo sapiens
ttttttgtatgaaacttggaggcttacaggtatagacagctttcagctacagcacattctaattttttattttgtttagttcttttgtattcacttctggtctctttaagactgttttaaaagaaatcaatttagggaaccccagttatataatataaactttgtaatctgagagaaaaaatgtatagtaaatctaagtcttgatttttaactttctattgtaaaaaataataatatacagagtttaatagaaggtgatgttttggttttgttttcccagaggctgccatatggtctttgagtacggggatgtcccaaactggcccaccaatgagcatggcggctccggccaggaatgccagagttagcctcccaggcttgcgggtggacatgcctgctccctgccagcctccagtggcctggccaggccctcccgagcctgtctgccctccccaggggtggaggagtctctgggccccaggaggattccctcccggagactcgcacggtgctccctgctcacgcgttgtcacagttagtccggaaatgactgaaaccaggcattctcccggacctcagcgtgggggagcctccaggcagacgctgggtatggagctgtggtgtggtctgtcctgtatggtggccagtgctttctgccagcatttctggatggatatagggactatcattagtatcctaatacacggtgattttaaaacaaccataaaattgattcagagtccactgacccttacagatgtaggtatacccttactggagagggaactctgatgaggagatgctggtaaattatcattttttaaattgctggtgagtctgacacttggtgagttttcagccagtttgttaaacttttaattaagttttgtttataataaaaatataaatggatttgaaagtttccattttttaaagttaccctcgttttcaaaggtattttctaaacagatctttaatggactatttaaaccgaatttaaggaattcacacacgacagttgacaggtcttcacgcaggctggttggtaacgtgctgccagcacagggctgggtgatacgtacaccctaagccgggggtgcctggggctggggggcgctccttgcaatgcccctccagccacagggcagtgaggtgctgcctgtgtgagccgtcgggggagcggccggctgtgggggcagcgcagcaggagcatcgtggggcctttccttctcggctggttctctgtgacggtggcgtcggctcgcctctgctcctttcatctagaaagaagccactgaccctgacagcccacggcgggtacactgagcagctgcattggtgctgtcacttttttaaggctttctgtccagacttcaacactggtttcttttcagagtttcgaaggattaatgacttcctcagcgcccttgctggcgggctgagggtgacagtcacgtccgtttcttctgtattagaaggctgcggtgattcaattagattgtcccactgctgagacctgtagggcagcttctaacatgcttttttcaaggggagaggagtagtgacaagtcgtgtgtcggaattggatttgagaacactctgaatgacccctggaggccgagggggcaggcttcgggcgtgaactgaactccagacc

SEQ ID NO: 734718 - DNA, 144 bp, Homo sapiens
gctgccttcgaccagcgcatgaagacatggcagcgctggcaggatgcccaagccacactgcagaagaagcgggaggccgaggctcggctgctgtgggccaacaagcctgataagctgcagcaggccaaggacgagatcctcgag

SEQ ID NO: 734719 - DNA, 59 bp, Homo sapiens
ccgttcctgagcatgctgcccgcctgcagcgcttggcccagatccacattcagcagcag

SEQ ID NO: 734720 - DNA, 90 bp, Homo sapiens
gaggaccgcgtggtcgtcatccgcttcggccacgactgggatcctacgtgcatgaagatggacgaggtcctgtacagcatcgccgagaag

SEQ ID NO: 734721 - DNA, 2265 bp, Homo sapiens
tgttttccttttaccattttatcttatcttgctttggaggaccttaaatgctactgaaacttacctgagaaccataggactgtggcaaacaaaaccaattcatgaagtgaattaatgatgaggatctgaaaacttggctggggctatatatactggaagttgaaggttaaaggaaaagcacaagaaactttggaagcactttttctgcatacttagatgatcttcatgggcccacagggtaccaggataaagccgaactggtaccatctactcttttgaagtgttttagtctagttattggatcagtgaaaaacattagtatacgtttttaaataggctaatttttcaacttggatcattaggcttacgtactacttgtttcaaatgtgtcaaatacaaaaatggtaactaggttgacagatactttgtatttttcttttgaattcagacctggaatgtaagtaagtgacaatgcttatggaaagccagttagttagaattggaaatctgtcttgtcattttacaagcattagattcctttcctgtgtgaagaaagcctcagtgaaacaggtctttgccataactttatgaagtgctacagaaagcacaaagaattgattcatgttcatcaatacctgctgagagtactgtcccaggaatatccagtggatggattcatcatccaggaggttcaaaagtaagatggttttcaaatcatttttgagactggttgcataacagcagggtacctgaaagagccttctgggagttagtgaactaggtagattgttttgttcacataacgccaccatcaacttaaagtgaattgtctttgttataaatgaggtcactatggacttaccctaaagatcttctgtacttctgtcttccataggacaaatgataagtactacatacctcatctcttgggttattattgtagtcttgcattcatgattatgaatttaaaaataaataccaattatggaaatagtactaaaggcttgccgcgcatgaaacattattttaattggtttaaagtccctttataaagagtgctacatggtttagataaaggaaacatataactattgagttacaggggattttattaattataaaatgcaatcaatttaaattacgtaggtttaagactagtcccttggataagccccaagcgaatttgtcttcagattattaaaattagtgctgtaaatcagggtgggcaattcacagcctttctgaactgactgaactagagcttgcagtgaagtgttctgctgagactgagcaccttacagatatttttctccagaagatggtgctgggtaataaaatcatcacaattagggaatggttagtggtctctactgtggcaaatgccaactgttggaattcactttattgtagaaaaacccaaactgagactcttaagttttgtttagcaatgtgtttctggtatgaaacaaactactgtgtcactgtccaggtaggaaacaattctttcaactgggttttcagcataaatgggaactgatgtagaaggcaggatttagcccttctaggcaaaagaaaagctcagttgggtttcacgagtgttcctgtgcttatattcagtctgtgcctacatgttctcatgcatgtctaacctgatttacctcttacctgtaacctaccttatcatgtggcttttaattggcagtcactcagccatttctaagcagatatagtactacctttcagaactcacattggcaagtgtaaaaagatgacttaaggtgaagtgaggacaaaatcacattctgcatactaacctatttttttctccctttaaggtgctaaacttgcacctcatgtccactcagtaacaagtattgggacgtagagcacagcctcactcagctctgaaaggtaatacagcctgtgaggaagtgagccagcagtggcctttgcaattgtggatcttaagctctgctctcagcagatttcaggtgtaaccatttgttaactgtactgaaggtgtgtcctcaagaagaaagtgttcaaattaaaaaagctgctgccaagtacactgtgtggtcttctcctttgaatcctagggttctatccctcttcagagtcatgtttctggtgctgctactttaaaacacagctcacaagaataactaacttgctcaaatatggagaaaactcaatagggttcagggaggttctggcagtgtgcagtgtgaaataatcctgagtccttgctgaacacaactgtag

SEQ ID NO: 734722 - DNA, 119 bp, Homo sapiens
tccaggtgacatacctcccctccagtcagaagagtaaacgtgccaagcacttccttgaattgaagagctttaaggataactataacacattggagagtactctgtgacggagctgaagg

SEQ ID NO: 734723 - DNA, 107 bp, Homo sapiens
gcaaacatatctacctctccacccgaattgatggcagcctggtcatcaggccatacactcctgtcaccagtgatgaggatcaaggctatgtggatcttgtcatcaag

SEQ ID NO: 734724 - DNA, 247 bp, Homo sapiens
cctctacatgctaggatcacaggaagactttgtaaggacagtttaagttctcctgcaaggtttaatttgttatcatgtaaatattccaaagcaggctgccttgtggttttggccagccttgtgctatgttgataagattgatttactgcttaaaatcactttactttatccaatttttactgaactttttatgtaaaaaaataaaatcaattaaagaacttggcatgtgtgttccctaaaagttaat

SEQ ID NO: 734725 - DNA, 49 bp, Homo sapiens
ggttgatgatgtcgtgaaaagactcttgtctttggaaatggccaacaag

SEQ ID NO: 734726 - DNA, 1625 bp, Homo sapiens
tcacagtacaagagtcactttgttgcagccagtttaagtaatcagaaggctggaagttctgctgctggggcaagtgggtggactagtgcagggagcttgaattctgttccaactaactcagcacaacagggccataacagtcctgacagccccgtcaccagtgccgccaagggcatcccaggctttggcaatactggcaacatcagtggtgcccctgtgacctacccgtctgccggagcccaaggagtcaacaacacagcttcagggaataacagccgagaagggactgggggcagcaacgggaaaagagagagatatactgagaaccggggcagcagccgtcacagtcacggagagactggcaatcggcatagcgatagtccacgtcacggagatggtggtcgccatggagatggataccgccatccagaaagcagcagccgtcatactgatggccatcggcacggggagaacagacatggaggaagcgcaggccggcatggggagaaccggggtgcaaatgatggtcggaatggggaaagcaggaaagaagcttttaatcgtgagagcaagatggagcccaagatggaacccaaagtggacagcagcaagatggacaaggtggacagcaagacagataagacagctgacggctttgctgtcccagagccgcctaaacgcaagaaaagtcgatgggacagttagaggggatgtgctaaagcgtgaaatcagttgtccttaatttttagaaagattttggtaactaggtgtctcagggctgggttggggtccaaagtgtaaggaccccctgcccttagtggagagctggagcttggagacattaccccttcatcagaaggaattttcggatgttttcttgggaagctgttttggtccttggaagcagtgagagctgggaagcttcttttggctctaggtgagttgtcatgcgggtaagttgaggttatcttgggataaagggtcttctagggcacaaaactcactctaggtttatattgtatgtagcttatattttttactaaggtgtcaccttataagcatctataaattgagttctttttcttagttgtatggccaggcagtccccattttaggagttggcttctgcaaattcaatccattgagctaactgttggggagcaatttggtagttgtagacatttgcagggaagggagatgtctgattctaaatgggagttgatgctcaggtccccagccaggtttgcatccagccctgagacatgtaggaaacacctttcagacccaggctctgaagattcccagaagccacaaggattgaagggaaaaggtgatcctggtaactgttccaggattgctccaggtttgagatggtattgctaaatttaaaattaaacaagagacccaacaacagcttttaaagtgtcttctatttcattgtattttttttaacttgccccaatgatagaaaagtcttttgctgaaatgattttgatgatttttgtttatcgtttataaaaaggaaaagaaatatacaaactttgacttttgtgactttgtgaaggtttctttaagatgtgcattcctttctgcttgctctctagtaaatgttttactaccgggac

SEQ ID NO: 734727 - DNA, 194 bp, Homo sapiens
aaagattgtaagtaaaatagatggcgacaaggacgggtttgtcactgtggatgagctcaaagactggattaaatttgcacaaaagcgctggatttacgaggatgtagagcgacagtggaaggggcatgacctcaatgaggacggcctcgtttcctgggaggagtataaaaatgccacctacggctacgttttag

SEQ ID NO: 734728 - DNA, 32 bp, Homo sapiens
ctttgacaattattctgccaatgttatggtag

SEQ ID NO: 734729 - DNA, 976 bp, Homo sapiens
tcaaatgatttttttttttcggtttgagctggatgggtacagcttaaatcatgggtccagcctaaaaaccaccatttaacttacactgatcaatttcaacatggactgtttttggttttttgtttttaaataaagcatcattaatgcacatctgcaggggtttgccaaacagcccaaactgtatacattacaatcattaaaagttcttattttttttaatattagtgccgttatcatggagaacagcatgacagctgtctttggcagtctgtcatttttctagcattttcagaaactcatcggaaatggcggtacctgtgtttcccttcgaaagcctctcagtacagcactcctgttcctctgttaaaactccttgttaatccagtgatcttttaggccaaggaaatattttgtgatggtgttctgggtccatacaccagcaatgaaggagatagatttgtgtacttgtgttttttaatcagcattaacatgggcaggcaccctcatttatagatgtcaggaaacattcagtgaaaaacttgtagaatgggatgtgataacgaggttccagtaatctgagcagtctaacgaggcccacctcctccaccacagaacgtggctatgttccaagtgctactctcactcagcctgttgcggatcttcatggcctcaggagacttgtttctccatgggctcttctggactgcacacttccaccatagcttgctgggttgatctagatgtctgtttgttgtatggaaattttgggggaaaaaatccaaaacacaaactgtgggttgaaatattaaccgtctccttggttccttggtattcaccgtgcctgatctgcacatttcatcgtggctgtttctgtatagcctatactgcattagcccaagagattgttgctttgtaactttttgcactattgttttggctggatttgtattacacacagttttaaaaaaaacaattc

SEQ ID NO: 734730 - DNA, 121 bp, Homo sapiens
catccctgcctcttgtcacaaactgccccagcaagaatttgaggttctgacaacagtacccatcccccacagtaccccttcagctcagtttctagaaagctcccttttctttgaaatctgc

SEQ ID NO: 734731 - DNA, 117 bp, Homo sapiens
ctcctttagcggcagagttttccgagtgaccttcttgatgctggctgtttctctcaccgttcccctgcttggagccatgatgctgctggaatctcctatagatccacagcctctcag

SEQ ID NO: 734732 - DNA, 126 bp, Homo sapiens
atcagccggcagtccattgatgcactcaaagactggttcagagatgaaatgcagaagagtgactggcagcttattgtggagctgaagaaagtatttgaaatcatctaattttttcacatggagcag

SEQ ID NO: 734733 - DNA, 602 bp, Homo sapiens
tttgctagtgctgctttgtgtgtatgtgtggcaaataatttgggggtgatttgcaatgaaattttgggacccaaagagtatccactggggatgttttttggccaaaactcttccttttggaaccacatgaaagtcttgatgctgctgccatgatccctttgagaggtggctcaaaagctacagggaactccaggtcctttattactgccttcttttcaaaagcacaactctcctctaaccctcccctcccccttcccttctggtcgggtcatagagctaccgtattttctaggacaagagttctcagtcactgtgcaatatgccccctgggtcccaggagggtctggaggaaaactggctatcagaacctcctgatgccctggtgggcttagggaaccatctctcctgctctccttgggatgatggctggctagtcagccttgcatgtattccttggctgaatgggagagtgccccatgttctgcaagactacttggtattcttgtagggccgacactaaataaaagccaaaccttgggcactgttttttctccctggtgctcagagcacctgtgggaaaggttgctgtctgtctcagtaca

SEQ ID NO: 734734 - DNA, 58 bp, Homo sapiens
gttccagggggctgttttgtaatgagatgctgctggcaggccactcagaggctcccag

SEQ ID NO: 734735 - DNA, 190 bp, Homo sapiens
gttggcctgtggcatcattgcacgctccgctggccttttccagaaccccaagcagatctgctcttgcgatggcctcaccatctgggaggagcgaggccggcccatcgctggcaagggccgaaaggagtcagcgcagccccctgcccacctttgagcaggacctcaccttggctctgttgctgtcctccag

SEQ ID NO: 734736 - DNA, 290 bp, Homo sapiens
ccgctggaaagctgaagactgtcgcctgctccgaatttccgtcatcaactttcttgaccagctttccctggtggtgcggaccatgcagcgctttgggccccccgtttcccgctaagcctggcctgggcaaatggagcgaggtcccactttgcgtctccttgtaggcagtgcgtccatccttccctagggcaggaattcccacagttgctactttcctgggagggcctcatgttttatctggttcttaaatgtttgttactacagaaaataaaactgcgctactattccaa

SEQ ID NO: 734737 - DNA, 79 bp, Homo sapiens
cccattttaattttattcattttttcctttgccattgatttttgagactcatgcattaaattcactagaaacccaaaaa

SEQ ID NO: 734738 - DNA, 80 bp, Homo sapiens
ggaggaggaggatggaggcggtggtgttcgtcttctctctcctcgattgttgcgcgctcatcttcctctcggtctacttc

SEQ ID NO: 734739 - DNA, 75 bp, Homo sapiens
agatgggtgggcgttgtgaatttgaagaagtgcaaggtttccttgaccaggttgcccacaagttgcccttcgcag

SEQ ID NO: 734740 - DNA, 112 bp, Homo sapiens
gttagtgtttctagcattatcccatccctttgagccattcaggggtacttgtgcatttaaaaaccaacacaaaaagatgtaaatacttaacactcaaatattaacattttag

SEQ ID NO: 734741 - DNA, 2707 bp, Homo sapiens
gtggggtccctggccatcttcccactggtctatgccatccccctcgccctcagcaccgaggccattctccattccaacaacaccagggacatggagtccgaccgggaggctggtatcgtcacgctggccatcctcatcggccccacgttctcctacattctctacaacacactgctcttcctgccctacctggtcttcagcatcctggccacacactgcaccatcagcctggcactccccctgcttaccattcccatggccttctcccttgagagacagtttcgaagccaggccttcaacaaactgccccagaggactgccaagctcaacctcctgctgggacttttctatgtctttggcatcattctggcaccagcaggcagtctgcccaaaatttaaggggacaagtagctccccccacgacatgtctccctttcttagaatatattaaagtcagagtctctgaggaaggaatgtgatttggcagtcagggtactaagcatgggtgggaactcctgccttataaaaattgtttttgtgttcttaaagataatatgttgtttttctgtttttgttttttccattttatggggaatttaaaaaccattcttgtatcagaaggtgaattaggcgcatggtctttgttttattaataatttccactagagggtgttctcaggtcactttgcagtgaagtggacttagttcctccttgttctgtacaaaatgtctccagactttgtaaaggagctgcccagtttggcctcctgtcccgaaaagaccctaataactaggcagagtgttgtcctgctttcttcgtctcgtaggatgtgctatgattggtgccaggcctcactaacacaggggctacctgtctcttattctcagcacctgtgtcctgagatacgctgcctgagacagagagagtccctcattaacagcctgtgtggctgtcagctttttgcctaaattgtgattcagatgcttttgttctctctcctttcacttattgccacagttgaggaaaagtgtcagattaccctgcagcaagacaagccaaggactgggagggaaaaaaaaaccactctggaggcaactgagaaaatcactgctttggataggaatcagtagggtggctgttttccctttgttgaatctactagagtgacaggaaggactcccagccctttcagtaactatcaggagccctgaaacggtagaggcactgccatccttgtgggatactcaaagcccacagggcttttccctccctattgcatcttctgatgctccccacacctaccctccacctctccacctctgtggtgttcccatttgtgtgtttcccatctgtggagccagactgagcaatagcttagcagcgagtcagggacagctgccactttccacagagccacaggatgggcagagcagggacccagggaatgaatagccagtggacaaacagtcttgagctctgttcagccagagtgatgggccctgccagttaaggggctgtgtcttcatccttgaagacagatgtgcaatattgaccctgcctctccccagggctttgtggaaagatagttgagggctttagtgagatcacactcagagtggggcaattccagcatttatcctggctgcgtttcattgcattgtctgtgaagtataatttctgggccagaattgctcagttgcatttgatccaggactatagattggaaatgggtcatcattgttttctgttgtgattatagccattctagtaggcgtttaaggtcatggcctgcagaaaatgatgtaagaactagttcttaatctttcagatcaagctaatgatgatatggaaccttgagttcgaattgattggtttacttggaaaaaaacatgtttgaaaattgcaaaagttccgccgggcgcggtggctcatgcctgtaatcccagcactttgggaggccgagacgggcggatcacgaggtcaggagatcgagaccatcttggctaacacggtgaaaccccgtttctactaaaaatacaaaaaattagccaggcgtgttggcgggcgcctgtagtcccagctacctgggcggctgaggcaggagcatggcgtgaacccaggaggcggagcttgcagtgagctgagatcatgccactgcactccaacctgggggacacagcaagactccgtctcaaaaaaaaaaaaagaaaaagaaaattgcaaaagttcctctaaagttaaatcaaaggtggtttgtctagcagagagccagaatcttctaatagtgggcagagcccagagacaaggggaagaaagatgaccttctccccagtccttcccagcaccatttttgtttcacaccaggcttgtggcattttggtgctcacaggggttttgccttctgacctctccttggagtaggccattctcatgcagggctcaccctgaggcaggaggaccaagggctccctgcgtccacggaccacgtatgccttggtggtcactcccatcggggctatcagttctgcactgtgccctggtgcggattttaatgcatatttttatatataaatgttcccaaaggccaaatttgttgccaggttttatacgcaggtcaccataatttgtattatgttccctgagtcaatgaaggttttctttagacttcttaattaaaaagagaagaaagaaaatgttccaaaaaag

SEQ ID NO: 734742 - DNA, 317 bp, Homo sapiens
gtacacaacaaaacatttgaatgatgagactacctccaagcaaattaaatccatgctgcaataacaattctggaataagcacctgctgtagacagaagacagtattctgcaatgactgagaatgcagttttttagtgattgcaattactatctcatttattcttgcttttatttctttcctctgttcctcttccctcttttttaatcatgttcttaagacttcttttctgtgccaaaatcagtaaagttacactctgaagggatatcatcctttcaaacgggccatctaaggcagctaattatgcattgcattgggg

SEQ ID NO: 734743 - DNA, 127 bp, Homo sapiens
ggagtgctgctgtatggacctccaggcactgggaagacactgttggcccgggctgtggctcatcatacggactgtacctttattcgtgtctctggctctgaattggtacagaaattcataggggaag

SEQ ID NO: 734744 - DNA, 123 bp, Homo sapiens
caaggaggaggagctgcagtgctaagtccagccagcgtgcagctgcatccagaaaccggccactacccagcccatctctgcctgtgcttatccagataagaagaccaaaatcccgctgggaaa

SEQ ID NO: 734745 - DNA, 152 bp, Homo sapiens
acattccatacaccaagcttgggtgatgaggaatttgaaatcccacctatctccttggattctgatccctcattggctgtctcagatgtggttggccactttgatgacctggcagacccttcctcttcacaggatggcagtttttcagccca

SEQ ID NO: 734746 - DNA, 70 bp, Homo sapiens
ctggctggatggcaagcatgtggtgtttggagaggtcaccgaaggcctagatgtcttgcggcaaattgag

SEQ ID NO: 734747 - DNA, 74 bp, Homo sapiens
accataacttttttttaaggacaaaagttgttgccttcctaagaaccttctttaataaactcattttaaaactc

SEQ ID NO: 734748 - DNA, 64 bp, Homo sapiens
tgtttgtttcaattggccatttaagtttagtagtaaaagactggttaatgataacaatgcatcg

SEQ ID NO: 734749 - DNA, 46 bp, Homo sapiens
caagctcctgccccagcttacctacttggatggctatgaccgagag

SEQ ID NO: 734750 - DNA, 127 bp, Homo sapiens
caagccctgcgtccagcgagcgtcacagcacaacctgcaaaaacggagctgggctgcagctggggctggcatggactttcatttcagagattcggtttttaagaagatgcatgcctaatgtgttctt

SEQ ID NO: 734751 - DNA, 32 bp, Homo sapiens
tccatgattgtgaacaatctcttgaaacccat

SEQ ID NO: 734752 - DNA, 60 bp, Homo sapiens
aacccaacattgatagtcccttgaacacacatgctgccgagctctggaaaaaccccacag

SEQ ID NO: 734753 - DNA, 154 bp, Homo sapiens
ggcatgggaaggatttaacaccgatatattgttaccgctgaaaatgaactttatgaaccttttccaagttgatctatccagtgacgtggcctggtgggcgtttcttcttgtacttatgtggttttttggcttttaatacagacattttcctcca

SEQ ID NO: 734754 - DNA, 181 bp, Homo sapiens
atctggcaggggatcgacattgagaccaagatgcacgtccgcttccttaacatggaaaccatggccctctgccactgacccaccgccacctccgcggagaaactgcactttgcaatggggccgcctccccgcgtagctggagcagcccaggcccggcggacagcctcttcctgcagcgccg

SEQ ID NO: 734755 - DNA, 43 bp, Homo sapiens
acatgtatcctttcacacatttgccttgacaaacttctttcac

SEQ ID NO: 734756 - DNA, 166 bp, Homo sapiens
aattggcagagggggtcgatttgggaggaaaggtgtggctataaactttgttactgaagaagacaagaggattcttcgtgacattgagactttctacaatactacagtggaggagatgcccatgaatgtggctgaccttatttaattcctgggatgagagttttgg

SEQ ID NO: 734757 - DNA, 127 bp, Homo sapiens
tgcgcgacatggaaggtgatctgcaagagctgcatcagtcaaacaccggggataaatctggatttgggttccggcgtcaaggtgaagataatacctaaagaggaacactgtaaaatgccagaagcag

SEQ ID NO: 734758 - DNA, 243 bp, Homo sapiens
gagctgctgctcaagaggtcatcaaaataatcaccaaacaatttgtaatttttaataatacttacatttacagtggcatgtcacaaacttcagcaactttccagttgtagagtaagcaagcaccttaagtagtgtgttaatgattgaaactgtaattgccttcgggttgtgctttagtctgtaaaattctaaaggagagctgctaaattgttttcttaataaacatttttctcatttgtaaaa

SEQ ID NO: 734759 - DNA, 95 bp, Homo sapiens
ggcaacgcaatctataatctccttccagatatcatcagccgcctgtcagaccccgagctgggggtggaggaagagcctttccacaccatcatgaa

SEQ ID NO: 734760 - DNA, 120 bp, Homo sapiens
cacatggatagcacagttgtcagacaagattccttcagattccgagttgcctaccggttgttttcgttgttgttgttgttgtttttctttttctttttttttttgaagacagcaataacc

SEQ ID NO: 734761 - DNA, 2416 bp, Homo sapiens
acctcggaaggtttctaatctctcttaaggttgggtttcttgagtgtgtaatggggatatgtgtcctatgctgctcacaaggattttgttggcatcttatttgatgacttcactgaaaacccgttattgtaacacactctgttgatgtaagctattttgacatgatcatccatgttctgcgggagaagctcaaatagtagatctctgaggaaactcacgcatgttgaaggagtggagtcggtgctttaggaaggaaaatctgtgtgtgggtctcaagtctcaccgcatgggtcataacctattcctgaccctgacagaaaatccttctagaaataaaagagaaataaaggaaatccaccataccaaggcataaaaagacagccatgaaaaagtaacataaggggagaggaagatgggcttataacagattacaggatgttgtcagttttaataacgtgatgtgaagaaaagattctgtttgcacacagggagaggttcttttcctggctagtcaaagcacaccttacgtacattctgaagccgtctcttatatgattcatttttttcactgtagataagacttttatggatggattgtttttctcaaataatattatcgctttgtgactaaagtaaagattattaattcctgaggcaagaagatataaaagctccagaaacgttgactgggaccactggagacactgaagaaggcaggggcccttagagtcttggttgccaaacagatttgcagatcaaggagaacccaggagtttcaaagaagcgctagtaaggtctctgagatccttgcactagctacatcctcagggtaggaggaagatggcttccagaagcatgcggctgctcctattgctgagctgcctggccaaaacaggagtcctgggtgatatcatcatgagacccagctgtgctcctggatggttttaccacaagtccaattgctatggttacttcaggaagctgaggaactggtctgatgccgagctcgagtgtcagtcttacggaaacggagcccacctggcatctatcctgagtttaaaggaagccagcaccatagcagagtacataagtggctatcagagaagccagccgatatggattggcctgcacgacccacagaagaggcagcagtggcagtggattgatggggccatgtatctgtacagatcctggtctggcaagtccatgggtgggaacaagcactgtgctgagatgagctccaataacaactttttaacttggagcagcaacgaatgcaacaagcgccaacacttcctgtgcaagtaccgaccatagagcaagaatcaagattctgctaactcctgcacagccccgtcctcttcctttctgctagcctggctaaatctgctcattatttcagaggggaaacctagcaaactaagagtgataagggccctactacactggcttttttaggcttagagacagaaactttagcattggcccagtagtggcttctagctctaaatgtttgccccgccatccctttccacagtatccttcttccctcctcccctgtctctggctgtctcgagcagtctagaagagtgcatctccagcctatgaaacagctgggtctttggccataagaagtaaagatttgaagacagaaggaagaaactcaggagtaagcttctagaccccttcagcttctacacccttctgccctctctccattgcctgcaccccaccccagccactcaactcctgcttgtttttcctttggccataggaaggtttaccagtagaatccttgctaggttgatgtgggccatacattcctttaataaaccattgtgtacataagaggttgctgtgttccagttcagtaatggtgaatgtggaaaagtgaaataagaccaagaaatacacccaagtgcttcttcgtctccttcatctgagtctctgcctcctccaccccagcaacagcactggttcaaggagaggagagatgcaggtgacatgcctgccaacttctgagcaaggttgggcgagtgggtgctatttagttgtaagtgcttctcagcttatgagggggatgacagtcacagcaggtatggtggagctgacctggaccctggacactcttctcccccactgccactgacaacatgtgtggccttgtgtgactctctttgccctgtgaggtttgcaatggcttatgaggtggttacttcaataataaggatgtgattttgcctgcaaacagatatatgactccccaggtcacgaatctgagtggtcatgtaaacagaagcaaatatggactcaatgattatagcatatggctgtggtatgatcacattcgcattccttagagggaaatgccaccatacaagagaggccatgtgggttggccatgcagttcaggctg

SEQ ID NO: 734762 - DNA, 3861 bp, Homo sapiens
gacatgaccatcagagaggcccggaatggtagtccccagcatacagtgacaaaagttaagcaactaatatttttgggaaacatgtaaagtctcttcagggattctcagaactacagctggaggaaagtggtttcctgcactcatatgtgggtgagtagagcacagtttgttattgaatgtttaatggaatggtgacctcctaaaagatggcggcttggagacatttgagatatcaagagattaaccaaactcatgtgccaccattctcacaaggatatttggaatgtcctgacttattttgggctttgagtcagaaaaatgattcgtaaggccagctccacctcttctatctcaaaagctcggaagagatctatggtatttggccaaatgctagctataattgcctttctgtggtttgacgtcaattaatgactggactttgtacccgaaagacagttaaaacgaaaggtagccaggaagggaaatcatttcctccacgcgtccgagcaagaacagctaaaatgaaagccatcattcatcttactcttcttgctctcctttctgtaaacacagccaccaaccaaggcaactcagctgatgctgtaacaaccacagaaactgcgactagtggtcctacagtagctgcagctgataccactgaaactaatttccctgaaactgctagcaccacagcaaatacaccttctttcccaacagctacttcacctgctccccccataattagtacacatagttcctccacaattcctacacctgctccccccataattagtacacatagttcctccacaattcctatacctactgctgcagacagtgagtcaaccacaaatgtaaattcattagctacctctgacataatcaccgcttcatctccaaatgatggattaatcacaatggttccttctgaaacacaaagtaacaatgaaatgtcccccaccacagaagacaatcaatcatcagggcctcccactggcaccgctttattggagaccagcaccctaaacagcacaggtcccagcaatccttgccaagatgatccctgtgcagataattcgttatgtgttaagctgcataatacaagtttttgcctgtgtttagaagggtattactacaactcttctacatgtaagaaaggaaaggtattccctgggaagatttcagtgacagtatcagaaacatttgacccagaagagaaacattccatggcctatcaagacttgcatagtgaaattactagcttgtttaaagatgtatttggcacatctgtttatggacagactgtaattcttactgtaagcacatctctgtcaccaagatctgaaatgcgtgctgatgacaagtttgttaatgtaacaatagtaacaattttggcagaaaccacaagtgacaatgagaagactgtgactgagaaaattaataaagcaattagaagtagctcaagcaactttctaaactatgatttgacccttcggtgtgattattatggctgtaaccagactgcggatgactgcctcaatggtttagcatgcgattgcaaatctgacctgcaaaggcctaacccacagagccctttctgcgttgcttccagtctcaagtgtcctgatgcctgcaacgcacagcacaagcaatgcttaataaagaagagtggtggggcccctgagtgtgcgtgcgtgcccggctaccaggaagatgctaatgggaactgccaaaagtgtgcatttggctacagtggactcgactgtaaggacaaatttcagctgatcctcactattgtgggcaccatcgctggcattgtcattctcagcatgataattgcattgattgtcacagcaagatcaaataacaaaacgaagcatattgaagaagagaacttgattgacgaagactttcaaaatctaaaactgcggtcgacaggcttcaccaatcttggagcagaagggagcgtctttcctaaggtcaggataacggcctccagagacagccagatgcaaaatccctattcaagacacagcagcatgccccgccctgactattagaatcataagaatgtggaacccgccatggcccccaaccaatgtacaagctattatttagagtgtttagaaagactgatggagaagtgagcaccagtaaagatctggcctccggggtttttcttccatctgacatctgccagcctctctgaatggaagttgtgaatgtttgcaacgaatccagctcacttgctaaataagaatctatgacattaaatgtagtagatgctattagcgcttgtcagagaggtggttttcttcaatcagtacaaagtactgagacaatggttagggttgttttcttaattcttttcctggtagggcaacaagaaccatttccaatctagaggaaagctccccagcattgcttgctcctgggcaaacattgctcttgagttaagtgacctaattcccctgggagacatacgcatcaactgtggaggtccgaggggatgagaagggatacccaccatctttcaagggtcacaagctcactctctgacaagtcagaatagggacactgcttctatccctccaatggagagattctggcaacctttgaacagcccagagcttgcaacctagcctcacccaagaagactggaaagagacatatctctcagctttttcaggaggcgtgcctgggaatccaggaactttttgatgctaattagaaggcctggactaaaaatgtccactatggggtgcactctacagtttttgaaatgctaggaggcagaaggggcagagagtaaaaaacatgacctggtagaaggaagagaggcaaaggaaactgggtggggaggatcaattagagaggaggcacctgggatccaccttcttccttaggtcccctcctccatcagcaaaggagcacttctctaatcatgccctcccgaagactggctgggagaaggtttaaaaacaaaaaatccaggagtaagagccttaggtcagtttgaaattggagacaaactgtctggcaaagggtgcgagagggagcttgtgctcaggagtccagccgtccagcctcggggtgtaggtttctgaggtgtgccattggggcctcagccttctctggtgacagaggctcagctgtggccaccaacacacaaccacacacacacaaccacacacacaaatgggggcaaccacatccagtacaagcttttacaaatgttattagtgtccttttttatttctaatgccttgtcctcttaaaagttattttatttgttattattatttgttcttgactgttaattgtgaatggtaatgcaataaagtgcctttgttagatggtgaacttgtgtctggggcttttttttcatttctttttctttctttcttttttttttttttttttttgagacactgtcttgctctgtcacccaggctggagtgcagtagtgtgaacatgactcactgtagcctcaaactcctgggttcaaacaatcctcccatataagcctcctgagtaggtggggctacagaagtgtgctgtcatgcccagctaatttttttttgttgttgttagagacagggtctcactatgttgcccaggctgagtttgggggttttgatgatgcacacagcagttagtctcattttaaatagcaaacgtgacacatggtaaatgggagtgactgatatctgctatccttattaggggttattggattacccaagataacgttctactgtttagtagacatttgcttcctccacgcacatcccactcctaccccatgatgatgagcattttgggtggggctgatcctgctcccagctacagaggttggct

SEQ ID NO: 734763 - DNA, 3823 bp, Homo sapiens
gacatgaccatcagagaggcccggaatggtagtccccagcatacagtgacaaaagttaagcaactaatatttttgggaaacatgtaaagtctcttcagggattctcagaactacagctggaggaaagtggtttcctgcactcatatgtgggtgagtagagcacagtttgttattgaatgtttaatggaatggtgacctcctaaaagatggcggcttggagacatttgagatatcaagagattaaccaaactcatgtgccaccattctcacaaggatatttggaatgtcctgacttattttgggctttgagtcagaaaaatgattcgtaaggccagctccacctcttctatctcaaaagctcggaagagatctatggtatttggccaaatgctagctataattgcctttctgtggtttgacgtcaattaatgactggactttgtacccgaaagacagttaaaacgaaaggtagccaggaagggaaatcatttcctccacgcgtccgagcaagaacagctaaaatgaaagccatcattcatcttactcttcttgctctcctttctgtaaacacagccaccaaccaaggcaactcagctgatgctgtaacaaccacagaaactgcgactagtggtcctacagtagctgcagctgataccactgaaactaatttccctgaaactgctagcaccacagcaaatacaccttctttcccaacagctacttcacctgctccccccataattagtacacatagttcctccacaattcctacacctgctccccccataattagtacacatagttcctccacaattcctatacctactgctgcagacagtgagtcaaccacaaatgtaaattcattagctacctctgacataatcaccgcttcatctccaaatgatggattaatcacaatggttccttctgaaacacaaagtaacaatgaaatgtcccccaccacagaagacaatcaatcatcagggcctcccactggcaccgctttattggagaccagcaccctaaacagcacaggtcccagcaatccttgccaagatgatccctgtgcagataattcgttatgtgttaagctgcataatacaagtttttgcctgtgtttagaagggtattactacaactcttctacatgtaagaaaggaaaggtattccctgggaagatttcagtgacagtatcagaaacatttgacccagaagagaaacattccatggcctatcaagacttgcatagtgaaattactagcttgtttaaagatgtatttggcacatctgtttatggacagactgtaattcttactgtaagcacatctctgtcaccaagatctgaaatgcgtgctgatgacaagtttgttaatgtaacaatagtaacaattttggcagaaaccacaagtgacaatgagaagactgtgactgagaaaattaataaagcaattagaagtagctcaagcaactttctaaactatgatttgacccttcggtgtgattattatggctgtaaccagactgcggatgactgcctcaatggtttagcatgcgattgcaaatctgacctgcaaaggcctaacccacagagccctttctgcgttgcacaagcaatgcttaataaagaagagtggtggggcccctgagtgtgcgtgcgtgcccggctaccaggaagatgctaatgggaactgccaaaagtgtgcatttggctacagtggactcgactgtaaggacaaatttcagctgatcctcactattgtgggcaccatcgctggcattgtcattctcagcatgataattgcattgattgtcacagcaagatcaaataacaaaacgaagcatattgaagaagagaacttgattgacgaagactttcaaaatctaaaactgcggtcgacaggcttcaccaatcttggagcagaagggagcgtctttcctaaggtcaggataacggcctccagagacagccagatgcaaaatccctattcaagacacagcagcatgccccgccctgactattagaatcataagaatgtggaacccgccatggcccccaaccaatgtacaagctattatttagagtgtttagaaagactgatggagaagtgagcaccagtaaagatctggcctccggggtttttcttccatctgacatctgccagcctctctgaatggaagttgtgaatgtttgcaacgaatccagctcacttgctaaataagaatctatgacattaaatgtagtagatgctattagcgcttgtcagagaggtggttttcttcaatcagtacaaagtactgagacaatggttagggttgttttcttaattcttttcctggtagggcaacaagaaccatttccaatctagaggaaagctccccagcattgcttgctcctgggcaaacattgctcttgagttaagtgacctaattcccctgggagacatacgcatcaactgtggaggtccgaggggatgagaagggatacccaccatctttcaagggtcacaagctcactctctgacaagtcagaatagggacactgcttctatccctccaatggagagattctggcaacctttgaacagcccagagcttgcaacctagcctcacccaagaagactggaaagagacatatctctcagctttttcaggaggcgtgcctgggaatccaggaactttttgatgctaattagaaggcctggactaaaaatgtccactatggggtgcactctacagtttttgaaatgctaggaggcagaaggggcagagagtaaaaaacatgacctggtagaaggaagagaggcaaaggaaactgggtggggaggatcaattagagaggaggcacctgggatccaccttcttccttaggtcccctcctccatcagcaaaggagcacttctctaatcatgccctcccgaagactggctgggagaaggtttaaaaacaaaaaatccaggagtaagagccttaggtcagtttgaaattggagacaaactgtctggcaaagggtgcgagagggagcttgtgctcaggagtccagccgtccagcctcggggtgtaggtttctgaggtgtgccattggggcctcagccttctctggtgacagaggctcagctgtggccaccaacacacaaccacacacacacaaccacacacacaaatgggggcaaccacatccagtacaagcttttacaaatgttattagtgtccttttttatttctaatgccttgtcctcttaaaagttattttatttgttattattatttgttcttgactgttaattgtgaatggtaatgcaataaagtgcctttgttagatggtgaacttgtgtctggggcttttttttcatttctttttctttctttcttttttttttttttttttttgagacactgtcttgctctgtcacccaggctggagtgcagtagtgtgaacatgactcactgtagcctcaaactcctgggttcaaacaatcctcccatataagcctcctgagtaggtggggctacagaagtgtgctgtcatgcccagctaatttttttttgttgttgttagagacagggtctcactatgttgcccaggctgagtttgggggttttgatgatgcacacagcagttagtctcattttaaatagcaaacgtgacacatggtaaatgggagtgactgatatctgctatccttattaggggttattggattacccaagataacgttctactgtttagtagacatttgcttcctccacgcacatcccactcctaccccatgatgatgagcattttgggtggggctgatcctgctcccagctacagaggttggct

SEQ ID NO: 734764 - DNA, 2747 bp, Homo sapiens
gcggccgctcgcgattggaaccaactcttctacatgtaagaaaggaaaggtattccctgggaagatttcagtgacagtatcagaaacatttgacccagaagagaaacattccatggcctatcaagacttgcatagtgaaattactagcttgtttaaagatgtatttggcacatctgtttatggacagactgtaattcttactgtaagcacatctctgtcaccaagatctgaaatgcgtgctgatgacaagtttgttaatgtaacaatagtaacaattttggcagaaaccacaagtgacaatgagaagactgtgactgagaaaattaataaagcaattagaagtagctcaagcaactttctaaactatgatttgacccttcggtgtgattattatggctgtaaccagactgcggatgactgcctcaatggtttagcatgcgattgcaaatctgacctgcaaaggcctaacccacagagccctttctgcgttgcttccagtctcaagtgtcctgatgcctgcaacgcacagcacaagcaatgcttaataaagaagagtggtggggcccctgagtgtgcgtgcgtgcccggctaccaggaagatgctaatgggaactgccaaaagtgtgcatttggctacagtggactcgactgtaaggacaaatttcagctgatcctcactattgtgggcaccatcgctggcattgtcattctcagcatgataattgcattgattgtcacagcaagatcaaataacaaaacgaagcatattgaagaagagaacttgattgacgaagactttcaaaatctaaaactgcggtcgacaggcttcaccaatcttggagcagaagggagcgtctttcctaaggtcaggataacggcctccagagacagccagatgcaaaatccctattcaagacacagcagcatgccccgccctgactattagaatcataagaatgtggaacccgccatggcccccaaccaatgtacaagctattatttagagtgtttagaaagactgatggagaagtgagcaccagtaaagatctggcctccggggtttttcttccatctgacatctgccagcctctctgaatggaagttgtgaatgtttgcaacgaatccagctcacttgctaaataagaatctatgacattaaatgtagtagatgctattagcgcttgtcagagaggtggttttcttcaatcagtacaaagtactgagacaatggttagggttgttttcttaattcttttcctggtagggcaacaagaaccatttccaatctagaggaaagctccccagcattgcttgctcctgggcaaacattgctcttgagttaagtgacctaattcccctgggagacatacgcatcaactgtggaggtccgaggggatgagaagggatacccaccatctttcaagggtcacaagctcactctctgacaagtcagaatagggacactgcttctatccctccaatggagagattctggcaacctttgaacagcccagagcttgcaacctagcctcacccaagaagactggaaagagacatatctctcagctttttcaggaggcgtgcctgggaatccaggaactttttgatgctaattagaaggcctggactaaaaatgtccactatggggtgcactctacagtttttgaaatgctaggaggcagaaggggcagagagtaaaaaacatgacctggtagaaggaagagaggcaaaggaaactgggtggggaggatcaattagagaggaggcacctgggatccaccttcttccttaggtcccctcctccatcagcaaaggagcacttctctaatcatgccctcccgaagactggctgggagaaggtttaaaaacaaaaaatccaggagtaagagccttaggtcagtttgaaattggagacaaactgtctggcaaagggtgcgagagggagcttgtgctcaggagtccagccgtccagcctcggggtgtaggtttctgaggtgtgccattggggcctcagccttctctggtgacagaggctcagctgtggccaccaacacacaaccacacacacacaaccacacacacaaatgggggcaaccacatccagtacaagcttttacaaatgttattagtgtccttttttatttctaatgccttgtcctcttaaaagttattttatttgttattattatttgttcttgactgttaattgtgaatggtaatgcaataaagtgcctttgttagatggtgaacttgtgtctggggcttttttttcatttctttttctttctttcttttttttttttttttttttgagacactgtcttgctctgtcacccaggctggagtgcagtagtgtgaacatgactcactgtagcctcaaactcctgggttcaaacaatcctcccatataagcctcctgagtaggtggggctacagaagtgtgctgtcatgcccagctaatttttttttgttgttgttagagacagggtctcactatgttgcccaggctgagtttgggggttttgatgatgcacacagcagttagtctcattttaaatagcaaacgtgacacatggtaaatgggagtgactgatatctgctatccttattaggggttattggattacccaagataacgttctactgtttagtagacatttgcttcctccacgcacatcccactcctaccccatgatgatgagcattttgggtggggctgatcctgctcccagctacagaggttggct

SEQ ID NO: 734765 - DNA, 2709 bp, Homo sapiens
gcggccgctcgcgattggaaccaactcttctacatgtaagaaaggaaaggtattccctgggaagatttcagtgacagtatcagaaacatttgacccagaagagaaacattccatggcctatcaagacttgcatagtgaaattactagcttgtttaaagatgtatttggcacatctgtttatggacagactgtaattcttactgtaagcacatctctgtcaccaagatctgaaatgcgtgctgatgacaagtttgttaatgtaacaatagtaacaattttggcagaaaccacaagtgacaatgagaagactgtgactgagaaaattaataaagcaattagaagtagctcaagcaactttctaaactatgatttgacccttcggtgtgattattatggctgtaaccagactgcggatgactgcctcaatggtttagcatgcgattgcaaatctgacctgcaaaggcctaacccacagagccctttctgcgttgcacaagcaatgcttaataaagaagagtggtggggcccctgagtgtgcgtgcgtgcccggctaccaggaagatgctaatgggaactgccaaaagtgtgcatttggctacagtggactcgactgtaaggacaaatttcagctgatcctcactattgtgggcaccatcgctggcattgtcattctcagcatgataattgcattgattgtcacagcaagatcaaataacaaaacgaagcatattgaagaagagaacttgattgacgaagactttcaaaatctaaaactgcggtcgacaggcttcaccaatcttggagcagaagggagcgtctttcctaaggtcaggataacggcctccagagacagccagatgcaaaatccctattcaagacacagcagcatgccccgccctgactattagaatcataagaatgtggaacccgccatggcccccaaccaatgtacaagctattatttagagtgtttagaaagactgatggagaagtgagcaccagtaaagatctggcctccggggtttttcttccatctgacatctgccagcctctctgaatggaagttgtgaatgtttgcaacgaatccagctcacttgctaaataagaatctatgacattaaatgtagtagatgctattagcgcttgtcagagaggtggttttcttcaatcagtacaaagtactgagacaatggttagggttgttttcttaattcttttcctggtagggcaacaagaaccatttccaatctagaggaaagctccccagcattgcttgctcctgggcaaacattgctcttgagttaagtgacctaattcccctgggagacatacgcatcaactgtggaggtccgaggggatgagaagggatacccaccatctttcaagggtcacaagctcactctctgacaagtcagaatagggacactgcttctatccctccaatggagagattctggcaacctttgaacagcccagagcttgcaacctagcctcacccaagaagactggaaagagacatatctctcagctttttcaggaggcgtgcctgggaatccaggaactttttgatgctaattagaaggcctggactaaaaatgtccactatggggtgcactctacagtttttgaaatgctaggaggcagaaggggcagagagtaaaaaacatgacctggtagaaggaagagaggcaaaggaaactgggtggggaggatcaattagagaggaggcacctgggatccaccttcttccttaggtcccctcctccatcagcaaaggagcacttctctaatcatgccctcccgaagactggctgggagaaggtttaaaaacaaaaaatccaggagtaagagccttaggtcagtttgaaattggagacaaactgtctggcaaagggtgcgagagggagcttgtgctcaggagtccagccgtccagcctcggggtgtaggtttctgaggtgtgccattggggcctcagccttctctggtgacagaggctcagctgtggccaccaacacacaaccacacacacacaaccacacacacaaatgggggcaaccacatccagtacaagcttttacaaatgttattagtgtccttttttatttctaatgccttgtcctcttaaaagttattttatttgttattattatttgttcttgactgttaattgtgaatggtaatgcaataaagtgcctttgttagatggtgaacttgtgtctggggcttttttttcatttctttttctttctttcttttttttttttttttttttgagacactgtcttgctctgtcacccaggctggagtgcagtagtgtgaacatgactcactgtagcctcaaactcctgggttcaaacaatcctcccatataagcctcctgagtaggtggggctacagaagtgtgctgtcatgcccagctaatttttttttgttgttgttagagacagggtctcactatgttgcccaggctgagtttgggggttttgatgatgcacacagcagttagtctcattttaaatagcaaacgtgacacatggtaaatgggagtgactgatatctgctatccttattaggggttattggattacccaagataacgttctactgtttagtagacatttgcttcctccacgcacatcccactcctaccccatgatgatgagcattttgggtggggctgatcctgctcccagctacagaggttggct

SEQ ID NO: 734766 - DNA, 1633 bp, Homo sapiens
aacacaactttgtctcttcagcctggcaagagctgaggcactgaaaacttcttttttcccctagaaaatgacacactctcctcctaagggtccctttgattttgtcctggtggaaagcaacaaagagaagaacgtgaacaggaatatgtatatttcagttgtcatctgagtcccatggataggaggctcaattctcttcttcatctttcagatctccgcagaccctgccctctcactgtacaattcagagattgacactcagcaggcattcaataaacgtctgtgtcaaatgagaacaacttgatggggcaagtaggagtcaatcctgcatccctccctccctttttttcctctccattcgacctttagggctctggtttcctgtaagcagtgaattatttacctctgctcatagatatcaaattggcccttcccaggttgcagcagggtggggcggggaggcggccttgttcagtctgttaataggaggagcaacctccttgttcaaacagcacttacaggtggggacctgtttttgctaagtcatcctggggatgctcaaagctccattgttagatcctttctgtcctccttcctggctcctccttcctccccacccctctaataggctcataagtgggctcaggcctctctgcggggctcactctgcgcttcaccatggctttcattgccaagtccttctatgacctcagtgccatcagcctggatggggagaaggtagatttcaatacgttccggggcagggccgtgctgattgagaatgtggcttcgctctgaggcacaaccacccgggacttcacccagctcaacgagctgcaatgccgctttcccaggcgcctggtggtccttggcttcccttgcaaccaatttggacatcaggagaactgtcagaatgaggagatcctgaacagtctcaagtatgtccgtcctgggggtggataccagcccaccttcacccttgtccaaaaatgtgaggtgaatgggcagaacgagcatcctgtcttcgcctacctgaaggacaagctcccctacccttatgatgacccattttccctcatgaccgatcccaagctcatcatttggagccctgtgcgccgctcagatgtggcctggaactttgagaagttcctcatagggccggagggagagcccttccgacgctacagccgcaccttcccaaccatcaacattgagcctgacatcaagcgcctccttaaagttgccatatagatgtgaactgctcaacacacagatctcctactccatccagtcctgaggagccttaggatgcagcatgccttcaggagacactgctggacctcagcattcccttgatatcagtccccttcactgcagagccttgcctttcccctctgcctgtttccttttcctctcccaaccctctggttggtgattcaacttgggctccaagacttgggtaagctctgggccttcacagaatgatggcaccttcctaaaccctcatgggtggtgtctgagaggcgtgaagggcctggagccactctgctagaagagaccaataaagggcaggtgtggcaccacacacaccaccaccaacacaacccgcgcctttttccggggcacaacgcta

SEQ ID NO: 734767 - DNA, 849 bp, Homo sapiens
  misc_feature (52)..(52): n is a, c, g, or t
  misc_feature (60)..(60): n is a, c, g, or t
  misc_feature (66)..(66): n is a, c, g, or t
  misc_feature (69)..(69): n is a, c, g, or t
  misc_feature (72)..(72): n is a, c, g, or t
  misc_feature (75)..(76): n is a, c, g, or t
aaggagagtttgtatcataagtaggtgttggattatgtcatatgcgtatgtnctgcatcnggtgantgntcnccnntccgcggattggcgaccatttcaaccaatttggacatcaggagaactgtcagaatgaggagatcctgaacagtctcaagtatgtccgtcctgggggtggataccagcccaccttcacccttgtccaaaaatgtgaggtgaatgggcagaacgagcatcctgtcttcgcctacctgaaggacaagctcccctacccttatgatgacccattttccctcatgaccgatcccaagctcatcatttggagccctgtgcgccgctcagatgtggcctggaactttgagaagttcctcatagggccggagggagagcccttccgacgctacagccgcaccttcccaaccatcaacattgagcctgacatcaagcgcctccttaaagttgccatatagatgtgaactgctcaacacacagatctcctactccatccagtcctgaggagccttaggatgcagcatgccttcaggagacactgctggacctcagcattcccttgatatcagtccccttcactgcagagccttgcctttcccctctgcctgtttccttttcctctcccaaccctctggttggtgattcaacttgggctccaagacttgggtaagctctgggccttcacagaatgatggcaccttcctaaaccctcatgggtggtgtctgagaggcgtgaagggcctggagccactctgctagaagagaccaataaagggcaggtgtggcaccacacacaccaccaccaacacaacccgcgcctttttccggggcacaacgcta

SEQ ID NO: 734768 - DNA, 1337 bp, Homo sapiens
aacacaactttgtctcttcagcctggcaagagctgaggcactgaaaacttcttttttcccctagaaaatgacacactctcctcctaagggtccctttgattttgtcctggtggaaagcaacaaagagaagaacgtgaacaggaatatgtatatttcagttgtcatctgagtcccatggataggaggctcaattctcttcttcatctttcagatctccgcagaccctgccctctcactgtacaattcagagattgacactcagcaggcattcaataaacgtctgtgtcaaatgagaacaacttgatggggcaagtaggagtcaatcctgcatccctccctccctttttttcctctccattcgacctttagggctctggtttcctgtaagcagtgaattatttacctctgctcatagatatcaaattggcccttcccaggttgcagcagggtggggcggggaggcggccttgttcagtctgttaataggaggagcaacctccttgttcaaacagcacttacaggtggggacctgtttttgctaagtcatcctggggatgctcaaagctccattgttagatcctttctgtcctccttcctggctcctccttcctccccacccctctaataggctcataagtgggctcaggcctctctgcggggctcactctgcgcttcaccatggctttcattgccaagtccttctatgacctcagtgccatcagcctggatggggagaaggtagatttcaatacgttccggggcagggccgtgctgattgagaatgtggcttcgctctgaggcacaaccacccgggacttcacccagctcaacgagctgcaatgccgctttcccaggcgcctggtggtccttggcttcccttgcaaccaatttggacatcaggagaactgtcagaatgaggagatcctgaacagtctcaagtatgtccgtcctgggggtggataccagcccaccttcacccttgtccaaaaatgtgaggtgaatgggcagaacgagcatcctgtcttcgcctacctgaaggacaagctcccctacccttatgatgacccattttccctcatgaccgatcccaagctcatcatttggagccctgtgcgccgctcagatgtggcctggaactttgagaagttcctcatagggccggagggagagcccttccgacgctacagccgcaccttcccaaccatcaacattgagcctgacatcaagcgcctccgaagcagttgccgcatccgaagcagttgccgcatccgaagcagttgccgtatccgaagcagttgccgcatccgaagcagttgccgcatccgaagcagttgccg

SEQ ID NO: 734769 - DNA, 1392 bp, Homo sapiens
aacacaactttgtctcttcagcctggcaagagctgaggcactgaaaacttcttttttcccctagaaaatgacacactctcctcctaagggtccctttgattttgtcctggtggaaagcaacaaagagaagaacgtgaacaggaatatgtatatttcagttgtcatctgagtcccatggataggaggctcaattctcttcttcatctttcagatctccgcagaccctgccctctcactgtacaattcagagattgacactcagcaggcattcaataaacgtctgtgtcaaatgagaacaacttgatggggcaagtaggagtcaatcctgcatccctccctccctttttttcctctccattcgacctttagggctctggtttcctgtaagcagtgaattatttacctctgctcatagatatcaaattggcccttcccaggttgcagcagggtggggcggggaggcggccttgttcagtctgttaataggaggagcaacctccttgttcaaacagcacttacaggtggggacctgtttttgctaagtcatcctggggatgctcaaagctccattgttagatcctttctgtcctccttcctggctcctccttcctccccacccctctaataggctcataagtgggctcaggcctctctgcggggctcactctgcgcttcaccatggctttcattgccaagtccttctatgacctcagtgccatcagcctggatggggagaaggtagatttcaatacgttccggggcagggccgtgctgattgagaatgtggcttcgctctgaggcacaaccacccgggacttcacccagctcaacgagctgcaatgccgctttcccaggcgcctggtggtccttggcttcccttgcaaccaatttggacatcaggagaactgtcagaatgaggagatcctgaacagtctcaagtatgtccgtcctgggggtggataccagcccaccttcacccttgtccaaaaatgtgaggtgaatgggcagaacgagcatcctgtcttcgcctacctgaaggacaagctcccctacccttatgatgacccattttccctcatgaccgatcccaagctcatcatttggagccctgtgcgccgctcagatgtggcctggaactttgagaagttcctcatagggccggagggagagcccttccgacgctacagccgcaccttcccaaccatcaacattgagcctgacatcaagcgcctccttaaagttgccatatagatgtgaactgctcaacacacagatctcctactccatccagtcctgaggagccttaggatgcagcatgccttcaggagacactgctggacctcagcattcccttgagtccctcaagcgccaagtattaactgcacattttag

SEQ ID NO: 734770 - DNA, 1843 bp, Homo sapiens
aacacaactttgtctcttcagcctggcaagagctgaggcactgaaaacttcttttttcccctagaaaatgacacactctcctcctaagggtccctttgattttgtcctggtggaaagcaacaaagagaagaacgtgaacaggaatatgtatatttcagttgtcatctgagtcccatggataggaggctcaattctcttcttcatctttcagatctccgcagaccctgccctctcactgtacaattcagagattgacactcagcaggcattcaataaacgtctgtgtcaaatgagaacaacttgatggggcaagtaggagtcaatcctgcatccctccctccctttttttcctctccattcgacctttagggctctggtttcctgtaagcagtgaattatttacctctgctcatagatatcaaattggcccttcccaggttgcagcagggtggggcggggaggcggccttgttcagtctgttaataggaggagcaacctccttgttcaaacagcacttacaggtggggacctgtttttgctaagtcatcctggggatgctcaaagctccattgttagatcctttctgtcctccttcctggctcctccttcctccccacccctctaataggctcataagtgggctcaggcctctctgcggggctcactctgcgcttcaccatggctttcattgccaagtccttctatgacctcagtgccatcagcctggatggggagaaggtagatttcaatacgttccggggcagggccgtgctgattgagaatgtggcttcgctctgaggcacaaccacccgggacttcacccagctcaacgagctgcaatgccgctttcccaggcgcctggtggtccttggcttcccttgcaaccaatttggacatcagagcaggagagacagaagtagcaaaccctctttcgagatgtccctccagccccagaagtacctccagcctcacaccatctcttcagcctagcaagttgctggagggagtctataacctaccaggagccagccagccatttgtatcaagaaatagaaatctgccagggtacagtggctcacacctataatcccagcgctttgggaggctaaggagaactgtcagaatgaggagatcctgaacagtctcaagtatgtccgtcctgggggtggataccagcccaccttcacccttgtccaaaaatgtgaggtgaatgggcagaacgagcatcctgtcttcgcctacctgaaggacaagctcccctacccttatgatgacccattttccctcatgaccgatcccaagctcatcatttggagccctgtgcgccgctcagatgtggcctggaactttgagaagttcctcatagggccggagggagagcccttccgacgctacagccgcaccttcccaaccatcaacattgagcctgacatcaagcgcctccttaaagttgccatatagatgtgaactgctcaacacacagatctcctactccatccagtcctgaggagccttaggatgcagcatgccttcaggagacactgctggacctcagcattcccttgatatcagtccccttcactgcagagccttgcctttcccctctgcctgtttccttttcctctcccaaccctctggttggtgattcaacttgggctccaagacttgggtaagctctgggccttcacagaatgatggcaccttcctaaaccctcatgggtggtgtctgagaggcgtgaagggcctggagccactctgctagaagagaccaataaagggcaggtgtggcaccacacacaccaccaccaacacaacccgcgcctttttccggggcacaacgcta

SEQ ID NO: 734771 - DNA, 1602 bp, Homo sapiens
aacacaactttgtctcttcagcctggcaagagctgaggcactgaaaacttcttttttcccctagaaaatgacacactctcctcctaagggtccctttgattttgtcctggtggaaagcaacaaagagaagaacgtgaacaggaatatgtatatttcagttgtcatctgagtcccatggataggaggctcaattctcttcttcatctttcagatctccgcagaccctgccctctcactgtacaattcagagattgacactcagcaggcattcaataaacgtctgtgtcaaatgagaacaacttgatggggcaagtaggagtcaatcctgcatccctccctccctttttttcctctccattcgacctttagggctctggtttcctgtaagcagtgaattatttacctctgctcatagatatcaaattggcccttcccaggttgcagcagggtggggcggggaggcggccttgttcagtctgttaataggaggagcaacctccttgttcaaacagcacttacaggtggggacctgtttttgctaagtcatcctggggatgctcaaagctccattgttagatcctttctgtcctccttcctggctcctccttcctccccacccctctaataggctcataagtgggctcaggcctctctgcggggctcactctgcgcttcaccatggctttcattgccaagtccttctatgacctcagtgccatcagcctggatggggagaaggtagatttcaatacgttccggggcagggccgtgctgattgagaatgtggcttcgctctgaggcacaaccacccgggacttcacccagctcaacgagctgcaatgccgctttcccaggcgcctggtggtccttggcttcccttgcaaccaatttggacatcagagcaggagagacagaagtagcaaaccctctttcgagatgtccctccagccccagaagtacctccagcctcacaccatctcttcagcctagcaagttgctggagggagtctataacctaccaggagccagccagccatttgtatcaagaaatagaaatctgccagggtacagtggctcacacctataatcccagcgctttgggaggctaaggagaactgtcagaatgaggagatcctgaacagtctcaagtatgtccgtcctgggggtggataccagcccaccttcacccttgtccaaaaatgtgaggtgaatgggcagaacgagcatcctgtcttcgcctacctgaaggacaagctcccctacccttatgatgacccattttccctcatgaccgatcccaagctcatcatttggagccctgtgcgccgctcagatgtggcctggaactttgagaagttcctcatagggccggagggagagcccttccgacgctacagccgcaccttcccaaccatcaacattgagcctgacatcaagcgcctccttaaagttgccatatagatgtgaactgctcaacacacagatctcctactccatccagtcctgaggagccttaggatgcagcatgccttcaggagacactgctggacctcagcattcccttgagtccctcaagcgccaagtattaactgcacattttag

SEQ ID NO: 734772 - DNA, 1547 bp, Homo sapiens
aacacaactttgtctcttcagcctggcaagagctgaggcactgaaaacttcttttttcccctagaaaatgacacactctcctcctaagggtccctttgattttgtcctggtggaaagcaacaaagagaagaacgtgaacaggaatatgtatatttcagttgtcatctgagtcccatggataggaggctcaattctcttcttcatctttcagatctccgcagaccctgccctctcactgtacaattcagagattgacactcagcaggcattcaataaacgtctgtgtcaaatgagaacaacttgatggggcaagtaggagtcaatcctgcatccctccctccctttttttcctctccattcgacctttagggctctggtttcctgtaagcagtgaattatttacctctgctcatagatatcaaattggcccttcccaggttgcagcagggtggggcggggaggcggccttgttcagtctgttaataggaggagcaacctccttgttcaaacagcacttacaggtggggacctgtttttgctaagtcatcctggggatgctcaaagctccattgttagatcctttctgtcctccttcctggctcctccttcctccccacccctctaataggctcataagtgggctcaggcctctctgcggggctcactctgcgcttcaccatggctttcattgccaagtccttctatgacctcagtgccatcagcctggatggggagaaggtagatttcaatacgttccggggcagggccgtgctgattgagaatgtggcttcgctctgaggcacaaccacccgggacttcacccagctcaacgagctgcaatgccgctttcccaggcgcctggtggtccttggcttcccttgcaaccaatttggacatcagagcaggagagacagaagtagcaaaccctctttcgagatgtccctccagccccagaagtacctccagcctcacaccatctcttcagcctagcaagttgctggagggagtctataacctaccaggagccagccagccatttgtatcaagaaatagaaatctgccagggtacagtggctcacacctataatcccagcgctttgggaggctaaggagaactgtcagaatgaggagatcctgaacagtctcaagtatgtccgtcctgggggtggataccagcccaccttcacccttgtccaaaaatgtgaggtgaatgggcagaacgagcatcctgtcttcgcctacctgaaggacaagctcccctacccttatgatgacccattttccctcatgaccgatcccaagctcatcatttggagccctgtgcgccgctcagatgtggcctggaactttgagaagttcctcatagggccggagggagagcccttccgacgctacagccgcaccttcccaaccatcaacattgagcctgacatcaagcgcctccgaagcagttgccgcatccgaagcagttgccgcatccgaagcagttgccgtatccgaagcagttgccgcatccgaagcagttgccgcatccgaagcagttgccg

SEQ ID NO: 734773 - DNA, 1471 bp, Homo sapiens
aacacaactttgtctcttcagcctggcaagagctgaggcactgaaaacttcttttttcccctagaaaatgacacactctcctcctaagggtccctttgattttgtcctggtggaaagcaacaaagagaagaacgtgaacaggaatatgtatatttcagttgtcatctgagtcccatggataggaggctcaattctcttcttcatctttcagatctccgcagaccctgccctctcactgtacaattcagagattgacactcagcaggcattcaataaacgtctgtgtcaaatgagaacaacttgatggggcaagtaggagtcaatcctgcatccctccctccctttttttcctctccattcgacctttagggctctggtttcctgtaagcagtgaattatttacctctgctcatagatatcaaattggcccttcccaggttgcagcagggtggggcggggaggcggccttgttcagtctgttaataggaggagcaacctccttgttcaaacagcacttacaggtggggacctgtttttgctaagtcatcctggggatgctcaaagctccattgttagatcctttctgtcctccttcctggctcctccttcctccccacccctctaataggctcataagtgggctcaggcctctctgcggggctcactctgcgcttcaccatggctttcattgccaagtccttctatgacctcagtgccatcagcctggatggggagaaggagaactgtcagaatgaggagatcctgaacagtctcaagtatgtccgtcctgggggtggataccagcccaccttcacccttgtccaaaaatgtgaggtgaatgggcagaacgagcatcctgtcttcgcctacctgaaggacaagctcccctacccttatgatgacccattttccctcatgaccgatcccaagctcatcatttggagccctgtgcgccgctcagatgtggcctggaactttgagaagttcctcatagggccggagggagagcccttccgacgctacagccgcaccttcccaaccatcaacattgagcctgacatcaagcgcctccttaaagttgccatatagatgtgaactgctcaacacacagatctcctactccatccagtcctgaggagccttaggatgcagcatgccttcaggagacactgctggacctcagcattcccttgatatcagtccccttcactgcagagccttgcctttcccctctgcctgtttccttttcctctcccaaccctctggttggtgattcaacttgggctccaagacttgggtaagctctgggccttcacagaatgatggcaccttcctaaaccctcatgggtggtgtctgagaggcgtgaagggcctggagccactctgctagaagagaccaataaagggcaggtgtggcaccacacacaccaccaccaacacaacccgcgcctttttccggggcacaacgcta

SEQ ID NO: 734774 - DNA, 1230 bp, Homo sapiens
aacacaactttgtctcttcagcctggcaagagctgaggcactgaaaacttcttttttcccctagaaaatgacacactctcctcctaagggtccctttgattttgtcctggtggaaagcaacaaagagaagaacgtgaacaggaatatgtatatttcagttgtcatctgagtcccatggataggaggctcaattctcttcttcatctttcagatctccgcagaccctgccctctcactgtacaattcagagattgacactcagcaggcattcaataaacgtctgtgtcaaatgagaacaacttgatggggcaagtaggagtcaatcctgcatccctccctccctttttttcctctccattcgacctttagggctctggtttcctgtaagcagtgaattatttacctctgctcatagatatcaaattggcccttcccaggttgcagcagggtggggcggggaggcggccttgttcagtctgttaataggaggagcaacctccttgttcaaacagcacttacaggtggggacctgtttttgctaagtcatcctggggatgctcaaagctccattgttagatcctttctgtcctccttcctggctcctccttcctccccacccctctaataggctcataagtgggctcaggcctctctgcggggctcactctgcgcttcaccatggctttcattgccaagtccttctatgacctcagtgccatcagcctggatggggagaaggagaactgtcagaatgaggagatcctgaacagtctcaagtatgtccgtcctgggggtggataccagcccaccttcacccttgtccaaaaatgtgaggtgaatgggcagaacgagcatcctgtcttcgcctacctgaaggacaagctcccctacccttatgatgacccattttccctcatgaccgatcccaagctcatcatttggagccctgtgcgccgctcagatgtggcctggaactttgagaagttcctcatagggccggagggagagcccttccgacgctacagccgcaccttcccaaccatcaacattgagcctgacatcaagcgcctccttaaagttgccatatagatgtgaactgctcaacacacagatctcctactccatccagtcctgaggagccttaggatgcagcatgccttcaggagacactgctggacctcagcattcccttgagtccctcaagcgccaagtattaactgcacattttag

SEQ ID NO: 734775 - DNA, 1175 bp, Homo sapiens
aacacaactttgtctcttcagcctggcaagagctgaggcactgaaaacttcttttttcccctagaaaatgacacactctcctcctaagggtccctttgattttgtcctggtggaaagcaacaaagagaagaacgtgaacaggaatatgtatatttcagttgtcatctgagtcccatggataggaggctcaattctcttcttcatctttcagatctccgcagaccctgccctctcactgtacaattcagagattgacactcagcaggcattcaataaacgtctgtgtcaaatgagaacaacttgatggggcaagtaggagtcaatcctgcatccctccctccctttttttcctctccattcgacctttagggctctggtttcctgtaagcagtgaattatttacctctgctcatagatatcaaattggcccttcccaggttgcagcagggtggggcggggaggcggccttgttcagtctgttaataggaggagcaacctccttgttcaaacagcacttacaggtggggacctgtttttgctaagtcatcctggggatgctcaaagctccattgttagatcctttctgtcctccttcctggctcctccttcctccccacccctctaataggctcataagtgggctcaggcctctctgcggggctcactctgcgcttcaccatggctttcattgccaagtccttctatgacctcagtgccatcagcctggatggggagaaggagaactgtcagaatgaggagatcctgaacagtctcaagtatgtccgtcctgggggtggataccagcccaccttcacccttgtccaaaaatgtgaggtgaatgggcagaacgagcatcctgtcttcgcctacctgaaggacaagctcccctacccttatgatgacccattttccctcatgaccgatcccaagctcatcatttggagccctgtgcgccgctcagatgtggcctggaactttgagaagttcctcatagggccggagggagagcccttccgacgctacagccgcaccttcccaaccatcaacattgagcctgacatcaagcgcctccgaagcagttgccgcatccgaagcagttgccgcatccgaagcagttgccgtatccgaagcagttgccgcatccgaagcagttgccgcatccgaagcagttgccg

SEQ ID NO: 734776 - DNA, 1093 bp, Homo sapiens
aactgctcagggtagactggagacaaaagcaacagctcagaagtgctaaatcttgaagagcagccaaagcatgggcaacaaagtgagaccccatctctacaaaaaaaaaaaaaaattagccgggcatggtggcctgtgtctgtagtctcagctactaaagaggctgaagcaggaggaatgcttgagcccagaagttcaaggctgcagtgagcaacacctcgtctgtcttgtctctctctctttcacagtgaaaaagaatgaccctggggagggagtgtaggagggtgaaagagtttcatgttgtggatctttctcttcccccacccactgtccacgcactttgtctttttcctcccctaggagaactgtcagaatgaggagatcctgaacagtctcaagtatgtccgtcctgggggtggataccagcccaccttcacccttgtccaaaaatgtgaggtgaatgggcagaacgagcatcctgtcttcgcctacctgaaggacaagctcccctacccttatgatgacccattttccctcatgaccgatcccaagctcatcatttggagccctgtgcgccgctcagatgtggcctggaactttgagaagttcctcatagggccggagggagagcccttccgacgctacagccgcaccttcccaaccatcaacattgagcctgacatcaagcgcctccttaaagttgccatatagatgtgaactgctcaacacacagatctcctactccatccagtcctgaggagccttaggatgcagcatgccttcaggagacactgctggacctcagcattcccttgatatcagtccccttcactgcagagccttgcctttcccctctgcctgtttccttttcctctcccaaccctctggttggtgattcaacttgggctccaagacttgggtaagctctgggccttcacagaatgatggcaccttcctaaaccctcatgggtggtgtctgagaggcgtgaagggcctggagccactctgctagaagagaccaataaagggcaggtgtggcaccacacacaccaccaccaacacaacccgcgcctttttccggggcacaacgcta

SEQ ID NO: 734777 - DNA, 852 bp, Homo sapiens
aactgctcagggtagactggagacaaaagcaacagctcagaagtgctaaatcttgaagagcagccaaagcatgggcaacaaagtgagaccccatctctacaaaaaaaaaaaaaaattagccgggcatggtggcctgtgtctgtagtctcagctactaaagaggctgaagcaggaggaatgcttgagcccagaagttcaaggctgcagtgagcaacacctcgtctgtcttgtctctctctctttcacagtgaaaaagaatgaccctggggagggagtgtaggagggtgaaagagtttcatgttgtggatctttctcttcccccacccactgtccacgcactttgtctttttcctcccctaggagaactgtcagaatgaggagatcctgaacagtctcaagtatgtccgtcctgggggtggataccagcccaccttcacccttgtccaaaaatgtgaggtgaatgggcagaacgagcatcctgtcttcgcctacctgaaggacaagctcccctacccttatgatgacccattttccctcatgaccgatcccaagctcatcatttggagccctgtgcgccgctcagatgtggcctggaactttgagaagttcctcatagggccggagggagagcccttccgacgctacagccgcaccttcccaaccatcaacattgagcctgacatcaagcgcctccttaaagttgccatatagatgtgaactgctcaacacacagatctcctactccatccagtcctgaggagccttaggatgcagcatgccttcaggagacactgctggacctcagcattcccttgagtccctcaagcgccaagtattaactgcacattttag

SEQ ID NO: 734778 - DNA, 797 bp, Homo sapiens
aactgctcagggtagactggagacaaaagcaacagctcagaagtgctaaatcttgaagagcagccaaagcatgggcaacaaagtgagaccccatctctacaaaaaaaaaaaaaaattagccgggcatggtggcctgtgtctgtagtctcagctactaaagaggctgaagcaggaggaatgcttgagcccagaagttcaaggctgcagtgagcaacacctcgtctgtcttgtctctctctctttcacagtgaaaaagaatgaccctggggagggagtgtaggagggtgaaagagtttcatgttgtggatctttctcttcccccacccactgtccacgcactttgtctttttcctcccctaggagaactgtcagaatgaggagatcctgaacagtctcaagtatgtccgtcctgggggtggataccagcccaccttcacccttgtccaaaaatgtgaggtgaatgggcagaacgagcatcctgtcttcgcctacctgaaggacaagctcccctacccttatgatgacccattttccctcatgaccgatcccaagctcatcatttggagccctgtgcgccgctcagatgtggcctggaactttgagaagttcctcatagggccggagggagagcccttccgacgctacagccgcaccttcccaaccatcaacattgagcctgacatcaagcgcctccgaagcagttgccgcatccgaagcagttgccgcatccgaagcagttgccgtatccgaagcagttgccgcatccgaagcagttgccgcatccgaagcagttgccg

SEQ ID NO: 734779 - DNA, 608 bp, Homo sapiens
  misc_feature (52)..(52): n is a, c, g, or t
  misc_feature (60)..(60): n is a, c, g, or t
  misc_feature (66)..(66): n is a, c, g, or t
  misc_feature (69)..(69): n is a, c, g, or t
  misc_feature (72)..(72): n is a, c, g, or t
  misc_feature (75)..(76): n is a, c, g, or t
aaggagagtttgtatcataagtaggtgttggattatgtcatatgcgtatgtnctgcatcnggtgantgntcnccnntccgcggattggcgaccatttcaaccaatttggacatcaggagaactgtcagaatgaggagatcctgaacagtctcaagtatgtccgtcctgggggtggataccagcccaccttcacccttgtccaaaaatgtgaggtgaatgggcagaacgagcatcctgtcttcgcctacctgaaggacaagctcccctacccttatgatgacccattttccctcatgaccgatcccaagctcatcatttggagccctgtgcgccgctcagatgtggcctggaactttgagaagttcctcatagggccggagggagagcccttccgacgctacagccgcaccttcccaaccatcaacattgagcctgacatcaagcgcctccttaaagttgccatatagatgtgaactgctcaacacacagatctcctactccatccagtcctgaggagccttaggatgcagcatgccttcaggagacactgctggacctcagcattcccttgagtccctcaagcgccaagtattaactgcacattttag

SEQ ID NO: 734780 - DNA, 553 bp, Homo sapiens
  misc_feature (52)..(52): n is a, c, g, or t
  misc_feature (60)..(60): n is a, c, g, or t
  misc_feature (66)..(66): n is a, c, g, or t
  misc_feature (69)..(69): n is a, c, g, or t
  misc_feature (72)..(72): n is a, c, g, or t
  misc_feature (75)..(76): n is a, c, g, or t
aaggagagtttgtatcataagtaggtgttggattatgtcatatgcgtatgtnctgcatcnggtgantgntcnccnntccgcggattggcgaccatttcaaccaatttggacatcaggagaactgtcagaatgaggagatcctgaacagtctcaagtatgtccgtcctgggggtggataccagcccaccttcacccttgtccaaaaatgtgaggtgaatgggcagaacgagcatcctgtcttcgcctacctgaaggacaagctcccctacccttatgatgacccattttccctcatgaccgatcccaagctcatcatttggagccctgtgcgccgctcagatgtggcctggaactttgagaagttcctcatagggccggagggagagcccttccgacgctacagccgcaccttcccaaccatcaacattgagcctgacatcaagcgcctccgaagcagttgccgcatccgaagcagttgccgcatccgaagcagttgccgtatccgaagcagttgccgcatccgaagcagttgccgcatccgaagcagttgccg

SEQ ID NO: 734781 - DNA, 3343 bp, Homo sapiens
gctccagctaagaggacaagatgaggcccggcctctcatttctcctagcccttctgttcttccttggccaagctgcaggggatttgggggatgtgggacctccaattcccagccccggcttcagctctttcccaggtgttgactccagctccagcttcagctccagctccaggtcgggctccagctccagccgcagcttaggcagcggaggttctgtgtcccagttgttttccaatttcaccggctccgtggatgaccgtgggacctgccagtgctctgtttccctgccagacaccacctttcccgtggacagagtggaacgcttggaattcacagctcatgttctttctcagaagtttgagaaagaactttccaaagtgagggaatatgtccaattaattagtgtgtatgaaaagaaactgttaaacctaactgtccgaattgacatcatggagaaggataccatttcttacactgaactggacttcgagctgatcaaggtagaagtgaaggagatggaaaaactggtcatacagctgaaggagagttttggtggaagctcagaaattgttgaccagctggaggtggagataagaaatatgactctcttggtagagaagcttgagacactagacaaaaacaatgtccttgccattcgccgagaaatcgtggctctgaagaccaagctgaaagagtgtgaggcctctaaagatcaaaacacccctgtcgtccaccctcctcccactccagggagctgtggtcatggtggtgtggtgaacatcagcaaaccgtctgtggttcagctcaactggagagggttttcttatctatatggtgcttggggtagggattactctccccagcatccaaacaaaggactgtattgggtggcgccattgaatacagatgggagactgttggagtattatagactgtacaacacactggatgatttgctattgtatataaatgctcgagagttgcggatcacctatggccaaggtagtggtacagcagtttacaacaacaacatgtacgtcaacatgtacaacaccgggaatattgccagagttaacctgaccaccaacacgattgctgtgactcaaactctccctaatgctgcctataataaccgcttttcatatgctaatgttgcttggcaagatattgactttgctgtggatgagaatggattgtgggttatttattcaactgaagccagcactggtaacatggtgattagtaaactcaatgacaccacacttcaggtgctaaacacttggtataccaagcagtataaaccatctgcttctaacgccttcatggtatgtggggttctgtatgccacccgtactatgaacaccagaacagaagagattttttactattatgacacaaacacagggaaagagggcaaactagacattgtaatgcataagatgcaggaaaaagtgcagagcattaactataacccttttgaccagaaactttatgtctataacgatggttaccttctgaattatgatctttctgtcttgcagaagccccagtaagctgtttaggagttagggtgaaagagaaaatgtttgttgaaaaaatagtcttctccacttacttagatatctgcaggggtgtctaaaagtgtgttcattttgcagcaatgtttaggtgcatagttctaccacactagagatctaggacatttgtcttgatttggtgagttctcttgggaatcatctgcctcttcaggcgcattttgcaataaagtctgtctagggtgggattgtcagaggtctaggggcactgtgggcctagtgaagcctactgtgaggaggcttcactagaagccttaaattaggaattaaggaacttaaaactcagtatggcgtctagggattctttgtacaggaaatattgcccaatgactagtcctcatccatgtagcaccactaattcttccatgcctggaagaaacctggggacttagttaggtagattaatatctggagctcctcgagggaccaaatctccaacttttttttcccctcactagcacctggaatgatgctttgtatgtggcagataagtaaatttggcatgcttatatattctacatctgtaaagtgctgagttttatggagagaggcctttttatgcattaaattgtacatggcaaataaatcccagaaggatctgtagatgaggcacctgctttttcttttctctcattgtccaccttactaaaagtcagtagaatcttctacctcataacttccttccaaaggcagctcagaagattagaaccagacttactaaccaattccaccccccaccaacccccttctactgcctactttaaaaaaattaatagttttctatggaactgatctaagattagaaaaattaattttctttaatttcattatggacttttatttacatgactctaagactataagaaaatctgatggcagtgacaaagtgctagcatttattgttatctaataaagaccttggagcatatgtgcaacttatgagtgtatcagttgttgcatgtaatttttgcctttgtttaagcctggaacttgtaagaaaatgaaaatttaatttttttttctaggacgagctatagaaaagctattgagagtatctagttaatcagtgcagtagttggaaaccttgctggtgtatgtgatgtgcttctgtgcttttgaatgactttatcatctagtctttgtctatttttcctttgatgttcaagtcctagtctataggattggcagtttaaatgctttactcccccttttaaaataaatgattaaaatgtgctttgaaaaaagtcaacttttgttttatttaattttaatttttttttaaagctcttaacagggtagtccatatcttgctatgaggttgggagaatggctacctcccaaacactagtgcggggagattgcacacctaacaacagatcacatcaataacttttataagagcccagagttaggctggctctttcatttttctttccctttaaaatccactctttctggcagcttttattgtacatgactgccctattatcttttgggatatgaccttatgtacttattaatttgcatgactgatctgattatttccaatgctagactacatttatgtagcttatgttccttttccaattgagctatgaacatggatcagaagcctctggatcttccccagacaggaggacttgggcagaaagcaaaaggactaactggctataccaggaagagaagtacctttaccaaagagaatatgtaagaagacaggtgacctagagctggaaggacacagtgga

SEQ ID NO: 734782 - DNA, 3314 bp, Homo sapiens
cagtggtgagtacttgatagggcagagtcctacctggttggccagggaacaaaacgttgctggtctttccttcagagtggggttgttagacaactttgtctagaaacagtcactgtaaggaacaggtcaacgacaacttgggcaataggaactgaagagggaagctcagtcgctcctggaggagagccacagtccctaaggcaagttccctaactgtctgtgaaaagtagtattcagtaaaatgggggagagcactagaagtgctgtgaggcaaaggactgagggttgcttttcctccatggagcctccaaactctgtgtcatccacaaagactactttggtctcatctctttcaaggaagtaccaagtgggaaaccaaatattgggctttacaaagcacatttgagttaatgtttggcaggggatatctggatccaagggcagctcacagagtgggcctcactgacaaggtgtgggccatgactcagattcctgggtgtcctgaacctcctggggcagttcacacgttccctggccactccctcttttcctacatgctggccatggggaaatcaccactgggcactataagaagcccctgggctctctgcagagccagcgctccagcttcagctccagctccaggtcgggctccagctccagccgcagcttaggcagcggaggttctgtgtcccagttgttttccaatttcaccggctccgtggatgaccgtgggacctgccagtgctctgtttccctgccagacaccacctttcccgtggacagagtggaacgcttggaattcacagctcatgttctttctcagaagtttgagaaagaactttccaaagtgagggaatatgtccaattaattagtgtgtatgaaaagaaactgttaaacctaactgtccgaattgacatcatggagaaggataccatttcttacactgaactggacttcgagctgatcaaggtagtggtacagcagtttacaacaacaacatgtacgtcaacatgtacaacaccgggaatattgccagagttaacctgaccaccaacacgattgctgtgactcaaactctccctaatgctgcctataataaccgcttttcatatgctaatgttgcttggcaagatattgactttgctgtggatgagaatggattgtgggttatttattcaactgaagccagcactggtaacatggtgattagtaaactcaatgacaccacacttcaggtgctaaacacttggtataccaagcagtataaaccatctgcttctaacgccttcatggtatgtggggttctgtatgccacccgtactatgaacaccagaacagaagagattttttactattatgacacaaacacagggaaagagggcaaactagacattgtaatgcataagatgcaggaaaaagtgcagagcattaactataacccttttgaccagaaactttatgtctataacgatggttaccttctgaattatgatctttctgtcttgcagaagccccagtaagctgtttaggagttagggtgaaagagaaaatgtttgttgaaaaaatagtcttctccacttacttagatatctgcaggggtgtctaaaagtgtgttcattttgcagcaatgtttaggtgcatagttctaccacactagagatctaggacatttgtcttgatttggtgagttctcttgggaatcatctgcctcttcaggcgcattttgcaataaagtctgtctagggtgggattgtcagaggtctaggggcactgtgggcctagtgaagcctactgtgaggaggcttcactagaagccttaaattaggaattaaggaacttaaaactcagtatggcgtctagggattctttgtacaggaaatattgcccaatgactagtcctcatccatgtagcaccactaattcttccatgcctggaagaaacctggggacttagttaggtagattaatatctggagctcctcgagggaccaaatctccaacttttttttcccctcactagcacctggaatgatgctttgtatgtggcagataagtaaatttggcatgcttatatattctacatctgtaaagtgctgagttttatggagagaggcctttttatgcattaaattgtacatggcaaataaatcccagaaggatctgtagatgaggcacctgctttttcttttctctcattgtccaccttactaaaagtcagtagaatcttctacctcataacttccttccaaaggcagctcagaagattagaaccagacttactaaccaattccaccccccaccaacccccttctactgcctactttaaaaaaattaatagttttctatggaactgatctaagattagaaaaattaattttctttaatttcattatggacttttatttacatgactctaagactataagaaaatctgatggcagtgacaaagtgctagcatttattgttatctaataaagaccttggagcatatgtgcaacttatgagtgtatcagttgttgcatgtaatttttgcctttgtttaagcctggaacttgtaagaaaatgaaaatttaatttttttttctaggacgagctatagaaaagctattgagagtatctagttaatcagtgcagtagttggaaaccttgctggtgtatgtgatgtgcttctgtgcttttgaatgactttatcatctagtctttgtctatttttcctttgatgttcaagtcctagtctataggattggcagtttaaatgctttactcccccttttaaaataaatgattaaaatgtgctttgaaaaaagtcaacttttgttttatttaattttaatttttttttaaagctcttaacagggtagtccatatcttgctatgaggttgggagaatggctacctcccaaacactagtgcggggagattgcacacctaacaacagatcacatcaataacttttataagagcccagagttaggctggctctttcatttttctttccctttaaaatccactctttctggcagcttttattgtacatgactgccctattatcttttgggatatgaccttatgtacttattaatttgcatgactgatctgattatttccaatgctagactacatttatgtagcttatgttccttttccaattgagctatgaacatggatcagaagcctctggatcttccccagacaggaggacttgggcagaaagcaaaaggactaactggctataccaggaagagaagtacctttaccaaagagaatatgtaagaagacaggtgacctagagctggaaggacacagtgga

SEQ ID NO: 734783 - DNA, 1564 bp, Homo sapiens
  misc_feature (59)..(59): n is a, c, g, or t
caattaggtgcatgagtaggtggctgcagtaatgttagcggttaggcgtacggccaggncatatggttgaatgagtaggctgatggtttcgttaaaactcagtatggcgtctagggattctttgtacaggaaatattgcccaatgactagtcctcatccatgtagcaccactaattcttccatgcctggaagaaacctggggacttagttaggtagattaatatctggagctcctcgagggaccaaatctccaacttttttttcccctcactagcacctggaatgatgctttgtatgtggcagataagtaaatttggcatgcttatatattctacatctgtaaagtgctgagttttatggagagaggcctttttatgcattaaattgtacatggcaaataaatcccagaaggatctgtagatgaggcacctgctttttcttttctctcattgtccaccttactaaaagtcagtagaatcttctacctcataacttccttccaaaggcagctcagaagattagaaccagacttactaaccaattccaccccccaccaacccccttctactgcctactttaaaaaaattaatagttttctatggaactgatctaagattagaaaaattaattttctttaatttcattatggacttttatttacatgactctaagactataagaaaatctgatggcagtgacaaagtgctagcatttattgttatctaataaagaccttggagcatatgtgcaacttatgagtgtatcagttgttgcatgtaatttttgcctttgtttaagcctggaacttgtaagaaaatgaaaatttaatttttttttctaggacgagctatagaaaagctattgagagtatctagttaatcagtgcagtagttggaaaccttgctggtgtatgtgatgtgcttctgtgcttttgaatgactttatcatctagtctttgtctatttttcctttgatgttcaagtcctagtctataggattggcagtttaaatgctttactcccccttttaaaataaatgattaaaatgtgctttgaaaaaagtcaacttttgttttatttaattttaatttttttttaaagctcttaacagggtagtccatatcttgctatgaggttgggagaatggctacctcccaaacactagtgcggggagattgcacacctaacaacagatcacatcaataacttttataagagcccagagttaggctggctctttcatttttctttccctttaaaatccactctttctggcagcttttattgtacatgactgccctattatcttttgggatatgaccttatgtacttattaatttgcatgactgatctgattatttccaatgctagactacatttatgtagcttatgttccttttccaattgagctatgaacatggatcagaagcctctggatcttccccagacaggaggacttgggcagaaagcaaaaggactaactggctataccaggaagagaagtacctttaccaaagagaatatgtaagaagacaggtgacctagagctggaaggacacagtgga

SEQ ID NO: 734784 - DNA, 1739 bp, Homo sapiens
tagaggaccccattgatagcggtgagggtgtctaaaagtgtgttcattttgcagcaatgtttaggtgcatagttctaccacactagagatctaggacatttgtcttgatttggtgagttctcttgggaatcatctgcctcttcaggcgcattttgcaataaagtctgtctagggtgggattgtcagaggtctaggggcactgtgggcctagtgaagcctactgtgaggaggcttcactagaagccttaaattaggaattaaggaacttaaaactcagtatggcgtctagggattctttgtacaggaaatattgcccaatgactagtcctcatccatgtagcaccactaattcttccatgcctggaagaaacctggggacttagttaggtagattaatatctggagctcctcgagggaccaaatctccaacttttttttcccctcactagcacctggaatgatgctttgtatgtggcagataagtaaatttggcatgcttatatattctacatctgtaaagtgctgagttttatggagagaggcctttttatgcattaaattgtacatggcaaataaatcccagaaggatctgtagatgaggcacctgctttttcttttctctcattgtccaccttactaaaagtcagtagaatcttctacctcataacttccttccaaaggcagctcagaagattagaaccagacttactaaccaattccaccccccaccaacccccttctactgcctactttaaaaaaattaatagttttctatggaactgatctaagattagaaaaattaattttctttaatttcattatggacttttatttacatgactctaagactataagaaaatctgatggcagtgacaaagtgctagcatttattgttatctaataaagaccttggagcatatgtgcaacttatgagtgtatcagttgttgcatgtaatttttgcctttgtttaagcctggaacttgtaagaaaatgaaaatttaatttttttttctaggacgagctatagaaaagctattgagagtatctagttaatcagtgcagtagttggaaaccttgctggtgtatgtgatgtgcttctgtgcttttgaatgactttatcatctagtctttgtctatttttcctttgatgttcaagtcctagtctataggattggcagtttaaatgctttactcccccttttaaaataaatgattaaaatgtgctttgaaaaaagtcaacttttgttttatttaattttaatttttttttaaagctcttaacagggtagtccatatcttgctatgaggttgggagaatggctacctcccaaacactagtgcggggagattgcacacctaacaacagatcacatcaataacttttataagagcccagagttaggctggctctttcatttttctttccctttaaaatccactctttctggcagcttttattgtacatgactgccctattatcttttgggatatgaccttatgtacttattaatttgcatgactgatctgattatttccaatgctagactacatttatgtagcttatgttccttttccaattgagctatgaacatggatcagaagcctctggatcttccccagacaggaggacttgggcagaaagcaaaaggactaactggctataccaggaagagaagtacctttaccaaagagaatatgtaagaagacaggtgacctagagctggaaggacacagtgga

SEQ ID NO: 734785 - DNA, 3816 bp, Homo sapiens
cagtggtgagtacttgatagggcagagtcctacctggttggccagggaacaaaacgttgctggtctttccttcagagtggggttgttagacaactttgtctagaaacagtcactgtaaggaacaggtcaacgacaacttgggcaataggaactgaagagggaagctcagtcgctcctggaggagagccacagtccctaaggcaagttccctaactgtctgtgaaaagtagtattcagtaaaatgggggagagcactagaagtgctgtgaggcaaaggactgagggttgcttttcctccatggagcctccaaactctgtgtcatccacaaagactactttggtctcatctctttcaaggaagtaccaagtgggaaaccaaatattgggctttacaaagcacatttgagttaatgtttggcaggggatatctggatccaagggcagctcacagagtgggcctcactgacaaggtgtgggccatgactcagattcctgggtgtcctgaacctcctggggcagttcacacgttccctggccactccctcttttcctacatgctggccatggggaaatcaccactgggcactataagaagcccctgggctctctgcagagccagcgctccagcttcagctccagctccaggtcgggctccagctccagccgcagcttaggcagcggaggttctgtgtcccagttgttttccaatttcaccggctccgtggatgaccgtgggacctgccagtgctctgtttccctgccagacaccacctttcccgtggacagagtggaacgcttggaattcacagctcatgttctttctcagaagtttgagaaagaactttccaaagtgagggaatatgtccaattaattagtgtgtatgaaaagaaactgttaaacctaactgtccgaattgacatcatggagaaggataccatttcttacactgaactggacttcgagctgatcaaggtagaagtgaaggagatggaaaaactggtcatacagctgaaggagagttttggtggaagctcagaaattgttgaccagctggaggtggagataagaaatatgactctcttggtagagaagcttgagacactagacaaaaacaatgtccttgccattcgccgagaaatcgtggctctgaagaccaagctgaaagagtgtgaggcctctaaagatcaaaacacccctgtcgtccaccctcctcccactccagggagctgtggtcatggtggtgtggtgaacatcagcaaaccgtctgtggttcagctcaactggagagggttttcttatctatatggtgcttggggtagggattactctccccagcatccaaacaaaggactgtattgggtggcgccattgaatacagatgggagactgttggagtattatagactgtacaacacactggatgatttgctattgtatataaatgctcgagagttgcggatcacctatggccaaggtagtggtacagcagtttacaacaacaacatgtacgtcaacatgtacaacaccgggaatattgccagagttaacctgaccaccaacacgattgctgtgactcaaactctccctaatgctgcctataataaccgcttttcatatgctaatgttgcttggcaagatattgactttgctgtggatgagaatggattgtgggttatttattcaactgaagccagcactggtaacatggtgattagtaaactcaatgacaccacacttcaggtgctaaacacttggtataccaagcagtataaaccatctgcttctaacgccttcatggtatgtggggttctgtatgccacccgtactatgaacaccagaacagaagagattttttactattatgacacaaacacagggaaagagggcaaactagacattgtaatgcataagatgcaggaaaaagtgcagagcattaactataacccttttgaccagaaactttatgtctataacgatggttaccttctgaattatgatctttctgtcttgcagaagccccagtaagctgtttaggagttagggtgaaagagaaaatgtttgttgaaaaaatagtcttctccacttacttagatatctgcaggggtgtctaaaagtgtgttcattttgcagcaatgtttaggtgcatagttctaccacactagagatctaggacatttgtcttgatttggtgagttctcttgggaatcatctgcctcttcaggcgcattttgcaataaagtctgtctagggtgggattgtcagaggtctaggggcactgtgggcctagtgaagcctactgtgaggaggcttcactagaagccttaaattaggaattaaggaacttaaaactcagtatggcgtctagggattctttgtacaggaaatattgcccaatgactagtcctcatccatgtagcaccactaattcttccatgcctggaagaaacctggggacttagttaggtagattaatatctggagctcctcgagggaccaaatctccaacttttttttcccctcactagcacctggaatgatgctttgtatgtggcagataagtaaatttggcatgcttatatattctacatctgtaaagtgctgagttttatggagagaggcctttttatgcattaaattgtacatggcaaataaatcccagaaggatctgtagatgaggcacctgctttttcttttctctcattgtccaccttactaaaagtcagtagaatcttctacctcataacttccttccaaaggcagctcagaagattagaaccagacttactaaccaattccaccccccaccaacccccttctactgcctactttaaaaaaattaatagttttctatggaactgatctaagattagaaaaattaattttctttaatttcattatggacttttatttacatgactctaagactataagaaaatctgatggcagtgacaaagtgctagcatttattgttatctaataaagaccttggagcatatgtgcaacttatgagtgtatcagttgttgcatgtaatttttgcctttgtttaagcctggaacttgtaagaaaatgaaaatttaatttttttttctaggacgagctatagaaaagctattgagagtatctagttaatcagtgcagtagttggaaaccttgctggtgtatgtgatgtgcttctgtgcttttgaatgactttatcatctagtctttgtctatttttcctttgatgttcaagtcctagtctataggattggcagtttaaatgctttactcccccttttaaaataaatgattaaaatgtgctttgaaaaaagtcaacttttgttttatttaattttaatttttttttaaagctcttaacagggtagtccatatcttgctatgaggttgggagaatggctacctcccaaacactagtgcggggagattgcacacctaacaacagatcacatcaataacttttataagagcccagagttaggctggctctttcatttttctttccctttaaaatccactctttctggcagcttttattgtacatgactgccctattatcttttgggatatgaccttatgtacttattaatttgcatgactgatctgattatttccaatgctagactacatttatgtagcttatgttccttttccaattgagctatgaacatggatcagaagcctctggatcttccccagacaggaggacttgggcagaaagcaaaaggactaactggctataccaggaagagaagtacctttaccaaagagaatatgtaagaagacaggtgacctagagctggaaggacacagtgga

SEQ ID NO: 734786 - DNA, 2841 bp, Homo sapiens
gctccagctaagaggacaagatgaggcccggcctctcatttctcctagcccttctgttcttccttggccaagctgcaggggatttgggggatgtgggacctccaattcccagccccggcttcagctctttcccaggtgttgactccagctccagcttcagctccagctccaggtcgggctccagctccagccgcagcttaggcagcggaggttctgtgtcccagttgttttccaatttcaccggctccgtggatgaccgtgggacctgccagtgctctgtttccctgccagacaccacctttcccgtggacagagtggaacgcttggaattcacagctcatgttctttctcagaagtttgagaaagaactttccaaagtgagggaatatgtccaattaattagtgtgtatgaaaagaaactgttaaacctaactgtccgaattgacatcatggagaaggataccatttcttacactgaactggacttcgagctgatcaaggtagtggtacagcagtttacaacaacaacatgtacgtcaacatgtacaacaccgggaatattgccagagttaacctgaccaccaacacgattgctgtgactcaaactctccctaatgctgcctataataaccgcttttcatatgctaatgttgcttggcaagatattgactttgctgtggatgagaatggattgtgggttatttattcaactgaagccagcactggtaacatggtgattagtaaactcaatgacaccacacttcaggtgctaaacacttggtataccaagcagtataaaccatctgcttctaacgccttcatggtatgtggggttctgtatgccacccgtactatgaacaccagaacagaagagattttttactattatgacacaaacacagggaaagagggcaaactagacattgtaatgcataagatgcaggaaaaagtgcagagcattaactataacccttttgaccagaaactttatgtctataacgatggttaccttctgaattatgatctttctgtcttgcagaagccccagtaagctgtttaggagttagggtgaaagagaaaatgtttgttgaaaaaatagtcttctccacttacttagatatctgcaggggtgtctaaaagtgtgttcattttgcagcaatgtttaggtgcatagttctaccacactagagatctaggacatttgtcttgatttggtgagttctcttgggaatcatctgcctcttcaggcgcattttgcaataaagtctgtctagggtgggattgtcagaggtctaggggcactgtgggcctagtgaagcctactgtgaggaggcttcactagaagccttaaattaggaattaaggaacttaaaactcagtatggcgtctagggattctttgtacaggaaatattgcccaatgactagtcctcatccatgtagcaccactaattcttccatgcctggaagaaacctggggacttagttaggtagattaatatctggagctcctcgagggaccaaatctccaacttttttttcccctcactagcacctggaatgatgctttgtatgtggcagataagtaaatttggcatgcttatatattctacatctgtaaagtgctgagttttatggagagaggcctttttatgcattaaattgtacatggcaaataaatcccagaaggatctgtagatgaggcacctgctttttcttttctctcattgtccaccttactaaaagtcagtagaatcttctacctcataacttccttccaaaggcagctcagaagattagaaccagacttactaaccaattccaccccccaccaacccccttctactgcctactttaaaaaaattaatagttttctatggaactgatctaagattagaaaaattaattttctttaatttcattatggacttttatttacatgactctaagactataagaaaatctgatggcagtgacaaagtgctagcatttattgttatctaataaagaccttggagcatatgtgcaacttatgagtgtatcagttgttgcatgtaatttttgcctttgtttaagcctggaacttgtaagaaaatgaaaatttaatttttttttctaggacgagctatagaaaagctattgagagtatctagttaatcagtgcagtagttggaaaccttgctggtgtatgtgatgtgcttctgtgcttttgaatgactttatcatctagtctttgtctatttttcctttgatgttcaagtcctagtctataggattggcagtttaaatgctttactcccccttttaaaataaatgattaaaatgtgctttgaaaaaagtcaacttttgttttatttaattttaatttttttttaaagctcttaacagggtagtccatatcttgctatgaggttgggagaatggctacctcccaaacactagtgcggggagattgcacacctaacaacagatcacatcaataacttttataagagcccagagttaggctggctctttcatttttctttccctttaaaatccactctttctggcagcttttattgtacatgactgccctattatcttttgggatatgaccttatgtacttattaatttgcatgactgatctgattatttccaatgctagactacatttatgtagcttatgttccttttccaattgagctatgaacatggatcagaagcctctggatcttccccagacaggaggacttgggcagaaagcaaaaggactaactggctataccaggaagagaagtacctttaccaaagagaatatgtaagaagacaggtgacctagagctggaaggacacagtgga

SEQ ID NO: 734787 - DNA, 2985 bp, Homo sapiens
aacaaggtgcctattttggcaaagaattaatatagccctgggtcaagcaagatcacaaaagataaggcacttagacttcactgaattgtacccctctcctagctcccccgtacacacacgggatagcttttatcatattaatatttcattttggtacattaatgtaattgcttttcaaagagatagccctgtacctaatgttaataataatactgatatcttccatttattgggtacctgttacataccagacatcttgtaaaaattaatattaattcttaaaacaagttctgcaaggcagaactgtctcatttacaagtgtctgggccagaaggtatgctcctacctggctcacctgaataagtcgtctggctccacttactcagactgtgactgtatagagaattttattgagagaatttattacttcagtgttctcattaggaggaaatgccagaagaaactgagttcaagagagagaaacattgctaacaggaattagattcacaaggccaacagacaacccaaagtcattaagccatgagagtggaatgaatctatgaaaactcaatgaagacagaacaagagaaaaatcttttcagccacgatgaattaggagaacaagatgtcaaattacactgatgctgagtcaagcttctcaaagcaagagataatcaggctgacctattgctgaggactatgagaaaaaagttattacagaatgagtcatatggaaaacacttgcaaacagaagaatattgagaacataagttgccatggagaaaattccagtgtcagcattcttgctccttgtggccctctcctacactctggccagagataccacagtcaaacctggagccaaaaaggacacaaaggactctcgacccaaactgccccagaccctctccagaggttggggtgaccaactcatctggactcagacatatgaagaagctctatataaatccaagacaagcaacaaacccttgatgattattcatcacttggatgagtgcccacacagtcaagctttaaagaaagtgtttgctgaaaataaagaaatccagaaattggcagagcagtttgtcctcctcaatctggtttatgaaacaactgacaaacacctttctcctgatggccagtatgtccccaggattatgtttgttgacccatctctgacagttagagccgatatcactggaagatattcaaatcgtctctatgcttacgaacctgcagatacagctctgtgtaagtgtgaccttcaattcggatgttgcccaagagttgaacacctctattgctgtagtgatgggactagaggctgcatggtgagtgcttgacaacatgaagaaagctctcaagttgctgaagactgaattgtaaagaaaaaaaatctccaagcccttctgtctgtcaggccttgagacttgaaaccagaagaagtgtgagaagactggctagtgtggaagcatagtgaacacactgattaggttatggtttaatgttacaacaactattttttaagaaaaacaagttttagaaatttggtttcaagtgtacatgtgtgaaaacaatattgtatactaccatagtgagccatgattttctaaaaaaaaaaataaatgttttgggggtgttctgttttctccaacttggtctttcacagtggttcgtttaccaaataggattaaacacacacaaaatgctcaaggaagggacaagacaaaaccaaaactagttcaaatgatgaagaccaaagaccaagttatcatctcaccacaccacaggttctcactagatgactgtaagtagacacgagcttaatcaacagaagtatcaagccatgtgctttagcataaaagaatatttagaaaaacatcccaagaaaatcacatcactacctagagtcaactctggccaggaactctaaggtacacactttcatttagtaattaaattttagtcagattttgcccaacctaatgctctcagggaaagcctctggcaagtagctttctccttcagaggtctaatttagtagaaaggtcatccaaagaacatctgcactcctgaacacaccctgaagaaatcctgggaattgaccttgtaatcgatttgtctgtcaaggtcctaaagtactggagtgaaataaattcagccaacatgtgactaattggaagaagagcaaagggtggtgacgtgttgatgaggcagatggagatcagaggttactagggtttaggaaacgtgaaaggctgtggcatcagggtaggggagcattctgcctaacagaaattagaattgtgtgttaatgtcttcactctatacttaatctcacattcattaatatatggaattcctctactgcccagcccctcctgatttctttggcccctggactatggtgctgtatataatgctttgcagtatctgttgcttgtcttgattaacttttttggataaaaccttttttgaacagaaaaaaaaaaattattaatttttccagggatatattttcaatcttttctatctctcctagtgactactatcattagtaggtgttgagcatatactgctgatttaatgacatacaaatcttcagcaaaaatatcacaggttaatcagctcccttctcacaagtagataacttacatgtgctgaaaaaggtaaaacattccatttaaaaagatctctgagggataacaagaggaaaaagaggtttcccttccataaacaaatattttaaatgacaagttctaagtgattcaagtttctcctatagtatagcaaaatattttttcattgggcggacgtgaaataaggttaacttcttaaaatgtattgaatggcaaaatatcttaacacatacaaatactttttaaatataaataaatatttaggaaatcaaatgttacagctgtaaggaaaataagtcccccttttaaaagcattgaagaaacacaaagcatgagtcattaa

SEQ ID NO: 734788 - DNA, 2332 bp, Homo sapiens
  misc_feature (2302)..(2302): n is a, c, g, or t
aacaaggtgcctattttggcaaagaattaatatagccctgggtcaagcaagatcacaaaagataaggcacttagacttcactgaattgtacccctctcctagctcccccgtacacacacgggatagcttttatcatattaatatttcattttggtacattaatgtaattgcttttcaaagagatagccctgtacctaatgttaataataatactgatatcttccatttattgggtacctgttacataccagacatcttgtaaaaattaatattaattcttaaaacaagttctgcaaggcagaactgtctcatttacaagtgtctgggccagaaggtatgctcctacctggctcacctgaataagtcgtctggctccacttactcagactgtgactgtatagagaattttattgagagaatttattacttcagtgttctcattaggaggaaatgccagaagaaactgagttcaagagagagaaacattgctaacaggaattagattcacaaggccaacagacaacccaaagtcattaagccatgagagtggaatgaatctatgaaaactcaatgaagacagaacaagagaaaaatcttttcagccacgatgaattaggagaacaagatgtcaaattacactgatgctgagtcaagcttctcaaagcaagagataatcaggctgacctattgctgaggactatgagaaaaaagttattacagaatgagtcatatggaaaacacttgcaaacagaagaatattgagaacataagttgccatggagaaaattccagtgtcagcattcttgctccttgtggccctctcctacactctggccagagataccacagtcaaacctggagccaaaaaggacacaaaggactctcgacccaaactgccccagaccctctccagaggttggggtgaccaactcatctggactcagacatatgaagaagctctatataaatccaagacaagcaacaaacccttgatgattattcatcacttggatgagtgcccacacagtcaagctttaaagaaagtgtttgctgaaaataaagaaatccagaaattggcagagcagtttgtcctcctcaatctggtttatgaaacaactgacaaacacctttctcctgatggccagtatgtccccaggattatgtttgttgacccatctctgacagttagagccgatatcactggaagatattcaaatcgtctctatgcttacgaacctgcagatacagctctgtgtaagtgtgaccttcaattcggatgttgcccaagagttgaacacctctattgctgtagtgatgggactagaggctgcatggtgagtgcttgacaacatgaagaaagctctcaagttgctgaagactgaattgtaaagaaaaaaaatctccaagcccttctgtctgtcaggccttgagacttgaaaccagaagaagtgtgagaagactggctagtgtggaagcatagtgaacacactgattaggttatggtttaatgttacaacaactattttttaagaaaaacaagttttagaaatttggtttcaagtgtacatgtgtgaaaacaatattgtatactaccatagtgagccatgattttctaaaaaaaaaaataaatgttttgggggtgttctgttttctccaacttggtctttcacagtggttcgtttaccaaataggattaaacacacacaaaatgctcaaggaagggacaagacaaaaccaaaactagttcaaatgatgaagaccaaagaccaagttatcatctcaccacaccacaggttctcactagatgactgtaagtagacacgagcttaatcaacagaagtatcaagccatgtgctttagcataaaagaatatttagaaaaacatcccaagaaaatcacatcactacctagagtcaactctggccaggaactctaaggtacacactttcatttagtaattaaattttagtcagattttgcccaacctaatgctctcagggaaagcctctggcaagtagctttctccttcagaggtctaatttagtagaaaggtcatccaaagaacatctgcactcctgaacacaccctgaagaaatcctgggaattgaccttgtaatcgatttgtctgtcaaggtcctaaagtactggagtgaaataaattcagccaacatgtgactaattggaagaagagcaaagggtggtgacgtgttgatgaggcagatggagatcagaggttactagggtttaggaaacgtgaaaggctgtggcatcagggtaggggagcattctgccgggagggagnattcagccgggaggagcattcagccgggag

SEQ ID NO: 734789 - DNA, 1851 bp, Homo sapiens
  misc_feature (1851)..(1851): n is a, c, g, or t
aacaaggtgcctattttggcaaagaattaatatagccctgggtcaagcaagatcacaaaagataaggcacttagacttcactgaattgtacccctctcctagctcccccgtacacacacgggatagcttttatcatattaatatttcattttggtacattaatgtaattgcttttcaaagagatagccctgtacctaatgttaataataatactgatatcttccatttattgggtacctgttacataccagacatcttgtaaaaattaatattaattcttaaaacaagttctgcaaggcagaactgtctcatttacaagtgtctgggccagaaggtatgctcctacctggctcacctgaataagtcgtctggctccacttactcagactgtgactgtatagagaattttattgagagaatttattacttcagtgttctcattaggaggaaatgccagaagaaactgagttcaagagagagaaacattgctaacaggaattagattcacaaggccaacagacaacccaaagtcattaagccatgagagtggaatgaatctatgaaaactcaatgaagacagaacaagagaaaaatcttttcagccacgatgaattaggagaacaagatgtcaaattacactgatgctgagtcaagcttctcaaagcaagagataatcaggctgacctattgctgaggactatgagaaaaaagttattacagaatgagtcatatggaaaacacttgcaaacagaagaatattgagaacataagttgccatggagaaaattccagtgtcagcattcttgctccttgtggccctctcctacactctggccagagataccacagtcaaacctggagccaaaaaggacacaaaggactctcgacccaaactgccccagaccctctccagaggttggggtgaccaactcatctggactcagacatatgaagaagctctatataaatccaagacaagcaacaaacccttgatgattattcatcacttggatgagtgcccacacagtcaagctttaaagaaagtgtttgctgaaaataaagaaatccagaaattggcagagcagtttgtcctcctcaatctggtttatgaaacaactgacaaacacctttctcctgatggccagtatgtccccaggattatgtttgttgacccatctctgacagttagagccgatatcactggaagatattcaaatcgtctctatgcttacgaacctgcagatacagctctgtgtaagtgtgaccttcaattcggatgttgcccaagagttgaacacctctattgctgtagtgatgggactagaggctgcatggtgagtgcttgacaacatgaagaaagctctcaagttgctgaagactgaattgtaaagaaaaaaaatctccaagcccttctgtctgtcaggccttgagacttgaaaccagaagaagtgtgagaagactggctagtgtggaagcatagtgaacacactgattaggttatggtttaatgttacaacaactattttttaagaaaaacaagttttagaaatttggtttcaagtgtacatgtgtgaaaacaatattgtatactaccatagtgagccatgattttctaaaaaaaaaaataaatgttttgggggtgttctgttttctccaaaaaaaaaaaaacaaccaaaaaaaaaaaaagggcgcggctaaaaatccgggggcccatttcctctccccttttttaagggcccaaaggaattaaaaaggcggcggtaaacggacgggaacccccggcttggggaaccctttcgggcttgggacccccaaagccgaaaatgttgtaccgctcggatcgtaacaagn

SEQ ID NO: 734790 - DNA, 2900 bp, Homo sapiens
aacaaggtgcctattttggcaaagaattaatatagccctgggtcaagcaagatcacaaaagataaggcacttagacttcactgaattgtacccctctcctagctcccccgtacacacacgggatagcttttatcatattaatatttcattttggtacattaatgtaattgcttttcaaagagatagccctgtacctaatgttaataataatactgatatcttccatttattgggtacctgttacataccagacatcttgtaaaaattaatattaattcttaaaacaagttctgcaaggcagaactgtctcatttacaagtgtctgggccagaaggtatgctcctacctggctcacctgaataagtcgtctggctccacttactcagactgtgactgtatagagaattttattgagagaatttattacttcagtgttctcattaggaggaaatgccagaagaaactgagttcaagagagagaaacattgctaacaggaattagattcacaaggccaacagacaacccaaagtcattaagccatgagagtggaatgaatctatgaaaactcaatgaagacagaacaagagaaaaatcttttcagccacgatgaattaggagaacaagatgtcaaattacactgatgctgagtcaagcttctcaaagcaagagataatcaggctgacctattgctgaggactatgagaaaaaagttattacagaatgagtcatatggaaaacacttgcaaacagaagaatattgagaacataagttgccatggagaaaattccagtgtcagcattcttgctccttgtggccctctcctacactctggccagagataccacagtcaaacctggagccaaaaaggacacaaaggactctcgacccaaactgccccagaccctctccagaggttggggtgaccaactcatctggactcagacatatgaagaagctctatataaatccaagacaagcaacaaacccttgatgattattcatcacttggatgagtgcccacacagtcaagctttaaagaaagtgtttgctgaaaataaagaaatccagaaattggcagagcagtttgtcctcctcaatctggtttatgaaacaactgacaaacacctttctcctgatggccagtatgtccccaggattatgtttgttgacccatctctgacagttagagccgatatcactggaagatattcaaatcgtctctatgcttacgaacctgcagatacagctctgttgcttgacaacatgaagaaagctctcaagttgctgaagactgaattgtaaagaaaaaaaatctccaagcccttctgtctgtcaggccttgagacttgaaaccagaagaagtgtgagaagactggctagtgtggaagcatagtgaacacactgattaggttatggtttaatgttacaacaactattttttaagaaaaacaagttttagaaatttggtttcaagtgtacatgtgtgaaaacaatattgtatactaccatagtgagccatgattttctaaaaaaaaaaataaatgttttgggggtgttctgttttctccaacttggtctttcacagtggttcgtttaccaaataggattaaacacacacaaaatgctcaaggaagggacaagacaaaaccaaaactagttcaaatgatgaagaccaaagaccaagttatcatctcaccacaccacaggttctcactagatgactgtaagtagacacgagcttaatcaacagaagtatcaagccatgtgctttagcataaaagaatatttagaaaaacatcccaagaaaatcacatcactacctagagtcaactctggccaggaactctaaggtacacactttcatttagtaattaaattttagtcagattttgcccaacctaatgctctcagggaaagcctctggcaagtagctttctccttcagaggtctaatttagtagaaaggtcatccaaagaacatctgcactcctgaacacaccctgaagaaatcctgggaattgaccttgtaatcgatttgtctgtcaaggtcctaaagtactggagtgaaataaattcagccaacatgtgactaattggaagaagagcaaagggtggtgacgtgttgatgaggcagatggagatcagaggttactagggtttaggaaacgtgaaaggctgtggcatcagggtaggggagcattctgcctaacagaaattagaattgtgtgttaatgtcttcactctatacttaatctcacattcattaatatatggaattcctctactgcccagcccctcctgatttctttggcccctggactatggtgctgtatataatgctttgcagtatctgttgcttgtcttgattaacttttttggataaaaccttttttgaacagaaaaaaaaaaattattaatttttccagggatatattttcaatcttttctatctctcctagtgactactatcattagtaggtgttgagcatatactgctgatttaatgacatacaaatcttcagcaaaaatatcacaggttaatcagctcccttctcacaagtagataacttacatgtgctgaaaaaggtaaaacattccatttaaaaagatctctgagggataacaagaggaaaaagaggtttcccttccataaacaaatattttaaatgacaagttctaagtgattcaagtttctcctatagtatagcaaaatattttttcattgggcggacgtgaaataaggttaacttcttaaaatgtattgaatggcaaaatatcttaacacatacaaatactttttaaatataaataaatatttaggaaatcaaatgttacagctgtaaggaaaataagtcccccttttaaaagcattgaagaaacacaaagcatgagtcattaa

SEQ ID NO: 734791 - DNA, 2247 bp, Homo sapiens
  misc_feature (2217)..(2217): n is a, c, g, or t
aacaaggtgcctattttggcaaagaattaatatagccctgggtcaagcaagatcacaaaagataaggcacttagacttcactgaattgtacccctctcctagctcccccgtacacacacgggatagcttttatcatattaatatttcattttggtacattaatgtaattgcttttcaaagagatagccctgtacctaatgttaataataatactgatatcttccatttattgggtacctgttacataccagacatcttgtaaaaattaatattaattcttaaaacaagttctgcaaggcagaactgtctcatttacaagtgtctgggccagaaggtatgctcctacctggctcacctgaataagtcgtctggctccacttactcagactgtgactgtatagagaattttattgagagaatttattacttcagtgttctcattaggaggaaatgccagaagaaactgagttcaagagagagaaacattgctaacaggaattagattcacaaggccaacagacaacccaaagtcattaagccatgagagtggaatgaatctatgaaaactcaatgaagacagaacaagagaaaaatcttttcagccacgatgaattaggagaacaagatgtcaaattacactgatgctgagtcaagcttctcaaagcaagagataatcaggctgacctattgctgaggactatgagaaaaaagttattacagaatgagtcatatggaaaacacttgcaaacagaagaatattgagaacataagttgccatggagaaaattccagtgtcagcattcttgctccttgtggccctctcctacactctggccagagataccacagtcaaacctggagccaaaaaggacacaaaggactctcgacccaaactgccccagaccctctccagaggttggggtgaccaactcatctggactcagacatatgaagaagctctatataaatccaagacaagcaacaaacccttgatgattattcatcacttggatgagtgcccacacagtcaagctttaaagaaagtgtttgctgaaaataaagaaatccagaaattggcagagcagtttgtcctcctcaatctggtttatgaaacaactgacaaacacctttctcctgatggccagtatgtccccaggattatgtttgttgacccatctctgacagttagagccgatatcactggaagatattcaaatcgtctctatgcttacgaacctgcagatacagctctgttgcttgacaacatgaagaaagctctcaagttgctgaagactgaattgtaaagaaaaaaaatctccaagcccttctgtctgtcaggccttgagacttgaaaccagaagaagtgtgagaagactggctagtgtggaagcatagtgaacacactgattaggttatggtttaatgttacaacaactattttttaagaaaaacaagttttagaaatttggtttcaagtgtacatgtgtgaaaacaatattgtatactaccatagtgagccatgattttctaaaaaaaaaaataaatgttttgggggtgttctgttttctccaacttggtctttcacagtggttcgtttaccaaataggattaaacacacacaaaatgctcaaggaagggacaagacaaaaccaaaactagttcaaatgatgaagaccaaagaccaagttatcatctcaccacaccacaggttctcactagatgactgtaagtagacacgagcttaatcaacagaagtatcaagccatgtgctttagcataaaagaatatttagaaaaacatcccaagaaaatcacatcactacctagagtcaactctggccaggaactctaaggtacacactttcatttagtaattaaattttagtcagattttgcccaacctaatgctctcagggaaagcctctggcaagtagctttctccttcagaggtctaatttagtagaaaggtcatccaaagaacatctgcactcctgaacacaccctgaagaaatcctgggaattgaccttgtaatcgatttgtctgtcaaggtcctaaagtactggagtgaaataaattcagccaacatgtgactaattggaagaagagcaaagggtggtgacgtgttgatgaggcagatggagatcagaggttactagggtttaggaaacgtgaaaggctgtggcatcagggtaggggagcattctgccgggagggagnattcagccgggaggagcattcagccgggag

SEQ ID NO: 734792 - DNA, 1766 bp, Homo sapiens
  misc_feature (1766)..(1766): n is a, c, g, or t
aacaaggtgcctattttggcaaagaattaatatagccctgggtcaagcaagatcacaaaagataaggcacttagacttcactgaattgtacccctctcctagctcccccgtacacacacgggatagcttttatcatattaatatttcattttggtacattaatgtaattgcttttcaaagagatagccctgtacctaatgttaataataatactgatatcttccatttattgggtacctgttacataccagacatcttgtaaaaattaatattaattcttaaaacaagttctgcaaggcagaactgtctcatttacaagtgtctgggccagaaggtatgctcctacctggctcacctgaataagtcgtctggctccacttactcagactgtgactgtatagagaattttattgagagaatttattacttcagtgttctcattaggaggaaatgccagaagaaactgagttcaagagagagaaacattgctaacaggaattagattcacaaggccaacagacaacccaaagtcattaagccatgagagtggaatgaatctatgaaaactcaatgaagacagaacaagagaaaaatcttttcagccacgatgaattaggagaacaagatgtcaaattacactgatgctgagtcaagcttctcaaagcaagagataatcaggctgacctattgctgaggactatgagaaaaaagttattacagaatgagtcatatggaaaacacttgcaaacagaagaatattgagaacataagttgccatggagaaaattccagtgtcagcattcttgctccttgtggccctctcctacactctggccagagataccacagtcaaacctggagccaaaaaggacacaaaggactctcgacccaaactgccccagaccctctccagaggttggggtgaccaactcatctggactcagacatatgaagaagctctatataaatccaagacaagcaacaaacccttgatgattattcatcacttggatgagtgcccacacagtcaagctttaaagaaagtgtttgctgaaaataaagaaatccagaaattggcagagcagtttgtcctcctcaatctggtttatgaaacaactgacaaacacctttctcctgatggccagtatgtccccaggattatgtttgttgacccatctctgacagttagagccgatatcactggaagatattcaaatcgtctctatgcttacgaacctgcagatacagctctgttgcttgacaacatgaagaaagctctcaagttgctgaagactgaattgtaaagaaaaaaaatctccaagcccttctgtctgtcaggccttgagacttgaaaccagaagaagtgtgagaagactggctagtgtggaagcatagtgaacacactgattaggttatggtttaatgttacaacaactattttttaagaaaaacaagttttagaaatttggtttcaagtgtacatgtgtgaaaacaatattgtatactaccatagtgagccatgattttctaaaaaaaaaaataaatgttttgggggtgttctgttttctccaaaaaaaaaaaaacaaccaaaaaaaaaaaaagggcgcggctaaaaatccgggggcccatttcctctccccttttttaagggcccaaaggaattaaaaaggcggcggtaaacggacgggaacccccggcttggggaaccctttcgggcttgggacccccaaagccgaaaatgttgtaccgctcggatcgtaacaagn

SEQ ID NO: 734793 - DNA, 1305 bp, Homo sapiens
aacaaggtgcctattttggcaaagaattaatatagccctgggtcaagcaagatcacaaaagataaggcacttagacttcactgaattgtacccctctcctagctcccccgtacacacacgggatagcttttatcatattaatatttcattttggtacattaatgtaattgcttttcaaagagatagccctgtacctaatgttaataataatactgatatcttccatttattgggtacctgttacataccagacatcttgtaaaaattaatattaattcttaaaacaagttctgcaaggcagaactgtctcatttacaagtgtctgggccagaaggtatgctcctacctggctcacctgaataagtcgtctggctccacttactcagactgtgactgtatagagaattttattgagagaatttattacttcagtgttctcattaggaggaaatgccagaagaaactgagttcaagagagagaaacattgctaacaggaattagattcacaaggccaacagacaacccaaagtcattaagccatgagagtggaatgaatctatgaaaactcaatgaagacagaacaagagaaaaatcttttcagccacgatgaattaggagaacaagatgtcaaattacactgatgctgagtcaagcttctcaaagcaagagataatcaggctgacctattgctgaggactatgagaaaaaagttattacagaatgagtcatatggaaaacacttgcaaacagaagaatattgagaacataagttgccatggagaaaattccagtgtcagcattcttgctccttgtggccctctcctacactctggccagagataccacagtcaaacctggagccaaaaaggacacaaaggactctcgacccaaactgccccagaccctctccagaggttggggtgaccaactcatctggactcagacatatgaagaagctctatataaatccaagacaagcaacaaacccttgatgattattcatcacttggatgagtgcccacacagtcaagctttaaagaaagtgtttgctgaaaataaagaaatccagaaattggcagagcagtttgtcctcctcaatctggtttatgaaacaactgacaaacacctttctcctgatggccagtatgtccccaggattatgtttgttgacccatctctgacagttagagccgatatcactggaagatattcaaatcgtctctatgcttacgaacctgcagatacagctctgttgcttgacaacatgaagaaagctcagctctggcaagagctctgccaagggg

SEQ ID NO: 734794 - DNA, 4000 bp, Homo sapiens
gtacgtgttattctctcattggtacttaacattaaggataaaacataaaaagcagggtaaagcatcccaaaataatctgtgaaagcaataagtgattctgcttctttaagtaacaatatggcaggttttttttgaaaacccaaggttacccaaactctgacctttgaaaccaattcctccatttggagaaacaatacaataaaaccaactggtataaaagacaagcacaagcccattcactagaggcaagtttggaatcatagatcacagaaaaagtagtttggccttcctagaaatatattcaattacatgcacacaaaaggtgaggtcttggaaagttacttattactatttgaaagatgagaaaaatataatcataatagtattttcttttgagcctatttaataataaagtgtgtattctgttgtgaatttaaaatattataatttggggggttttgcctgttagaaaaaacttcataaactgaagtattatattacatgttgtagtataccacgtgctatatttaccaagttaatattgatatgtaatacacttattatttccataatatgttggttttttatttactaatgttccttatgaaacacctgccttttcagtatacagatgactagataatgagatagaaaattctagatctagtcatgaccacaagataactgtttacatttgataataactatgtaatagttttcaaaggaataaggtttaaaaaaaaagaatcagaagaaatttcatggaacttagtcaaggtaaagctgtcttacaaggtggaattaggccttttttttaagtcacttccatgcttaaggaagaatgacatcttctgacagcatctctgtttattcagtgctccacccgaaggagtgtatttatcatctaacaatattgactctagggtcagactcgaactgctaaggacacgtcgtcttaatctgtacaaaatctgcctttcatatatggtgaaagtagttactgaacccaatttgttttttaatgcactgtttgtagcctattcaacctcattagcagcatatcatttcgatggaaaattcttattgactgagattactcactgcaaattctaaaagaaagatcttaatgtctgctttataaatacccatcttctaaaagataagagttcgtggggaaatcacttaataactctaggtgttattacattttaaattactttttattcctcctcctctacaaagcacacctccaccatgatgtaaaagaattttaggctgtgggactttattcagagcaaacaagggatttgaatggctgtgagactaggattccttccagcttagtacagggtataaaatttctgctcaccaggaagaaagattagattatgctgtaaaacaagtgtggagagttacatgccaaatctcaagctgtgggctccttgagaatggctaagcatagaaacttgaacacaagagcaaacgtttgagggtttataaatccctcaaagagatcctaggattgggttcagtatataagtgaaccctctgaagtaactgtaaaattttgcatatgcctatatatgtgtatcttacctgcagataaattcaatagatttcatcatccagatcatgtaacttattgtccaaatcatggtacttttgagaatgaaagaagacattctcaattattatacccagcaacaggcttaaactgaggctctcctgggcaaactgagaagtataatcacctcattcatgaccccaaaaggtaatacactactgcaccagaacacttagcttttcattatttcaacccaagaacccttcatgaattttcgtttaaagccactgatttttatacaatcagtgtattctcctagtgtctagttacaagtctcgccgcatttggcaccagttgttgccttgagatttgtagctcctactggacttggatccagggctatgacactatcctgcctgtcctcacactttatactttctgtgctctgcaagtatttcttttcctcactcctaaatggacaatcattaccaaagttgtatgctggtccttttgctctatactttcccgcaagaaacacatctaattgtatgacattaagtttaacatatcaatgactggttctcagcctttgacacatatcatggtcccaaactttagacccaggaaccttcatccacccaagcagtaaatctgctcctccatcactagtctcaggaaagaatacaaagaagagtaaagctgataagcttactcaaagaaaggttttgctaattatgtttgcaaatctgctctgttgggcatttagaaagtttaagagaattagatatataagtacagtttaaactatttttaacaatttcattactggatatcaattaaaactccagaaactctaaaccattctgtgcacaaaagcccaattcagaaattaaaataaattcaaatggtaaccaagttttcctctgtcaaaacacaaatttttatgtgtccatttctctaagctagagttagggagaatttattcagctatttggtcagcagttagatatgtttttgacaagtcttctctgaggcaaaccctttgagtacaagaagtcatttgcacttccctctgcataaggctcataataattcagtaatgtggaattctatgcatctacaggcttatctcattatttcctgacatcagaaggcagcctgatggactgaaagaaatactggattaattatcaccaactatggaaaattttagatcttctctctgttcatcaattttgtggctttgcgctaattatgtccactcacctgagcctttttacttttttaaaagaaaataatgaagtctggtgagattgttataatgacaaatgaatatttccaatgaatatatgtgaaaagtttaagacttgtgataggctataatcaaagggtaatccaacaaagattctgctgtcatagactgagacctaaatgatcataatacagagaagtaatacattctgtattactaactaatatttttgagtgcttactatgtgttatgtaccattctaagcactttatgtctattatcttatgtaatcttccacagatcctatatagtaaaaaagtagggataggaagacctacaagtgagacaactaaagcacagagaagttaagtaagttgcctggattagtagagtatgtaacagtcaggaaacttgattcaaactcgaacctatctgaatctacagcttgccctcttaaccctcacatgcttcctcttgagggtaaagtctaaacttagaatggcattaaaggcccaggcaaatagccccaaaacacccctccaaccctattgtctatgagctacccagatgtctctcacttcagctaggctcgtccttaaatatcccacaaatatattttgcaaattctatatcaccgtctctatttggaaatcttgctttctgccgtcaagttgagcactctagtaggtagcaatctctactctctctgaaaaataatcacacctgacgtctatcccacttacttgtttcttgttgcgtgccattctcatgtgaatggctaatttttagtgttgttccatcttaattcttcaatcagatcgtaagtaaccttagagtagaaacagtgttgtaaactgctacatgttttccccatagcatggcccatcactccgaattgcaattatctatgtgtgtgtctggctacctcaataactgaccatcattttttcatttttatatatttaatgcctggcacaatatttgctacataaacagagttgatgaatacttggtgaagaaaataaatgaatgagtaaatgaaacacaagagttagctactcatgcatgctagattacacaataattgccagttataagtctcctgttttaactcaaaaataggatataatccactttaaaatatgcttgaatatggatgcagctggaggtcattatcctaatca

SEQ ID NO: 734795 - DNA, 4000 bp, Homo sapiens; identical to SEQ ID NO: 734794

SEQ ID NO: 734796 - DNA, 4000 bp, Homo sapiens; identical to SEQ ID NO: 734794

SEQ ID NO: 734797 - DNA, 4000 bp, Homo sapiens; identical to SEQ ID NO: 734794

SEQ ID NO: 734798 - DNA, 4000 bp, Homo sapiens; identical to SEQ ID NO: 734794

SEQ ID NO: 734799 - DNA, 4000 bp, Homo sapiens; identical to SEQ ID NO: 734794

SEQ ID NO: 734800 - DNA, 4000 bp, Homo sapiens; identical to SEQ ID NO: 734794

SEQ ID NO: 734801 - DNA, 4000 bp, Homo sapiens; identical to SEQ ID NO: 734794

SEQ ID NO: 734802 - DNA, 4000 bp, Homo sapiens; identical to SEQ ID NO: 734794

SEQ ID NO: 734803 - DNA, 4000 bp, Homo sapiens; identical to SEQ ID NO: 734794

SEQ ID NO: 734804 - DNA, 4000 bp, Homo sapiens; identical to SEQ ID NO: 734794

SEQ ID NO: 734805 - DNA, 4000 bp, Homo sapiens; identical to SEQ ID NO: 734794

SEQ ID NO: 734806 - DNA, 4000 bp, Homo sapiens; identical to SEQ ID NO: 734794

SEQ ID NO: 734807 - DNA, 4000 bp, Homo sapiens; identical to SEQ ID NO: 734794

SEQ ID NO: 734808 - DNA, 1909 bp, Homo sapiens
tagaggatcccctctatcctataatcggtttatgaaacaactgacaaacacctttctcctgatggccagtatgtccccaggattatgtttgttgacccatctctgacagttagagccgatatcactggaagatattcaaatcgtctctatgcttacgaacctgcagatacagctctgtgtaagtgtgaccttcaattcggatgttgcccaagagttgaacacctctattgctgtagtgatgggactagaggctgcatggtgagtgcttgacaacatgaagaaagctctcaagttgctgaagactgaattgtaaagaaaaaaaatctccaagcccttctgtctgtcaggccttgagacttgaaaccagaagaagtgtgagaagactggctagtgtggaagcatagtgaacacactgattaggttatggtttaatgttacaacaactattttttaagaaaaacaagttttagaaatttggtttcaagtgtacatgtgtgaaaacaatattgtatactaccatagtgagccatgattttctaaaaaaaaaaataaatgttttgggggtgttctgttttctccaacttggtctttcacagtggttcgtttaccaaataggattaaacacacacaaaatgctcaaggaagggacaagacaaaaccaaaactagttcaaatgatgaagaccaaagaccaagttatcatctcaccacaccacaggttctcactagatgactgtaagtagacacgagcttaatcaacagaagtatcaagccatgtgctttagcataaaagaatatttagaaaaacatcccaagaaaatcacatcactacctagagtcaactctggccaggaactctaaggtacacactttcatttagtaattaaattttagtcagattttgcccaacctaatgctctcagggaaagcctctggcaagtagctttctccttcagaggtctaatttagtagaaaggtcatccaaagaacatctgcactcctgaacacaccctgaagaaatcctgggaattgaccttgtaatcgatttgtctgtcaaggtcctaaagtactggagtgaaataaattcagccaacatgtgactaattggaagaagagcaaagggtggtgacgtgttgatgaggcagatggagatcagaggttactagggtttaggaaacgtgaaaggctgtggcatcagggtaggggagcattctgcctaacagaaattagaattgtgtgttaatgtcttcactctatacttaatctcacattcattaatatatggaattcctctactgcccagcccctcctgatttctttggcccctggactatggtgctgtatataatgctttgcagtatctgttgcttgtcttgattaacttttttggataaaaccttttttgaacagaaaaaaaaaaattattaatttttccagggatatattttcaatcttttctatctctcctagtgactactatcattagtaggtgttgagcatatactgctgatttaatgacatacaaatcttcagcaaaaatatcacaggttaatcagctcccttctcacaagtagataacttacatgtgctgaaaaaggtaaaacattccatttaaaaagatctctgagggataacaagaggaaaaagaggtttcccttccataaacaaatattttaaatgacaagttctaagtgattcaagtttctcctatagtatagcaaaatattttttcattgggcggacgtgaaataaggttaacttcttaaaatgtattgaatggcaaaatatcttaacacatacaaatactttttaaatataaataaatatttaggaaatcaaatgttacagctgtaaggaaaataagtcccccttttaaaagcattgaagaaacacaaagcatgagtcattaa

SEQ ID NO: 734809 - DNA, 1256 bp, Homo sapiens
  misc_feature (1226)..(1226): n is a, c, g, or t
tagaggatcccctctatcctataatcggtttatgaaacaactgacaaacacctttctcctgatggccagtatgtccccaggattatgtttgttgacccatctctgacagttagagccgatatcactggaagatattcaaatcgtctctatgcttacgaacctgcagatacagctctgtgtaagtgtgaccttcaattcggatgttgcccaagagttgaacacctctattgctgtagtgatgggactagaggctgcatggtgagtgcttgacaacatgaagaaagctctcaagttgctgaagactgaattgtaaagaaaaaaaatctccaagcccttctgtctgtcaggccttgagacttgaaaccagaagaagtgtgagaagactggctagtgtggaagcatagtgaacacactgattaggttatggtttaatgttacaacaactattttttaagaaaaacaagttttagaaatttggtttcaagtgtacatgtgtgaaaacaatattgtatactaccatagtgagccatgattttctaaaaaaaaaaataaatgttttgggggtgttctgttttctccaacttggtctttcacagtggttcgtttaccaaataggattaaacacacacaaaatgctcaaggaagggacaagacaaaaccaaaactagttcaaatgatgaagaccaaagaccaagttatcatctcaccacaccacaggttctcactagatgactgtaagtagacacgagcttaatcaacagaagtatcaagccatgtgctttagcataaaagaatatttagaaaaacatcccaagaaaatcacatcactacctagagtcaactctggccaggaactctaaggtacacactttcatttagtaattaaattttagtcagattttgcccaacctaatgctctcagggaaagcctctggcaagtagctttctccttcagaggtctaatttagtagaaaggtcatccaaagaacatctgcactcctgaacacaccctgaagaaatcctgggaattgaccttgtaatcgatttgtctgtcaaggtcctaaagtactggagtgaaataaattcagccaacatgtgactaattggaagaagagcaaagggtggtgacgtgttgatgaggcagatggagatcagaggttactagggtttaggaaacgtgaaaggctgtggcatcagggtaggggagcattctgccgggagggagnattcagccgggaggagcattcagccgggag

SEQ ID NO: 734810 - DNA, 775 bp, Homo sapiens
  misc_feature (775)..(775): n is a, c, g, or t
tagaggatcccctctatcctataatcggtttatgaaacaactgacaaacacctttctcctgatggccagtatgtccccaggattatgtttgttgacccatctctgacagttagagccgatatcactggaagatattcaaatcgtctctatgcttacgaacctgcagatacagctctgtgtaagtgtgaccttcaattcggatgttgcccaagagttgaacacctctattgctgtagtgatgggactagaggctgcatggtgagtgcttgacaacatgaagaaagctctcaagttgctgaagactgaattgtaaagaaaaaaaatctccaagcccttctgtctgtcaggccttgagacttgaaaccagaagaagtgtgagaagactggctagtgtggaagcatagtgaacacactgattaggttatggtttaatgttacaacaactattttttaagaaaaacaagttttagaaatttggtttcaagtgtacatgtgtgaaaacaatattgtatactaccatagtgagccatgattttctaaaaaaaaaaataaatgttttgggggtgttctgttttctccaaaaaaaaaaaaacaaccaaaaaaaaaaaaagggcgcggctaaaaatccgggggcccatttcctctccccttttttaagggcccaaaggaattaaaaaggcggcggtaaacggacgggaacccccggcttggggaaccctttcgggcttgggacccccaaagccgaaaatgttgtaccgctcggatcgtaacaagn

SEQ ID NO: 734811 - DNA, 1824 bp, Homo sapiens
tagaggatcccctctatcctataatcggtttatgaaacaactgacaaacacctttctcctgatggccagtatgtccccaggattatgtttgttgacccatctctgacagttagagccgatatcactggaagatattcaaatcgtctctatgcttacgaacctgcagatacagctctgttgcttgacaacatgaagaaagctctcaagttgctgaagactgaattgtaaagaaaaaaaatctccaagcccttctgtctgtcaggccttgagacttgaaaccagaagaagtgtgagaagactggctagtgtggaagcatagtgaacacactgattaggttatggtttaatgttacaacaactattttttaagaaaaacaagttttagaaatttggtttcaagtgtacatgtgtgaaaacaatattgtatactaccatagtgagccatgattttctaaaaaaaaaaataaatgttttgggggtgttctgttttctccaacttggtctttcacagtggttcgtttaccaaataggattaaacacacacaaaatgctcaaggaagggacaagacaaaaccaaaactagttcaaatgatgaagaccaaagaccaagttatcatctcaccacaccacaggttctcactagatgactgtaagtagacacgagcttaatcaacagaagtatcaagccatgtgctttagcataaaagaatatttagaaaaacatcccaagaaaatcacatcactacctagagtcaactctggccaggaactctaaggtacacactttcatttagtaattaaattttagtcagattttgcccaacctaatgctctcagggaaagcctctggcaagtagctttctccttcagaggtctaatttagtagaaaggtcatccaaagaacatctgcactcctgaacacaccctgaagaaatcctgggaattgaccttgtaatcgatttgtctgtcaaggtcctaaagtactggagtgaaataaattcagccaacatgtgactaattggaagaagagcaaagggtggtgacgtgttgatgaggcagatggagatcagaggttactagggtttaggaaacgtgaaaggctgtggcatcagggtaggggagcattctgcctaacagaaattagaattgtgtgttaatgtcttcactctatacttaatctcacattcattaatatatggaattcctctactgcccagcccctcctgatttctttggcccctggactatggtgctgtatataatgctttgcagtatctgttgcttgtcttgattaacttttttggataaaaccttttttgaacagaaaaaaaaaaattattaatttttccagggatatattttcaatcttttctatctctcctagtgactactatcattagtaggtgttgagcatatactgctgatttaatgacatacaaatcttcagcaaaaatatcacaggttaatcagctcccttctcacaagtagataacttacatgtgctgaaaaaggtaaaacattccatttaaaaagatctctgagggataacaagaggaaaaagaggtttcccttccataaacaaatattttaaatgacaagttctaagtgattcaagtttctcctatagtatagcaaaatattttttcattgggcggacgtgaaataaggttaacttcttaaaatgtattgaatggcaaaatatcttaacacatacaaatactttttaaatataaataaatatttaggaaatcaaatgttacagctgtaaggaaaataagtcccccttttaaaagcattgaagaaacacaaagcatgagtcattaa

SEQ ID NO: 734812 - DNA, 1171 bp, Homo sapiens
  misc_feature (1141)..(1141): n is a, c, g, or t
tagaggatcccctctatcctataatcggtttatgaaacaactgacaaacacctttctcctgatggccagtatgtccccaggattatgtttgttgacccatctctgacagttagagccgatatcactggaagatattcaaatcgtctctatgcttacgaacctgcagatacagctctgttgcttgacaacatgaagaaagctctcaagttgctgaagactgaattgtaaagaaaaaaaatctccaagcccttctgtctgtcaggccttgagacttgaaaccagaagaagtgtgagaagactggctagtgtggaagcatagtgaacacactgattaggttatggtttaatgttacaacaactattttttaagaaaaacaagttttagaaatttggtttcaagtgtacatgtgtgaaaacaatattgtatactaccatagtgagccatgattttctaaaaaaaaaaataaatgttttgggggtgttctgttttctccaacttggtctttcacagtggttcgtttaccaaataggattaaacacacacaaaatgctcaaggaagggacaagacaaaaccaaaactagttcaaatgatgaagaccaaagaccaagttatcatctcaccacaccacaggttctcactagatgactgtaagtagacacgagcttaatcaacagaagtatcaagccatgtgctttagcataaaagaatatttagaaaaacatcccaagaaaatcacatcactacctagagtcaactctggccaggaactctaaggtacacactttcatttagtaattaaattttagtcagattttgcccaacctaatgctctcagggaaagcctctggcaagtagctttctccttcagaggtctaatttagtagaaaggtcatccaaagaacatctgcactcctgaacacaccctgaagaaatcctgggaattgaccttgtaatcgatttgtctgtcaaggtcctaaagtactggagtgaaataaattcagccaacatgtgactaattggaagaagagcaaagggtggtgacgtgttgatgaggcagatggagatcagaggttactagggtttaggaaacgtgaaaggctgtggcatcagggtaggggagcattctgccgggagggagnattcagccgggaggagcattcagccgggag

SEQ ID NO: 734813 - DNA, 690 bp, Homo sapiens
  misc_feature (690)..(690): n is a, c, g, or t
tagaggatcccctctatcctataatcggtttatgaaacaactgacaaacacctttctcctgatggccagtatgtccccaggattatgtttgttgacccatctctgacagttagagccgatatcactggaagatattcaaatcgtctctatgcttacgaacctgcagatacagctctgttgcttgacaacatgaagaaagctctcaagttgctgaagactgaattgtaaagaaaaaaaatctccaagcccttctgtctgtcaggccttgagacttgaaaccagaagaagtgtgagaagactggctagtgtggaagcatagtgaacacactgattaggttatggtttaatgttacaacaactattttttaagaaaaacaagttttagaaatttggtttcaagtgtacatgtgtgaaaacaatattgtatactaccatagtgagccatgattttctaaaaaaaaaaataaatgttttgggggtgttctgttttctccaaaaaaaaaaaaacaaccaaaaaaaaaaaaagggcgcggctaaaaatccgggggcccatttcctctccccttttttaagggcccaaaggaattaaaaaggcggcggtaaacggacgggaacccccggcttggggaaccctttcgggcttgggacccccaaagccgaaaatgttgtaccgctcggatcgtaacaagn

SEQ ID NO: 734814 - DNA, 229 bp, Homo sapiens
tagaggatcccctctatcctataatcggtttatgaaacaactgacaaacacctttctcctgatggccagtatgtccccaggattatgtttgttgacccatctctgacagttagagccgatatcactggaagatattcaaatcgtctctatgcttacgaacctgcagatacagctctgttgcttgacaacatgaagaaagctcagctctggcaagagctctgccaagggg

SEQ ID NO: 734815 - DNA, 1991 bp, Homo sapiens
gctcggtaccccacacgccgaggctccagacagtcaagctttaaagaaagtgtttgctgaaaataaagaaatccagaaattggcagagcagtttgtcctcctcaatctggtttatgaaacaactgacaaacacctttctcctgatggccagtatgtccccaggattatgtttgttgacccatctctgacagttagagccgatatcactggaagatattcaaatcgtctctatgcttacgaacctgcagatacagctctgtgtaagtgtgaccttcaattcggatgttgcccaagagttgaacacctctattgctgtagtgatgggactagaggctgcatggtgagtgcttgacaacatgaagaaagctctcaagttgctgaagactgaattgtaaagaaaaaaaatctccaagcccttctgtctgtcaggccttgagacttgaaaccagaagaagtgtgagaagactggctagtgtggaagcatagtgaacacactgattaggttatggtttaatgttacaacaactattttttaagaaaaacaagttttagaaatttggtttcaagtgtacatgtgtgaaaacaatattgtatactaccatagtgagccatgattttctaaaaaaaaaaataaatgttttgggggtgttctgttttctccaacttggtctttcacagtggttcgtttaccaaataggattaaacacacacaaaatgctcaaggaagggacaagacaaaaccaaaactagttcaaatgatgaagaccaaagaccaagttatcatctcaccacaccacaggttctcactagatgactgtaagtagacacgagcttaatcaacagaagtatcaagccatgtgctttagcataaaagaatatttagaaaaacatcccaagaaaatcacatcactacctagagtcaactctggccaggaactctaaggtacacactttcatttagtaattaaattttagtcagattttgcccaacctaatgctctcagggaaagcctctggcaagtagctttctccttcagaggtctaatttagtagaaaggtcatccaaagaacatctgcactcctgaacacaccctgaagaaatcctgggaattgaccttgtaatcgatttgtctgtcaaggtcctaaagtactggagtgaaataaattcagccaacatgtgactaattggaagaagagcaaagggtggtgacgtgttgatgaggcagatggagatcagaggttactagggtttaggaaacgtgaaaggctgtggcatcagggtaggggagcattctgcctaacagaaattagaattgtgtgttaatgtcttcactctatacttaatctcacattcattaatatatggaattcctctactgcccagcccctcctgatttctttggcccctggactatggtgctgtatataatgctttgcagtatctgttgcttgtcttgattaacttttttggataaaaccttttttgaacagaaaaaaaaaaattattaatttttccagggatatattttcaatcttttctatctctcctagtgactactatcattagtaggtgttgagcatatactgctgatttaatgacatacaaatcttcagcaaaaatatcacaggttaatcagctcccttctcacaagtagataacttacatgtgctgaaaaaggtaaaacattccatttaaaaagatctctgagggataacaagaggaaaaagaggtttcccttccataaacaaatattttaaatgacaagttctaagtgattcaagtttctcctatagtatagcaaaatattttttcattgggcggacgtgaaataaggttaacttcttaaaatgtattgaatggcaaaatatcttaacacatacaaatactttttaaatataaataaatatttaggaaatcaaatgttacagctgtaaggaaaataagtcccccttttaaaagcattgaagaaacacaaagcatgagtcattaa

SEQ ID NO: 734816 - DNA, 1338 bp, Homo sapiens
  misc_feature (1308)..(1308): n is a, c, g, or t
gctcggtaccccacacgccgaggctccagacagtcaagctttaaagaaagtgtttgctgaaaataaagaaatccagaaattggcagagcagtttgtcctcctcaatctggtttatgaaacaactgacaaacacctttctcctgatggccagtatgtccccaggattatgtttgttgacccatctctgacagttagagccgatatcactggaagatattcaaatcgtctctatgcttacgaacctgcagatacagctctgtgtaagtgtgaccttcaattcggatgttgcccaagagttgaacacctctattgctgtagtgatgggactagaggctgcatggtgagtgcttgacaacatgaagaaagctctcaagttgctgaagactgaattgtaaagaaaaaaaatctccaagcccttctgtctgtcaggccttgagacttgaaaccagaagaagtgtgagaagactggctagtgtggaagcatagtgaacacactgattaggttatggtttaatgttacaacaactattttttaagaaaaacaagttttagaaatttggtttcaagtgtacatgtgtgaaaacaatattgtatactaccatagtgagccatgattttctaaaaaaaaaaataaatgttttgggggtgttctgttttctccaacttggtctttcacagtggttcgtttaccaaataggattaaacacacacaaaatgctcaaggaagggacaagacaaaaccaaaactagttcaaatgatgaagaccaaagaccaagttatcatctcaccacaccacaggttctcactagatgactgtaagtagacacgagcttaatcaacagaagtatcaagccatgtgctttagcataaaagaatatttagaaaaacatcccaagaaaatcacatcactacctagagtcaactctggccaggaactctaaggtacacactttcatttagtaattaaattttagtcagattttgcccaacctaatgctctcagggaaagcctctggcaagtagctttctccttcagaggtctaatttagtagaaaggtcatccaaagaacatctgcactcctgaacacaccctgaagaaatcctgggaattgaccttgtaatcgatttgtctgtcaaggtcctaaagtactggagtgaaataaattcagccaacatgtgactaattggaagaagagcaaagggtggtgacgtgttgatgaggcagatggagatcagaggttactagggtttaggaaacgtgaaaggctgtggcatcagggtaggggagcattctgccgggagggagnattcagccgggaggagcattcagccgggag

SEQ ID NO: 734817 - DNA, 857 bp, Homo sapiens
  misc_feature (857)..(857): n is a, c, g, or t
gctcggtaccccacacgccgaggctccagacagtcaagctttaaagaaagtgtttgctgaaaataaagaaatccagaaattggcagagcagtttgtcctcctcaatctggtttatgaaacaactgacaaacacctttctcctgatggccagtatgtccccaggattatgtttgttgacccatctctgacagttagagccgatatcactggaagatattcaaatcgtctctatgcttacgaacctgcagatacagctctgtgtaagtgtgaccttcaattcggatgttgcccaagagttgaacacctctattgctgtagtgatgggactagaggctgcatggtgagtgcttgacaacatgaagaaagctctcaagttgctgaagactgaattgtaaagaaaaaaaatctccaagcccttctgtctgtcaggccttgagacttgaaaccagaagaagtgtgagaagactggctagtgtggaagcatagtgaacacactgattaggttatggtttaatgttacaacaactattttttaagaaaaacaagttttagaaatttggtttcaagtgtacatgtgtgaaaacaatattgtatactaccatagtgagccatgattttctaaaaaaaaaaataaatgttttgggggtgttctgttttctccaaaaaaaaaaaaacaaccaaaaaaaaaaaaagggcgcggctaaaaatccgggggcccatttcctctccccttttttaagggcccaaaggaattaaaaaggcggcggtaaacggacgggaacccccggcttggggaaccctttcgggcttgggacccccaaagccgaaaatgttgtaccgctcggatcgtaacaagn

SEQ ID NO: 734818 - DNA, 1906 bp, Homo sapiens
gctcggtaccccacacgccgaggctccagacagtcaagctttaaagaaagtgtttgctgaaaataaagaaatccagaaattggcagagcagtttgtcctcctcaatctggtttatgaaacaactgacaaacacctttctcctgatggccagtatgtccccaggattatgtttgttgacccatctctgacagttagagccgatatcactggaagatattcaaatcgtctctatgcttacgaacctgcagatacagctctgttgcttgacaacatgaagaaagctctcaagttgctgaagactgaattgtaaagaaaaaaaatctccaagcccttctgtctgtcaggccttgagacttgaaaccagaagaagtgtgagaagactggctagtgtggaagcatagtgaacacactgattaggttatggtttaatgttacaacaactattttttaagaaaaacaagttttagaaatttggtttcaagtgtacatgtgtgaaaacaatattgtatactaccatagtgagccatgattttctaaaaaaaaaaataaatgttttgggggtgttctgttttctccaacttggtctttcacagtggttcgtttaccaaataggattaaacacacacaaaatgctcaaggaagggacaagacaaaaccaaaactagttcaaatgatgaagaccaaagaccaagttatcatctcaccacaccacaggttctcactagatgactgtaagtagacacgagcttaatcaacagaagtatcaagccatgtgctttagcataaaagaatatttagaaaaacatcccaagaaaatcacatcactacctagagtcaactctggccaggaactctaaggtacacactttcatttagtaattaaattttagtcagattttgcccaacctaatgctctcagggaaagcctctggcaagtagctttctccttcagaggtctaatttagtagaaaggtcatccaaagaacatctgcactcctgaacacaccctgaagaaatcctgggaattgaccttgtaatcgatttgtctgtcaaggtcctaaagtactggagtgaaataaattcagccaacatgtgactaattggaagaagagcaaagggtggtgacgtgttgatgaggcagatggagatcagaggttactagggtttaggaaacgtgaaaggctgtggcatcagggtaggggagcattctgcctaacagaaattagaattgtgtgttaatgtcttcactctatacttaatctcacattcattaatatatggaattcctctactgcccagcccctcctgatttctttggcccctggactatggtgctgtatataatgctttgcagtatctgttgcttgtcttgattaacttttttggataaaaccttttttgaacagaaaaaaaaaaattattaatttttccagggatatattttcaatcttttctatctctcctagtgactactatcattagtaggtgttgagcatatactgctgatttaatgacatacaaatcttcagcaaaaatatcacaggttaatcagctcccttctcacaagtagataacttacatgtgctgaaaaaggtaaaacattccatttaaaaagatctctgagggataacaagaggaaaaagaggtttcccttccataaacaaatattttaaatgacaagttctaagtgattcaagtttctcctatagtatagcaaaatattttttcattgggcggacgtgaaataaggttaacttcttaaaatgtattgaatggcaaaatatcttaacacatacaaatactttttaaatataaataaatatttaggaaatcaaatgttacagctgtaaggaaaataagtcccccttttaaaagcattgaagaaacacaaagcatgagtcattaa

SEQ ID NO: 734819 - DNA, 1253 bp, Homo sapiens
  misc_feature (1223)..(1223): n is a, c, g, or t
gctcggtaccccacacgccgaggctccagacagtcaagctttaaagaaagtgtttgctgaaaataaagaaatccagaaattggcagagcagtttgtcctcctcaatctggtttatgaaacaactgacaaacacctttctcctgatggccagtatgtccccaggattatgtttgttgacccatctctgacagttagagccgatatcactggaagatattcaaatcgtctctatgcttacgaacctgcagatacagctctgttgcttgacaacatgaagaaagctctcaagttgctgaagactgaattgtaaagaaaaaaaatctccaagcccttctgtctgtcaggccttgagacttgaaaccagaagaagtgtgagaagactggctagtgtggaagcatagtgaacacactgattaggttatggtttaatgttacaacaactattttttaagaaaaacaagttttagaaatttggtttcaagtgtacatgtgtgaaaacaatattgtatactaccatagtgagccatgattttctaaaaaaaaaaataaatgttttgggggtgttctgttttctccaacttggtctttcacagtggttcgtttaccaaataggattaaacacacacaaaatgctcaaggaagggacaagacaaaaccaaaactagttcaaatgatgaagaccaaagaccaagttatcatctcaccacaccacaggttctcactagatgactgtaagtagacacgagcttaatcaacagaagtatcaagccatgtgctttagcataaaagaatatttagaaaaacatcccaagaaaatcacatcactacctagagtcaactctggccaggaactctaaggtacacactttcatttagtaattaaattttagtcagattttgcccaacctaatgctctcagggaaagcctctggcaagtagctttctccttcagaggtctaatttagtagaaaggtcatccaaagaacatctgcactcctgaacacaccctgaagaaatcctgggaattgaccttgtaatcgatttgtctgtcaaggtcctaaagtactggagtgaaataaattcagccaacatgtgactaattggaagaagagcaaagggtggtgacgtgttgatgaggcagatggagatcagaggttactagggtttaggaaacgtgaaaggctgtggcatcagggtaggggagcattctgccgggagggagnattcagccgggaggagcattcagccgggag

SEQ ID NO: 734820 - DNA, 772 bp, Homo sapiens
  misc_feature (772)..(772): n is a, c, g, or t
gctcggtaccccacacgccgaggctccagacagtcaagctttaaagaaagtgtttgctgaaaataaagaaatccagaaattggcagagcagtttgtcctcctcaatctggtttatgaaacaactgacaaacacctttctcctgatggccagtatgtccccaggattatgtttgttgacccatctctgacagttagagccgatatcactggaagatattcaaatcgtctctatgcttacgaacctgcagatacagctctgttgcttgacaacatgaagaaagctctcaagttgctgaagactgaattgtaaagaaaaaaaatctccaagcccttctgtctgtcaggccttgagacttgaaaccagaagaagtgtgagaagactggctagtgtggaagcatagtgaacacactgattaggttatggtttaatgttacaacaactattttttaagaaaaacaagttttagaaatttggtttcaagtgtacatgtgtgaaaacaatattgtatactaccatagtgagccatgattttctaaaaaaaaaaataaatgttttgggggtgttctgttttctccaaaaaaaaaaaaacaaccaaaaaaaaaaaaagggcgcggctaaaaatccgggggcccatttcctctccccttttttaagggcccaaaggaattaaaaaggcggcggtaaacggacgggaacccccggcttggggaaccctttcgggcttgggacccccaaagccgaaaatgttgtaccgctcggatcgtaacaagn

SEQ ID NO: 734821 - DNA, 311 bp, Homo sapiens
gctcggtaccccacacgccgaggctccagacagtcaagctttaaagaaagtgtttgctgaaaataaagaaatccagaaattggcagagcagtttgtcctcctcaatctggtttatgaaacaactgacaaacacctttctcctgatggccagtatgtccccaggattatgtttgttgacccatctctgacagttagagccgatatcactggaagatattcaaatcgtctctatgcttacgaacctgcagatacagctctgttgcttgacaacatgaagaaagctcagctctggcaagagctctgccaagggg

SEQ ID NO: 734822 - DNA, 2038 bp, Homo sapiens
tccaggggcaataagagctactccagcccaagcaacaaacccttgatgattattcatcacttggatgagtgcccacacagtcaagctttaaagaaagtgtttgctgaaaataaagaaatccagaaattggcagagcagtttgtcctcctcaatctggtttatgaaacaactgacaaacacctttctcctgatggccagtatgtccccaggattatgtttgttgacccatctctgacagttagagccgatatcactggaagatattcaaatcgtctctatgcttacgaacctgcagatacagctctgtgtaagtgtgaccttcaattcggatgttgcccaagagttgaacacctctattgctgtagtgatgggactagaggctgcatggtgagtgcttgacaacatgaagaaagctctcaagttgctgaagactgaattgtaaagaaaaaaaatctccaagcccttctgtctgtcaggccttgagacttgaaaccagaagaagtgtgagaagactggctagtgtggaagcatagtgaacacactgattaggttatggtttaatgttacaacaactattttttaagaaaaacaagttttagaaatttggtttcaagtgtacatgtgtgaaaacaatattgtatactaccatagtgagccatgattttctaaaaaaaaaaataaatgttttgggggtgttctgttttctccaacttggtctttcacagtggttcgtttaccaaataggattaaacacacacaaaatgctcaaggaagggacaagacaaaaccaaaactagttcaaatgatgaagaccaaagaccaagttatcatctcaccacaccacaggttctcactagatgactgtaagtagacacgagcttaatcaacagaagtatcaagccatgtgctttagcataaaagaatatttagaaaaacatcccaagaaaatcacatcactacctagagtcaactctggccaggaactctaaggtacacactttcatttagtaattaaattttagtcagattttgcccaacctaatgctctcagggaaagcctctggcaagtagctttctccttcagaggtctaatttagtagaaaggtcatccaaagaacatctgcactcctgaacacaccctgaagaaatcctgggaattgaccttgtaatcgatttgtctgtcaaggtcctaaagtactggagtgaaataaattcagccaacatgtgactaattggaagaagagcaaagggtggtgacgtgttgatgaggcagatggagatcagaggttactagggtttaggaaacgtgaaaggctgtggcatcagggtaggggagcattctgcctaacagaaattagaattgtgtgttaatgtcttcactctatacttaatctcacattcattaatatatggaattcctctactgcccagcccctcctgatttctttggcccctggactatggtgctgtatataatgctttgcagtatctgttgcttgtcttgattaacttttttggataaaaccttttttgaacagaaaaaaaaaaattattaatttttccagggatatattttcaatcttttctatctctcctagtgactactatcattagtaggtgttgagcatatactgctgatttaatgacatacaaatcttcagcaaaaatatcacaggttaatcagctcccttctcacaagtagataacttacatgtgctgaaaaaggtaaaacattccatttaaaaagatctctgagggataacaagaggaaaaagaggtttcccttccataaacaaatattttaaatgacaagttctaagtgattcaagtttctcctatagtatagcaaaatattttttcattgggcggacgtgaaataaggttaacttcttaaaatgtattgaatggcaaaatatcttaacacatacaaatactttttaaatataaataaatatttaggaaatcaaatgttacagctgtaaggaaaataagtcccccttttaaaagcattgaagaaacacaaagcatgagtcattaa

SEQ ID NO: 734823 - DNA, 1385 bp, Homo sapiens
  misc_feature (1355)..(1355): n is a, c, g, or t
tccaggggcaataagagctactccagcccaagcaacaaacccttgatgattattcatcacttggatgagtgcccacacagtcaagctttaaagaaagtgtttgctgaaaataaagaaatccagaaattggcagagcagtttgtcctcctcaatctggtttatgaaacaactgacaaacacctttctcctgatggccagtatgtccccaggattatgtttgttgacccatctctgacagttagagccgatatcactggaagatattcaaatcgtctctatgcttacgaacctgcagatacagctctgtgtaagtgtgaccttcaattcggatgttgcccaagagttgaacacctctattgctgtagtgatgggactagaggctgcatggtgagtgcttgacaacatgaagaaagctctcaagttgctgaagactgaattgtaaagaaaaaaaatctccaagcccttctgtctgtcaggccttgagacttgaaaccagaagaagtgtgagaagactggctagtgtggaagcatagtgaacacactgattaggttatggtttaatgttacaacaactattttttaagaaaaacaagttttagaaatttggtttcaagtgtacatgtgtgaaaacaatattgtatactaccatagtgagccatgattttctaaaaaaaaaaataaatgttttgggggtgttctgttttctccaacttggtctttcacagtggttcgtttaccaaataggattaaacacacacaaaatgctcaaggaagggacaagacaaaaccaaaactagttcaaatgatgaagaccaaagaccaagttatcatctcaccacaccacaggttctcactagatgactgtaagtagacacgagcttaatcaacagaagtatcaagccatgtgctttagcataaaagaatatttagaaaaacatcccaagaaaatcacatcactacctagagtcaactctggccaggaactctaaggtacacactttcatttagtaattaaattttagtcagattttgcccaacctaatgctctcagggaaagcctctggcaagtagctttctccttcagaggtctaatttagtagaaaggtcatccaaagaacatctgcactcctgaacacaccctgaagaaatcctgggaattgaccttgtaatcgatttgtctgtcaaggtcctaaagtactggagtgaaataaattcagccaacatgtgactaattggaagaagagcaaagggtggtgacgtgttgatgaggcagatggagatcagaggttactagggtttaggaaacgtgaaaggctgtggcatcagggtaggggagcattctgccgggagggagnattcagccgggaggagcattcagccgggag

SEQ ID NO: 734824 - DNA, 904 bp, Homo sapiens
  misc_feature (904)..(904): n is a, c, g, or t
tccaggggcaataagagctactccagcccaagcaacaaacccttgatgattattcatcacttggatgagtgcccacacagtcaagctttaaagaaagtgtttgctgaaaataaagaaatccagaaattggcagagcagtttgtcctcctcaatctggtttatgaaacaactgacaaacacctttctcctgatggccagtatgtccccaggattatgtttgttgacccatctctgacagttagagccgatatcactggaagatattcaaatcgtctctatgcttacgaacctgcagatacagctctgtgtaagtgtgaccttcaattcggatgttgcccaagagttgaacacctctattgctgtagtgatgggactagaggctgcatggtgagtgcttgacaacatgaagaaagctctcaagttgctgaagactgaattgtaaagaaaaaaaatctccaagcccttctgtctgtcaggccttgagacttgaaaccagaagaagtgtgagaagactggctagtgtggaagcatagtgaacacactgattaggttatggtttaatgttacaacaactattttttaagaaaaacaagttttagaaatttggtttcaagtgtacatgtgtgaaaacaatattgtatactaccatagtgagccatgattttctaaaaaaaaaaataaatgttttgggggtgttctgttttctccaaaaaaaaaaaaacaaccaaaaaaaaaaaaagggcgcggctaaaaatccgggggcccatttcctctccccttttttaagggcccaaaggaattaaaaaggcggcggtaaacggacgggaacccccggcttggggaaccctttcgggcttgggacccccaaagccgaaaatgttgtaccgctcggatcgtaacaagn

SEQ ID NO: 734825 - DNA, 1953 bp, Homo sapiens
tccaggggcaataagagctactccagcccaagcaacaaacccttgatgattattcatcacttggatgagtgcccacacagtcaagctttaaagaaagtgtttgctgaaaataaagaaatccagaaattggcagagcagtttgtcctcctcaatctggtttatgaaacaactgacaaacacctttctcctgatggccagtatgtccccaggattatgtttgttgacccatctctgacagttagagccgatatcactggaagatattcaaatcgtctctatgcttacgaacctgcagatacagctctgttgcttgacaacatgaagaaagctctcaagttgctgaagactgaattgtaaagaaaaaaaatctccaagcccttctgtctgtcaggccttgagacttgaaaccagaagaagtgtgagaagactggctagtgtggaagcatagtgaacacactgattaggttatggtttaatgttacaacaactattttttaagaaaaacaagttttagaaatttggtttcaagtgtacatgtgtgaaaacaatattgtatactaccatagtgagccatgattttctaaaaaaaaaaataaatgttttgggggtgttctgttttctccaacttggtctttcacagtggttcgtttaccaaataggattaaacacacacaaaatgctcaaggaagggacaagacaaaaccaaaactagttcaaatgatgaagaccaaagaccaagttatcatctcaccacaccacaggttctcactagatgactgtaagtagacacgagcttaatcaacagaagtatcaagccatgtgctttagcataaaagaatatttagaaaaacatcccaagaaaatcacatcactacctagagtcaactctggccaggaactctaaggtacacactttcatttagtaattaaattttagtcagattttgcccaacctaatgctctcagggaaagcctctggcaagtagctttctccttcagaggtctaatttagtagaaaggtcatccaaagaacatctgcactcctgaacacaccctgaagaaatcctgggaattgaccttgtaatcgatttgtctgtcaaggtcctaaagtactggagtgaaataaattcagccaacatgtgactaattggaagaagagcaaagggtggtgacgtgttgatgaggcagatggagatcagaggttactagggtttaggaaacgtgaaaggctgtggcatcagggtaggggagcattctgcctaacagaaattagaattgtgtgttaatgtcttcactctatacttaatctcacattcattaatatatggaattcctctactgcccagcccctcctgatttctttggcccctggactatggtgctgtatataatgctttgcagtatctgttgcttgtcttgattaacttttttggataaaaccttttttgaacagaaaaaaaaaaattattaatttttccagggatatattttcaatcttttctatctctcctagtgactactatcattagtaggtgttgagcatatactgctgatttaatgacatacaaatcttcagcaaaaatatcacaggttaatcagctcccttctcacaagtagataacttacatgtgctgaaaaaggtaaaacattccatttaaaaagatctctgagggataacaagaggaaaaagaggtttcccttccataaacaaatattttaaatgacaagttctaagtgattcaagtttctcctatagtatagcaaaatattttttcattgggcggacgtgaaataaggttaacttcttaaaatgtattgaatggcaaaatatcttaacacatacaaatactttttaaatataaataaatatttaggaaatcaaatgttacagctgtaaggaaaataagtcccccttttaaaagcattgaagaaacacaaagcatgagtcattaa

SEQ ID NO: 734826 - DNA, 1300 bp, Homo sapiens
  misc_feature (1270)..(1270): n is a, c, g, or t
tccaggggcaataagagctactccagcccaagcaacaaacccttgatgattattcatcacttggatgagtgcccacacagtcaagctttaaagaaagtgtttgctgaaaataaagaaatccagaaattggcagagcagtttgtcctcctcaatctggtttatgaaacaactgacaaacacctttctcctgatggccagtatgtccccaggattatgtttgttgacccatctctgacagttagagccgatatcactggaagatattcaaatcgtctctatgcttacgaacctgcagatacagctctgttgcttgacaacatgaagaaagctctcaagttgctgaagactgaattgtaaagaaaaaaaatctccaagcccttctgtctgtcaggccttgagacttgaaaccagaagaagtgtgagaagactggctagtgtggaagcatagtgaacacactgattaggttatggtttaatgttacaacaactattttttaagaaaaacaagttttagaaatttggtttcaagtgtacatgtgtgaaaacaatattgtatactaccatagtgagccatgattttctaaaaaaaaaaataaatgttttgggggtgttctgttttctccaacttggtctttcacagtggttcgtttaccaaataggattaaacacacacaaaatgctcaaggaagggacaagacaaaaccaaaactagttcaaatgatgaagaccaaagaccaagttatcatctcaccacaccacaggttctcactagatgactgtaagtagacacgagcttaatcaacagaagtatcaagccatgtgctttagcataaaagaatatttagaaaaacatcccaagaaaatcacatcactacctagagtcaactctggccaggaactctaaggtacacactttcatttagtaattaaattttagtcagattttgcccaacctaatgctctcagggaaagcctctggcaagtagctttctccttcagaggtctaatttagtagaaaggtcatccaaagaacatctgcactcctgaacacaccctgaagaaatcctgggaattgaccttgtaatcgatttgtctgtcaaggtcctaaagtactggagtgaaataaattcagccaacatgtgactaattggaagaagagcaaagggtggtgacgtgttgatgaggcagatggagatcagaggttactagggtttaggaaacgtgaaaggctgtggcatcagggtaggggagcattctgccgggagggagnattcagccgggaggagcattcagccgggag

SEQ ID NO: 734827 - DNA, 819 bp, Homo sapiens
  misc_feature (819)..(819): n is a, c, g, or t
tccaggggcaataagagctactccagcccaagcaacaaacccttgatgattattcatcacttggatgagtgcccacacagtcaagctttaaagaaagtgtttgctgaaaataaagaaatccagaaattggcagagcagtttgtcctcctcaatctggtttatgaaacaactgacaaacacctttctcctgatggccagtatgtccccaggattatgtttgttgacccatctctgacagttagagccgatatcactggaagatattcaaatcgtctctatgcttacgaacctgcagatacagctctgttgcttgacaacatgaagaaagctctcaagttgctgaagactgaattgtaaagaaaaaaaatctccaagcccttctgtctgtcaggccttgagacttgaaaccagaagaagtgtgagaagactggctagtgtggaagcatagtgaacacactgattaggttatggtttaatgttacaacaactattttttaagaaaaacaagttttagaaatttggtttcaagtgtacatgtgtgaaaacaatattgtatactaccatagtgagccatgattttctaaaaaaaaaaataaatgttttgggggtgttctgttttctccaaaaaaaaaaaaacaaccaaaaaaaaaaaaagggcgcggctaaaaatccgggggcccatttcctctccccttttttaagggcccaaaggaattaaaaaggcggcggtaaacggacgggaacccccggcttggggaaccctttcgggcttgggacccccaaagccgaaaatgttgtaccgctcggatcgtaacaagn

SEQ ID NO: 734828 - DNA, 358 bp, Homo sapiens
tccaggggcaataagagctactccagcccaagcaacaaacccttgatgattattcatcacttggatgagtgcccacacagtcaagctttaaagaaagtgtttgctgaaaataaagaaatccagaaattggcagagcagtttgtcctcctcaatctggtttatgaaacaactgacaaacacctttctcctgatggccagtatgtccccaggattatgtttgttgacccatctctgacagttagagccgatatcactggaagatattcaaatcgtctctatgcttacgaacctgcagatacagctctgttgcttgacaacatgaagaaagctcagctctggcaagagctctgccaagggg

SEQ ID NO: 734829 - DNA, 2885 bp, Homo sapiens
  misc_feature (2692)..(2694): n is a, c, g, or t
ggcattgtcaatctgcagaacgatgcgggcattgtccacagtatttgcgaagatctggagggattgtagagagaggttgttccatgaatagaaagccagggatgggtggggtgagtgtgtaaaaagtgttatgtatcctagtgaaaacttcctggtcccaggaatagccagaggctctccctggacacctatcccttttcatctagccccaccccattccctcctttcctggattcccagatcccagcactctgcccctcttgggaagcctcagcaggctggctagctggctggcctgcctgcccagaagtgagtcgctactaacaagtcctcttcctggccctctcctggcattttttccctagtgcacctggtcactctgggccccctacaccctggattggctcctcccaaaggaaggcctcttgtttactcctagatgactcagccttagccacatccgcttaaccctccaatagtccccattccgccagagccggtgtctcctcctctttacaggcctttccttacctccctccatgctgtccacttcctctgtaaagctctcaaccctgtccccttccccctctctcctgggaaagagccctcccatgcctagctgctgctcttagggaccctgtggctaggtgcgcggatggaaatccaggtatgcccaaccccctcccggtggagtaggggttgggtggttatggaatgacggaaagaggcaaaggagtgtataattggagggtcagacaaggctgggagttgaggtccctcctaccccttacctgagccctcaggtcctcgatgatcttgaagtaatggctccagtctctgacctggggtcccttcttctccaagtgctcccggattttgctctccagcctccggttctcggtctccaggctcctcactctttctaggatctccgcctggttcggcccgcctgcctccactcctgcctctaccatgtccatcagggtgacccagaagtcctacaaggtgtccacctctggcccccgggccttcagcagccgctcctacacgagtgggcccggttcccgcatcagctcctcgagcttctcccgagtgggcagcagcaactttcgcggtggcctgggcggcggctatggtggggccagcggcatgggaggcatcaccgcagttacggtcaaccagagcctgctgagcccccttgtcctggaggtggaccccaacatccaggccgtgcgcacccaggagaaggagcagatcaagaccctcaacaacaagtttgcctccttcatagacaaggtacggttcctggagcagcagaacaagatgctggagaccaagtggagcctcctgcagcagcagaagacggctcgaagcaacatggacaacatgttcgagagctacatcaacaaccttaggcggcagctggagactctgggccaggagaagctgaagctggaggcggagcttggcaacatgcaggggctggtggaggacttcaagaacaagtatgaggatgagatcaataagcgtacagagatggagaacgaatttgtcctcatcaagaaggatgtggatgaagcttacatgaacaaggtagagctggagtctcgcctggaagggctgaccgacgagatcaacttcctcaggcagctatatgaagaggagatccgggagctgcagtcccagatctcggacacatctgtggtgctgtccatggacaacagccgctccctggacatggacagcatcattgctgaggtcaaggcacagtacgaggatattgccaaccgcagccgggctgaggctgagagcatgtaccagatcaagtatgaggagctgcagagcctggctgggaagcacggggatgacctgcggcgcacaaagactgagatctctgagatgaaccggaacatcagccggctccaggctgagattgagggcctcaaaggccagagggcttccctggaggccgccattgcagatgccgagcagcgtggagagctggccattaaggatgccaacgccaagttgtccgagctggaggccgccctgcagcgggccaagcaggacatggcgcggcagctgcgtgagtaccaggagctgatgaacgtcaagctggccctggacatcgagatcgccacctacaggaagctgctggagggcgaggagagccggctggagtctgggatgcagaacatgagtattcatacgaagaccaccagcggctatgcaggtggtctgagctcggcctatgggggcctcacaagccccggcctcagctacagcctgggctccagctttggctctggcgcgggctccagctccttcagccgcaccagctcctccagggccgtggttgtgaagaagatcgagacacgtgatgggaagctggtgtctgagtcctctgacgtcctgcccaagtgaacagctgcggcagcccctcccagcctacccctcctgcgctgccccagagcctgggaaggaggccgctatgcagggtagcactgggaacaggagacccacctgaggctcagccctagccctcagcccacctggggagtttactacctggggaccccccttgcccatgcctccagctacaaaacaattcaattgctttttttttttggtccaaaataaaacctcagctagctctgccaacaaaaaacaaaacaaacaaaaaaaaacaaannncgcgggctaaaatcccgggggcagtacgtccccttttggcacgggcctagagggataaaaagacccgggacaacgcggaggaagcggcggcttggcgccttctgggtgacgaaacccagagttcccgcaacgttgtgaccttggtgtatacatcttagcgcggacatactctcacgcactcacctcacatc

SEQ ID NO: 734830 - DNA, 2805 bp, Homo sapiens
  misc_feature (2678)..(2678): n is a, c, g, or t
ggcattgtcaatctgcagaacgatgcgggcattgtccacagtatttgcgaagatctggagggattgtagagagaggttgttccatgaatagaaagccagggatgggtggggtgagtgtgtaaaaagtgttatgtatcctagtgaaaacttcctggtcccaggaatagccagaggctctccctggacacctatcccttttcatctagccccaccccattccctcctttcctggattcccagatcccagcactctgcccctcttgggaagcctcagcaggctggctagctggctggcctgcctgcccagaagtgagtcgctactaacaagtcctcttcctggccctctcctggcattttttccctagtgcacctggtcactctgggccccctacaccctggattggctcctcccaaaggaaggcctcttgtttactcctagatgactcagccttagccacatccgcttaaccctccaatagtccccattccgccagagccggtgtctcctcctctttacaggcctttccttacctccctccatgctgtccacttcctctgtaaagctctcaaccctgtccccttccccctctctcctgggaaagagccctcccatgcctagctgctgctcttagggaccctgtggctaggtgcgcggatggaaatccaggtatgcccaaccccctcccggtggagtaggggttgggtggttatggaatgacggaaagaggcaaaggagtgtataattggagggtcagacaaggctgggagttgaggtccctcctaccccttacctgagccctcaggtcctcgatgatcttgaagtaatggctccagtctctgacctggggtcccttcttctccaagtgctcccggattttgctctccagcctccggttctcggtctccaggctcctcactctttctaggatctccgcctggttcggcccgcctgcctccactcctgcctctaccatgtccatcagggtgacccagaagtcctacaaggtgtccacctctggcccccgggccttcagcagccgctcctacacgagtgggcccggttcccgcatcagctcctcgagcttctcccgagtgggcagcagcaactttcgcggtggcctgggcggcggctatggtggggccagcggcatgggaggcatcaccgcagttacggtcaaccagagcctgctgagcccccttgtcctggaggtggaccccaacatccaggccgtgcgcacccaggagaaggagcagatcaagaccctcaacaacaagtttgcctccttcatagacaaggtacggttcctggagcagcagaacaagatgctggagaccaagtggagcctcctgcagcagcagaagacggctcgaagcaacatggacaacatgttcgagagctacatcaacaaccttaggcggcagctggagactctgggccaggagaagctgaagctggaggcggagcttggcaacatgcaggggctggtggaggacttcaagaacaagtatgaggatgagatcaataagcgtacagagatggagaacgaatttgtcctcatcaagaaggatgtggatgaagcttacatgaacaaggtagagctggagtctcgcctggaagggctgaccgacgagatcaacttcctcaggcagctatatgaagaggagatccgggagctgcagtcccagatctcggacacatctgtggtgctgtccatggacaacagccgctccctggacatggacagcatcattgctgaggtcaaggcacagtacgaggatattgccaaccgcagccgggctgaggctgagagcatgtaccagatcaagtatgaggagctgcagagcctggctgggaagcacggggatgacctgcggcgcacaaagactgagatctctgagatgaaccggaacatcagccggctccaggctgagattgagggcctcaaaggccagagggcttccctggaggccgccattgcagatgccgagcagcgtggagagctggccattaaggatgccaacgccaagttgtccgagctggaggccgccctgcagcgggccaagcaggacatggcgcggcagctgcgtgagtaccaggagctgatgaacgtcaagctggccctggacatcgagatcgccacctacaggaagctgctggagggcgaggagagccggctggagtctgggatgcagaacatgagtattcatacgaagaccaccagcggctatgcaggtggtctgagctcggcctatgggggcctcacaagccccggcctcagctacagcctgggctccagctttggctctggcgcgggctccagctccttcagccgcaccagctcctccagggccgtggttgtgaagaagatcgagacacgtgatgggaagctggtgtctgagtcctctgacgtcctgcccaagtgaacagctgcggcagcccctcccagcctacccctcctgcgctgccccagagcctgggaaggaggccgctatgcagggtagcactgggaacaggagacccacctgaggctcagccctagccctcagcccacctggggagtttactacctggggaccccccttgcccatgcctccagctacaaaacaattcaattgctttttttttttggtccaaaataaaacctcagctagctctgccaaaaaaaaaaaacatacanaaaaaaaagggggggttttttggggggggggaaaaagggttttgaagggaaggggtaagggtttctggacccgttttgttaaagggggaaatgggggccccaagggggggaaaaaggaagggggacg

SEQ ID NO: 734831 - DNA, 3071 bp, Homo sapiens
  misc_feature (2685)..(2685): n is a, c, g, or t
ggcattgtcaatctgcagaacgatgcgggcattgtccacagtatttgcgaagatctggagggattgtagagagaggttgttccatgaatagaaagccagggatgggtggggtgagtgtgtaaaaagtgttatgtatcctagtgaaaacttcctggtcccaggaatagccagaggctctccctggacacctatcccttttcatctagccccaccccattccctcctttcctggattcccagatcccagcactctgcccctcttgggaagcctcagcaggctggctagctggctggcctgcctgcccagaagtgagtcgctactaacaagtcctcttcctggccctctcctggcattttttccctagtgcacctggtcactctgggccccctacaccctggattggctcctcccaaaggaaggcctcttgtttactcctagatgactcagccttagccacatccgcttaaccctccaatagtccccattccgccagagccggtgtctcctcctctttacaggcctttccttacctccctccatgctgtccacttcctctgtaaagctctcaaccctgtccccttccccctctctcctgggaaagagccctcccatgcctagctgctgctcttagggaccctgtggctaggtgcgcggatggaaatccaggtatgcccaaccccctcccggtggagtaggggttgggtggttatggaatgacggaaagaggcaaaggagtgtataattggagggtcagacaaggctgggagttgaggtccctcctaccccttacctgagccctcaggtcctcgatgatcttgaagtaatggctccagtctctgacctggggtcccttcttctccaagtgctcccggattttgctctccagcctccggttctcggtctccaggctcctcactctttctaggatctccgcctggttcggcccgcctgcctccactcctgcctctaccatgtccatcagggtgacccagaagtcctacaaggtgtccacctctggcccccgggccttcagcagccgctcctacacgagtgggcccggttcccgcatcagctcctcgagcttctcccgagtgggcagcagcaactttcgcggtggcctgggcggcggctatggtggggccagcggcatgggaggcatcaccgcagttacggtcaaccagagcctgctgagcccccttgtcctggaggtggaccccaacatccaggccgtgcgcacccaggagaaggagcagatcaagaccctcaacaacaagtttgcctccttcatagacaaggtacggttcctggagcagcagaacaagatgctggagaccaagtggagcctcctgcagcagcagaagacggctcgaagcaacatggacaacatgttcgagagctacatcaacaaccttaggcggcagctggagactctgggccaggagaagctgaagctggaggcggagcttggcaacatgcaggggctggtggaggacttcaagaacaagtatgaggatgagatcaataagcgtacagagatggagaacgaatttgtcctcatcaagaaggatgtggatgaagcttacatgaacaaggtagagctggagtctcgcctggaagggctgaccgacgagatcaacttcctcaggcagctatatgaagaggagatccgggagctgcagtcccagatctcggacacatctgtggtgctgtccatggacaacagccgctccctggacatggacagcatcattgctgaggtcaaggcacagtacgaggatattgccaaccgcagccgggctgaggctgagagcatgtaccagatcaagtatgaggagctgcagagcctggctgggaagcacggggatgacctgcggcgcacaaagactgagatctctgagatgaaccggaacatcagccggctccaggctgagattgagggcctcaaaggccagagggcttccctggaggccgccattgcagatgccgagcagcgtggagagctggccattaaggatgccaacgccaagttgtccgagctggaggccgccctgcagcgggccaagcaggacatggcgcggcagctgcgtgagtaccaggagctgatgaacgtcaagctggccctggacatcgagatcgccacctacaggaagctgctggagggcgaggagagccggctggagtctgggatgcagaacatgagtattcatacgaagaccaccagcggctatgcaggtggtctgagctcggcctatgggggcctcacaagccccggcctcagctacagcctgggctccagctttggctctggcgcgggctccagctccttcagccgcaccagctcctccagggccgtggttgtgaagaagatcgagacacgtgatgggaagctggtgtctgagtcctctgacgtcctgcccaagtgaacagctgcggcagcccctcccagcctacccctcctgcgctgccccagagcctgggaaggaggccgctatgcagggtagcactgggaacaggagacccacctgaggctcagccctagccctcagcccacctggggagtttactacctggggaccccccttgcccatgcctccagctacaaaacaattcaattgctttttttttttggtccaaaataaaacctcagctagctctgccaaaaaaaaaaacaaaaaaaaaaaaanaaatttgggggtctggtggtgtgcgggtggaatggcctgtgagtccctctagctgtccttaacctgcagcccaaattatccacttgtggaggggatcttgggggcatcctggagccccaggagtcccggggaagaaaggctgggagctggagaagaggaggagaagcaatgcccagcctcatagctgcttgcttacacactcacaccccagctgcacctggctcccaaacactcctcgcctacccacgtttcctcacacacactcacacccgaatcatacagaggtgtgctttcaaatgcacacacacatacattcactcagcaaataggtgcagactccccaaaacaaacccagtctctgatcccacatgaagggatcctctaga

SEQ ID NO: 734832 - DNA, 3360 bp, Homo sapiens
  misc_feature (2685)..(2685): n is a, c, g, or t
  misc_feature (2699)..(2699): n is a, c, g, or t
ggcattgtcaatctgcagaacgatgcgggcattgtccacagtatttgcgaagatctggagggattgtagagagaggttgttccatgaatagaaagccagggatgggtggggtgagtgtgtaaaaagtgttatgtatcctagtgaaaacttcctggtcccaggaatagccagaggctctccctggacacctatcccttttcatctagccccaccccattccctcctttcctggattcccagatcccagcactctgcccctcttgggaagcctcagcaggctggctagctggctggcctgcctgcccagaagtgagtcgctactaacaagtcctcttcctggccctctcctggcattttttccctagtgcacctggtcactctgggccccctacaccctggattggctcctcccaaaggaaggcctcttgtttactcctagatgactcagccttagccacatccgcttaaccctccaatagtccccattccgccagagccggtgtctcctcctctttacaggcctttccttacctccctccatgctgtccacttcctctgtaaagctctcaaccctgtccccttccccctctctcctgggaaagagccctcccatgcctagctgctgctcttagggaccctgtggctaggtgcgcggatggaaatccaggtatgcccaaccccctcccggtggagtaggggttgggtggttatggaatgacggaaagaggcaaaggagtgtataattggagggtcagacaaggctgggagttgaggtccctcctaccccttacctgagccctcaggtcctcgatgatcttgaagtaatggctccagtctctgacctggggtcccttcttctccaagtgctcccggattttgctctccagcctccggttctcggtctccaggctcctcactctttctaggatctccgcctggttcggcccgcctgcctccactcctgcctctaccatgtccatcagggtgacccagaagtcctacaaggtgtccacctctggcccccgggccttcagcagccgctcctacacgagtgggcccggttcccgcatcagctcctcgagcttctcccgagtgggcagcagcaactttcgcggtggcctgggcggcggctatggtggggccagcggcatgggaggcatcaccgcagttacggtcaaccagagcctgctgagcccccttgtcctggaggtggaccccaacatccaggccgtgcgcacccaggagaaggagcagatcaagaccctcaacaacaagtttgcctccttcatagacaaggtacggttcctggagcagcagaacaagatgctggagaccaagtggagcctcctgcagcagcagaagacggctcgaagcaacatggacaacatgttcgagagctacatcaacaaccttaggcggcagctggagactctgggccaggagaagctgaagctggaggcggagcttggcaacatgcaggggctggtggaggacttcaagaacaagtatgaggatgagatcaataagcgtacagagatggagaacgaatttgtcctcatcaagaaggatgtggatgaagcttacatgaacaaggtagagctggagtctcgcctggaagggctgaccgacgagatcaacttcctcaggcagctatatgaagaggagatccgggagctgcagtcccagatctcggacacatctgtggtgctgtccatggacaacagccgctccctggacatggacagcatcattgctgaggtcaaggcacagtacgaggatattgccaaccgcagccgggctgaggctgagagcatgtaccagatcaagtatgaggagctgcagagcctggctgggaagcacggggatgacctgcggcgcacaaagactgagatctctgagatgaaccggaacatcagccggctccaggctgagattgagggcctcaaaggccagagggcttccctggaggccgccattgcagatgccgagcagcgtggagagctggccattaaggatgccaacgccaagttgtccgagctggaggccgccctgcagcgggccaagcaggacatggcgcggcagctgcgtgagtaccaggagctgatgaacgtcaagctggccctggacatcgagatcgccacctacaggaagctgctggagggcgaggagagccggctggagtctgggatgcagaacatgagtattcatacgaagaccaccagcggctatgcaggtggtctgagctcggcctatgggggcctcacaagccccggcctcagctacagcctgggctccagctttggctctggcgcgggctccagctccttcagccgcaccagctcctccagggccgtggttgtgaagaagatcgagacacgtgatgggaagctggtgtctgagtcctctgacgtcctgcccaagtgaacagctgcggcagcccctcccagcctacccctcctgcgctgccccagagcctgggaaggaggccgctatgcagggtagcactgggaacaggagacccacctgaggctcagccctagccctcagcccacctggggagtttactacctggggaccccccttgcccatgcctccagctacaaaacaattcaattgctttttttttttggtccaaaataaaacctcagctagctctgccaaaaaaaaaaacaaaaaaaaaaaaanaaaaaaaaaaaaanaaaaaaaaaaaaaaaaaaaaaaaaaaaacaacaagcagccacaagaaaacccaaccaacgagacaaaacaaaaacagcaacaaaaaaaaaagaacagagccgcggcgccggctgcacacatacacatcgcagggcggcgccccagcaccacagcaccccccacgcctatacaggagcggcggcccaccaacccggcccagctcctactaacacggacgcccgggccggccacaccccaccggcacggccgaacaccaaccacccagcaggcaatgtggcggcacccccacccgtggcgcgagtacagatcaggccagcacgaacccacccaatcagcagtaatggcgctacggagtactaaaatataagaggagcgctgcaagaaccacccacaccatctcgtcgggcagccagaacgccccgcgacgaccgcagactacatccatccacgggcggacggccaacagagtccgaggctggcgacgacgtcggacggcccgcggcaccgaggcgtcgacgaaacgacgccggaagacacactgcgagcaggcgaccagactgcagccccacgcccatcatggacacaagcgactcggacgacgcacgccatagatcaggtcccagaccaccttaacccagacggacagcgcggagacaagca

SEQ ID NO: 734833 - DNA, 3261 bp, Homo sapiens
  misc_feature (2685)..(2685): n is a, c, g, or t
  misc_feature (2699)..(2699): n is a, c, g, or t
  misc_feature (3261)..(3261): n is a, c, g, or t
ggcattgtcaatctgcagaacgatgcgggcattgtccacagtatttgcgaagatctggagggattgtagagagaggttgttccatgaatagaaagccagggatgggtggggtgagtgtgtaaaaagtgttatgtatcctagtgaaaacttcctggtcccaggaatagccagaggctctccctggacacctatcccttttcatctagccccaccccattccctcctttcctggattcccagatcccagcactctgcccctcttgggaagcctcagcaggctggctagctggctggcctgcctgcccagaagtgagtcgctactaacaagtcctcttcctggccctctcctggcattttttccctagtgcacctggtcactctgggccccctacaccctggattggctcctcccaaaggaaggcctcttgtttactcctagatgactcagccttagccacatccgcttaaccctccaatagtccccattccgccagagccggtgtctcctcctctttacaggcctttccttacctccctccatgctgtccacttcctctgtaaagctctcaaccctgtccccttccccctctctcctgggaaagagccctcccatgcctagctgctgctcttagggaccctgtggctaggtgcgcggatggaaatccaggtatgcccaaccccctcccggtggagtaggggttgggtggttatggaatgacggaaagaggcaaaggagtgtataattggagggtcagacaaggctgggagttgaggtccctcctaccccttacctgagccctcaggtcctcgatgatcttgaagtaatggctccagtctctgacctggggtcccttcttctccaagtgctcccggattttgctctccagcctccggttctcggtctccaggctcctcactctttctaggatctccgcctggttcggcccgcctgcctccactcctgcctctaccatgtccatcagggtgacccagaagtcctacaaggtgtccacctctggcccccgggccttcagcagccgctcctacacgagtgggcccggttcccgcatcagctcctcgagcttctcccgagtgggcagcagcaactttcgcggtggcctgggcggcggctatggtggggccagcggcatgggaggcatcaccgcagttacggtcaaccagagcctgctgagcccccttgtcctggaggtggaccccaacatccaggccgtgcgcacccaggagaaggagcagatcaagaccctcaacaacaagtttgcctccttcatagacaaggtacggttcctggagcagcagaacaagatgctggagaccaagtggagcctcctgcagcagcagaagacggctcgaagcaacatggacaacatgttcgagagctacatcaacaaccttaggcggcagctggagactctgggccaggagaagctgaagctggaggcggagcttggcaacatgcaggggctggtggaggacttcaagaacaagtatgaggatgagatcaataagcgtacagagatggagaacgaatttgtcctcatcaagaaggatgtggatgaagcttacatgaacaaggtagagctggagtctcgcctggaagggctgaccgacgagatcaacttcctcaggcagctatatgaagaggagatccgggagctgcagtcccagatctcggacacatctgtggtgctgtccatggacaacagccgctccctggacatggacagcatcattgctgaggtcaaggcacagtacgaggatattgccaaccgcagccgggctgaggctgagagcatgtaccagatcaagtatgaggagctgcagagcctggctgggaagcacggggatgacctgcggcgcacaaagactgagatctctgagatgaaccggaacatcagccggctccaggctgagattgagggcctcaaaggccagagggcttccctggaggccgccattgcagatgccgagcagcgtggagagctggccattaaggatgccaacgccaagttgtccgagctggaggccgccctgcagcgggccaagcaggacatggcgcggcagctgcgtgagtaccaggagctgatgaacgtcaagctggccctggacatcgagatcgccacctacaggaagctgctggagggcgaggagagccggctggagtctgggatgcagaacatgagtattcatacgaagaccaccagcggctatgcaggtggtctgagctcggcctatgggggcctcacaagccccggcctcagctacagcctgggctccagctttggctctggcgcgggctccagctccttcagccgcaccagctcctccagggccgtggttgtgaagaagatcgagacacgtgatgggaagctggtgtctgagtcctctgacgtcctgcccaagtgaacagctgcggcagcccctcccagcctacccctcctgcgctgccccagagcctgggaaggaggccgctatgcagggtagcactgggaacaggagacccacctgaggctcagccctagccctcagcccacctggggagtttactacctggggaccccccttgcccatgcctccagctacaaaacaattcaattgctttttttttttggtccaaaataaaacctcagctagctctgccaaaaaaaaaaacaaaaaaaaaaaaanaaaaaaaaaaaaanaaaaaaaaaaaaaaaaaaaaaaaagaggggggcgcgcgcgcgcccaagaaggttccccccgagggggcgcccagatacccgcgcggcccccgggttttggggaacaagggggggccccccaataggaggaggagccgcgccaattataatagcgacagcgggccggtgggcgccggcggcttatcacacaacggcgcaggcgaccgggggggaaaacagcgcggccaccgccgcggcgaaacccctcggggagagagggacaccctataaacccgcgaggcgggagggaacaaatatggtgggagaccaaaacattgcgctctccagaggggaatttataaacgcctctctatcgaggggagagacacattgtatcgcagtttgtttaaacgcgtctgtgtaaattacgggtgggggtcaaaacataagctgtgagagatatgttagctgagtgaggtgcgaaggaaaaaactgttgagaggtatacaataggggatatattagattatgtaagaaaaaaattattttatcaccccaggggacccgctttggaggagtaagn

SEQ ID NO: 734834 - DNA, 2694 bp, Homo sapiens
  misc_feature (2662)..(2662): n is a, c, g, or t
ggcattgtcaatctgcagaacgatgcgggcattgtccacagtatttgcgaagatctggagggattgtagagagaggttgttccatgaatagaaagccagggatgggtggggtgagtgtgtaaaaagtgttatgtatcctagtgaaaacttcctggtcccaggaatagccagaggctctccctggacacctatcccttttcatctagccccaccccattccctcctttcctggattcccagatcccagcactctgcccctcttgggaagcctcagcaggctggctagctggctggcctgcctgcccagaagtgagtcgctactaacaagtcctcttcctggccctctcctggcattttttccctagtgcacctggtcactctgggccccctacaccctggattggctcctcccaaaggaaggcctcttgtttactcctagatgactcagccttagccacatccgcttaaccctccaatagtccccattccgccagagccggtgtctcctcctctttacaggcctttccttacctccctccatgctgtccacttcctctgtaaagctctcaaccctgtccccttccccctctctcctgggaaagagccctcccatgcctagctgctgctcttagggaccctgtggctaggtgcgcggatggaaatccaggtatgcccaaccccctcccggtggagtaggggttgggtggttatggaatgacggaaagaggcaaaggagtgtataattggagggtcagacaaggctgggagttgaggtccctcctaccccttacctgagccctcaggtcctcgatgatcttgaagtaatggctccagtctctgacctggggtcccttcttctccaagtgctcccggattttgctctccagcctccggttctcggtctccaggctcctcactctttctaggatctccgcctggttcggcccgcctgcctccactcctgcctctaccatgtccatcagggtgacccagaagtcctacaaggtgtccacctctggcccccgggccttcagcagccgctcctacacgagtgggcccggttcccgcatcagctcctcgagcttctcccgagtgggcagcagcaactttcgcggtggcctgggcggcggctatggtggggccagcggcatgggaggcatcaccgcagttacggtcaaccagagcctgctgagcccccttgtcctggaggtggaccccaacatccaggccgtgcgcacccaggagaaggagcagatcaagaccctcaacaacaagtttgcctccttcatagacaaggtacggttcctggagcagcagaacaagatgctggagaccaagtggagcctcctgcagcagcagaagacggctcgaagcaacatggacaacatgttcgagagctacatcaacaaccttaggcggcagctggagactctgggccaggagaagctgaagctggaggcggagcttggcaacatgcaggggctggtggaggacttcaagaacaagtatgaggatgagatcaataagcgtacagagatggagaacgaatttgtcctcatcaagaaggatgtggatgaagcttacatgaacaaggtagagctggagtctcgcctggaagggctgaccgacgagatcaacttcctcaggcagctatatgaagaggagatccgggagctgcagtcccagatctcggacacatctgtggtgctgtccatggacaacagccgctccctggacatggacagcatcattgctgaggtcaaggcacagtacgaggatattgccaaccgcagccgggctgaggctgagagcatgtaccagatcaagtatgaggagctgcagagcctggctgggaagcacggggatgacctgcggcgcacaaagactgagatctctgagatgaaccggaacatcagccggctccaggctgagattgagggcctcaaaggccagagggcttccctggaggccgccattgcagatgccgagcagcgtggagagctggccattaaggatgccaacgccaagttgtccgagctggaggccgccctgcagcgggccaagcaggacatggcgcggcagctgcgtgagtaccaggagctgatgaacgtcaagctggccctggacatcgagatcgccacctacaggaagctgctggagggcgaggagagccggctggagtctgggatgcagaacatgagtattcatacgaagaccaccagcggctatgcaggtggtctgagctcggcctatgggggcctcacaagccccggcctcagctacagcctgggctccagctttggctctggcgcgggctccagctccttcagccgcaccagctcctccagggccgtggttgtgaagaagatcgagacacgtgatgggaagctggtgtctgagtcctctgacgtcctgcccaagtgaacagctgcggcagcccctcccagcctacccctcctgcgctgccccagagcctgggaaggaggccgctatgcagggtagcactgggaacaggagacccacctgaggctcagccctagccctcagcccacctggggagtttactacctggggaccccccttgcccatgcctccagctacaaaacaattcaattgctttttttttttggtccaaaataaaacctcagctagctctgccaanggaaaaggcagcagacagaagaaaaagttttg

SEQ ID NO: 734835 - DNA, 3333 bp, Homo sapiens
  misc_feature (2672)..(2672): n is a, c, g, or t
ggcattgtcaatctgcagaacgatgcgggcattgtccacagtatttgcgaagatctggagggattgtagagagaggttgttccatgaatagaaagccagggatgggtggggtgagtgtgtaaaaagtgttatgtatcctagtgaaaacttcctggtcccaggaatagccagaggctctccctggacacctatcccttttcatctagccccaccccattccctcctttcctggattcccagatcccagcactctgcccctcttgggaagcctcagcaggctggctagctggctggcctgcctgcccagaagtgagtcgctactaacaagtcctcttcctggccctctcctggcattttttccctagtgcacctggtcactctgggccccctacaccctggattggctcctcccaaaggaaggcctcttgtttactcctagatgactcagccttagccacatccgcttaaccctccaatagtccccattccgccagagccggtgtctcctcctctttacaggcctttccttacctccctccatgctgtccacttcctctgtaaagctctcaaccctgtccccttccccctctctcctgggaaagagccctcccatgcctagctgctgctcttagggaccctgtggctaggtgcgcggatggaaatccaggtatgcccaaccccctcccggtggagtaggggttgggtggttatggaatgacggaaagaggcaaaggagtgtataattggagggtcagacaaggctgggagttgaggtccctcctaccccttacctgagccctcaggtcctcgatgatcttgaagtaatggctccagtctctgacctggggtcccttcttctccaagtgctcccggattttgctctccagcctccggttctcggtctccaggctcctcactctttctaggatctccgcctggttcggcccgcctgcctccactcctgcctctaccatgtccatcagggtgacccagaagtcctacaaggtgtccacctctggcccccgggccttcagcagccgctcctacacgagtgggcccggttcccgcatcagctcctcgagcttctcccgagtgggcagcagcaactttcgcggtggcctgggcggcggctatggtggggccagcggcatgggaggcatcaccgcagttacggtcaaccagagcctgctgagcccccttgtcctggaggtggaccccaacatccaggccgtgcgcacccaggagaaggagcagatcaagaccctcaacaacaagtttgcctccttcatagacaaggtacggttcctggagcagcagaacaagatgctggagaccaagtggagcctcctgcagcagcagaagacggctcgaagcaacatggacaacatgttcgagagctacatcaacaaccttaggcggcagctggagactctgggccaggagaagctgaagctggaggcggagcttggcaacatgcaggggctggtggaggacttcaagaacaagtatgaggatgagatcaataagcgtacagagatggagaacgaatttgtcctcatcaagaaggatgtggatgaagcttacatgaacaaggtagagctggagtctcgcctggaagggctgaccgacgagatcaacttcctcaggcagctatatgaagaggagatccgggagctgcagtcccagatctcggacacatctgtggtgctgtccatggacaacagccgctccctggacatggacagcatcattgctgaggtcaaggcacagtacgaggatattgccaaccgcagccgggctgaggctgagagcatgtaccagatcaagtatgaggagctgcagagcctggctgggaagcacggggatgacctgcggcgcacaaagactgagatctctgagatgaaccggaacatcagccggctccaggctgagattgagggcctcaaaggccagagggcttccctggaggccgccattgcagatgccgagcagcgtggagagctggccattaaggatgccaacgccaagttgtccgagctggaggccgccctgcagcgggccaagcaggacatggcgcggcagctgcgtgagtaccaggagctgatgaacgtcaagctggccctggacatcgagatcgccacctacaggaagctgctggagggcgaggagagccggctggagtctgggatgcagaacatgagtattcatacgaagaccaccagcggctatgcaggtggtctgagctcggcctatgggggcctcacaagccccggcctcagctacagcctgggctccagctttggctctggcgcgggctccagctccttcagccgcaccagctcctccagggccgtggttgtgaagaagatcgagacacgtgatgggaagctggtgtctgagtcctctgacgtcctgcccaagtgaacagctgcggcagcccctcccagcctacccctcctgcgctgccccagagcctgggaaggaggccgctatgcagggtagcactgggaacaggagacccacctgaggctcagccctagccctcagcccacctggggagtttactacctggggaccccccttgcccatgcctccagctacaaaacaattcaattgctttttttttttggtccaaaataaaacctcagctagctctgccaaaaaaaaaaaanaaaaaaaaaaaaaaaaaaaaaaaaaaaacaacaagcagccacaagaaaacccaaccaacgagacaaaacaaaaacagcaacaaaaaaaaaagaacagagccgcggcgccggctgcacacatacacatcgcagggcggcgccccagcaccacagcaccccccacgcctatacaggagcggcggcccaccaacccggcccagctcctactaacacggacgcccgggccggccacaccccaccggcacggccgaacaccaaccacccagcaggcaatgtggcggcacccccacccgtggcgcgagtacagatcaggccagcacgaacccacccaatcagcagtaatggcgctacggagtactaaaatataagaggagcgctgcaagaaccacccacaccatctcgtcgggcagccagaacgccccgcgacgaccgcagactacatccatccacgggcggacggccaacagagtccgaggctggcgacgacgtcggacggcccgcggcaccgaggcgtcgacgaaacgacgccggaagacacactgcgagcaggcgaccagactgcagccccacgcccatcatggacacaagcgactcggacgacgcacgccatagatcaggtcccagaccaccttaacccagacggacagcgcggagacaagca

SEQ ID NO: 734836 - DNA, 3234 bp, Homo sapiens
  misc_feature (2672)..(2672): n is a, c, g, or t
  misc_feature (3234)..(3234): n is a, c, g, or t
ggcattgtcaatctgcagaacgatgcgggcattgtccacagtatttgcgaagatctggagggattgtagagagaggttgttccatgaatagaaagccagggatgggtggggtgagtgtgtaaaaagtgttatgtatcctagtgaaaacttcctggtcccaggaatagccagaggctctccctggacacctatcccttttcatctagccccaccccattccctcctttcctggattcccagatcccagcactctgcccctcttgggaagcctcagcaggctggctagctggctggcctgcctgcccagaagtgagtcgctactaacaagtcctcttcctggccctctcctggcattttttccctagtgcacctggtcactctgggccccctacaccctggattggctcctcccaaaggaaggcctcttgtttactcctagatgactcagccttagccacatccgcttaaccctccaatagtccccattccgccagagccggtgtctcctcctctttacaggcctttccttacctccctccatgctgtccacttcctctgtaaagctctcaaccctgtccccttccccctctctcctgggaaagagccctcccatgcctagctgctgctcttagggaccctgtggctaggtgcgcggatggaaatccaggtatgcccaaccccctcccggtggagtaggggttgggtggttatggaatgacggaaagaggcaaaggagtgtataattggagggtcagacaaggctgggagttgaggtccctcctaccccttacctgagccctcaggtcctcgatgatcttgaagtaatggctccagtctctgacctggggtcccttcttctccaagtgctcccggattttgctctccagcctccggttctcggtctccaggctcctcactctttctaggatctccgcctggttcggcccgcctgcctccactcctgcctctaccatgtccatcagggtgacccagaagtcctacaaggtgtccacctctggcccccgggccttcagcagccgctcctacacgagtgggcccggttcccgcatcagctcctcgagcttctcccgagtgggcagcagcaactttcgcggtggcctgggcggcggctatggtggggccagcggcatgggaggcatcaccgcagttacggtcaaccagagcctgctgagcccccttgtcctggaggtggaccccaacatccaggccgtgcgcacccaggagaaggagcagatcaagaccctcaacaacaagtttgcctccttcatagacaaggtacggttcctggagcagcagaacaagatgctggagaccaagtggagcctcctgcagcagcagaagacggctcgaagcaacatggacaacatgttcgagagctacatcaacaaccttaggcggcagctggagactctgggccaggagaagctgaagctggaggcggagcttggcaacatgcaggggctggtggaggacttcaagaacaagtatgaggatgagatcaataagcgtacagagatggagaacgaatttgtcctcatcaagaaggatgtggatgaagcttacatgaacaaggtagagctggagtctcgcctggaagggctgaccgacgagatcaacttcctcaggcagctatatgaagaggagatccgggagctgcagtcccagatctcggacacatctgtggtgctgtccatggacaacagccgctccctggacatggacagcatcattgctgaggtcaaggcacagtacgaggatattgccaaccgcagccgggctgaggctgagagcatgtaccagatcaagtatgaggagctgcagagcctggctgggaagcacggggatgacctgcggcgcacaaagactgagatctctgagatgaaccggaacatcagccggctccaggctgagattgagggcctcaaaggccagagggcttccctggaggccgccattgcagatgccgagcagcgtggagagctggccattaaggatgccaacgccaagttgtccgagctggaggccgccctgcagcgggccaagcaggacatggcgcggcagctgcgtgagtaccaggagctgatgaacgtcaagctggccctggacatcgagatcgccacctacaggaagctgctggagggcgaggagagccggctggagtctgggatgcagaacatgagtattcatacgaagaccaccagcggctatgcaggtggtctgagctcggcctatgggggcctcacaagccccggcctcagctacagcctgggctccagctttggctctggcgcgggctccagctccttcagccgcaccagctcctccagggccgtggttgtgaagaagatcgagacacgtgatgggaagctggtgtctgagtcctctgacgtcctgcccaagtgaacagctgcggcagcccctcccagcctacccctcctgcgctgccccagagcctgggaaggaggccgctatgcagggtagcactgggaacaggagacccacctgaggctcagccctagccctcagcccacctggggagtttactacctggggaccccccttgcccatgcctccagctacaaaacaattcaattgctttttttttttggtccaaaataaaacctcagctagctctgccaaaaaaaaaaaanaaaaaaaaaaaaaaaaaaaaaaaagaggggggcgcgcgcgcgcccaagaaggttccccccgagggggcgcccagatacccgcgcggcccccgggttttggggaacaagggggggccccccaataggaggaggagccgcgccaattataatagcgacagcgggccggtgggcgccggcggcttatcacacaacggcgcaggcgaccgggggggaaaacagcgcggccaccgccgcggcgaaacccctcggggagagagggacaccctataaacccgcgaggcgggagggaacaaatatggtgggagaccaaaacattgcgctctccagaggggaatttataaacgcctctctatcgaggggagagacacattgtatcgcagtttgtttaaacgcgtctgtgtaaattacgggtgggggtcaaaacataagctgtgagagatatgttagctgagtgaggtgcgaaggaaaaaactgttgagaggtatacaataggggatatattagattatgtaagaaaaaaattattttatcaccccaggggacccgctttggaggagtaagn

SEQ ID NO: 734837 - DNA, 2817 bp, Homo sapiens
  misc_feature (2673)..(2673): n is a, c, g, or t
  misc_feature (2688)..(2689): n is a, c, g, or t
  misc_feature (2697)..(2697): n is a, c, g, or t
ggcattgtcaatctgcagaacgatgcgggcattgtccacagtatttgcgaagatctggagggattgtagagagaggttgttccatgaatagaaagccagggatgggtggggtgagtgtgtaaaaagtgttatgtatcctagtgaaaacttcctggtcccaggaatagccagaggctctccctggacacctatcccttttcatctagccccaccccattccctcctttcctggattcccagatcccagcactctgcccctcttgggaagcctcagcaggctggctagctggctggcctgcctgcccagaagtgagtcgctactaacaagtcctcttcctggccctctcctggcattttttccctagtgcacctggtcactctgggccccctacaccctggattggctcctcccaaaggaaggcctcttgtttactcctagatgactcagccttagccacatccgcttaaccctccaatagtccccattccgccagagccggtgtctcctcctctttacaggcctttccttacctccctccatgctgtccacttcctctgtaaagctctcaaccctgtccccttccccctctctcctgggaaagagccctcccatgcctagctgctgctcttagggaccctgtggctaggtgcgcggatggaaatccaggtatgcccaaccccctcccggtggagtaggggttgggtggttatggaatgacggaaagaggcaaaggagtgtataattggagggtcagacaaggctgggagttgaggtccctcctaccccttacctgagccctcaggtcctcgatgatcttgaagtaatggctccagtctctgacctggggtcccttcttctccaagtgctcccggattttgctctccagcctccggttctcggtctccaggctcctcactctttctaggatctccgcctggttcggcccgcctgcctccactcctgcctctaccatgtccatcagggtgacccagaagtcctacaaggtgtccacctctggcccccgggccttcagcagccgctcctacacgagtgggcccggttcccgcatcagctcctcgagcttctcccgagtgggcagcagcaactttcgcggtggcctgggcggcggctatggtggggccagcggcatgggaggcatcaccgcagttacggtcaaccagagcctgctgagcccccttgtcctggaggtggaccccaacatccaggccgtgcgcacccaggagaaggagcagatcaagaccctcaacaacaagtttgcctccttcatagacaaggtacggttcctggagcagcagaacaagatgctggagaccaagtggagcctcctgcagcagcagaagacggctcgaagcaacatggacaacatgttcgagagctacatcaacaaccttaggcggcagctggagactctgggccaggagaagctgaagctggaggcggagcttggcaacatgcaggggctggtggaggacttcaagaacaagtatgaggatgagatcaataagcgtacagagatggagaacgaatttgtcctcatcaagaaggatgtggatgaagcttacatgaacaaggtagagctggagtctcgcctggaagggctgaccgacgagatcaacttcctcaggcagctatatgaagaggagatccgggagctgcagtcccagatctcggacacatctgtggtgctgtccatggacaacagccgctccctggacatggacagcatcattgctgaggtcaaggcacagtacgaggatattgccaaccgcagccgggctgaggctgagagcatgtaccagatcaagtatgaggagctgcagagcctggctgggaagcacggggatgacctgcggcgcacaaagactgagatctctgagatgaaccggaacatcagccggctccaggctgagattgagggcctcaaaggccagagggcttccctggaggccgccattgcagatgccgagcagcgtggagagctggccattaaggatgccaacgccaagttgtccgagctggaggccgccctgcagcgggccaagcaggacatggcgcggcagctgcgtgagtaccaggagctgatgaacgtcaagctggccctggacatcgagatcgccacctacaggaagctgctggagggcgaggagagccggctggagtctgggatgcagaacatgagtattcatacgaagaccaccagcggctatgcaggtggtctgagctcggcctatgggggcctcacaagccccggcctcagctacagcctgggctccagctttggctctggcgcgggctccagctccttcagccgcaccagctcctccagggccgtggttgtgaagaagatcgagacacgtgatgggaagctggtgtctgagtcctctgacgtcctgcccaagtgaacagctgcggcagcccctcccagcctacccctcctgcgctgccccagagcctgggaaggaggccgctatgcagggtagcactgggaacaggagacccacctgaggctcagccctagccctcagcccacctggggagtttactacctggggaccccccttgcccatgcctccagctacaaaacaattcaattgctttttttttttggtccaaaataaaacctcagctagctctgccaaaaaaaaaaaaanaaagaaaaacaaaannaaaaaaanaaaaagactattccaaaagaaagaactaggagtgggcccgtaccccaaaataaaaaacctcggggggggccccgtgcccaatttcgcccttatggagagcctttaacattcaaatgggcc

SEQ ID NO: 734838 - DNA, 2928 bp, Homo sapiens
  misc_feature (2673)..(2673): n is a, c, g, or t
  misc_feature (2688)..(2689): n is a, c, g, or t
  misc_feature (2697)..(2697): n is a, c, g, or t
ggcattgtcaatctgcagaacgatgcgggcattgtccacagtatttgcgaagatctggagggattgtagagagaggttgttccatgaatagaaagccagggatgggtggggtgagtgtgtaaaaagtgttatgtatcctagtgaaaacttcctggtcccaggaatagccagaggctctccctggacacctatcccttttcatctagccccaccccattccctcctttcctggattcccagatcccagcactctgcccctcttgggaagcctcagcaggctggctagctggctggcctgcctgcccagaagtgagtcgctactaacaagtcctcttcctggccctctcctggcattttttccctagtgcacctggtcactctgggccccctacaccctggattggctcctcccaaaggaaggcctcttgtttactcctagatgactcagccttagccacatccgcttaaccctccaatagtccccattccgccagagccggtgtctcctcctctttacaggcctttccttacctccctccatgctgtccacttcctctgtaaagctctcaaccctgtccccttccccctctctcctgggaaagagccctcccatgcctagctgctgctcttagggaccctgtggctaggtgcgcggatggaaatccaggtatgcccaaccccctcccggtggagtaggggttgggtggttatggaatgacggaaagaggcaaaggagtgtataattggagggtcagacaaggctgggagttgaggtccctcctaccccttacctgagccctcaggtcctcgatgatcttgaagtaatggctccagtctctgacctggggtcccttcttctccaagtgctcccggattttgctctccagcctccggttctcggtctccaggctcctcactctttctaggatctccgcctggttcggcccgcctgcctccactcctgcctctaccatgtccatcagggtgacccagaagtcctacaaggtgtccacctctggcccccgggccttcagcagccgctcctacacgagtgggcccggttcccgcatcagctcctcgagcttctcccgagtgggcagcagcaactttcgcggtggcctgggcggcggctatggtggggccagcggcatgggaggcatcaccgcagttacggtcaaccagagcctgctgagcccccttgtcctggaggtggaccccaacatccaggccgtgcgcacccaggagaaggagcagatcaagaccctcaacaacaagtttgcctccttcatagacaaggtacggttcctggagcagcagaacaagatgctggagaccaagtggagcctcctgcagcagcagaagacggctcgaagcaacatggacaacatgttcgagagctacatcaacaaccttaggcggcagctggagactctgggccaggagaagctgaagctggaggcggagcttggcaacatgcaggggctggtggaggacttcaagaacaagtatgaggatgagatcaataagcgtacagagatggagaacgaatttgtcctcatcaagaaggatgtggatgaagcttacatgaacaaggtagagctggagtctcgcctggaagggctgaccgacgagatcaacttcctcaggcagctatatgaagaggagatccgggagctgcagtcccagatctcggacacatctgtggtgctgtccatggacaacagccgctccctggacatggacagcatcattgctgaggtcaaggcacagtacgaggatattgccaaccgcagccgggctgaggctgagagcatgtaccagatcaagtatgaggagctgcagagcctggctgggaagcacggggatgacctgcggcgcacaaagactgagatctctgagatgaaccggaacatcagccggctccaggctgagattgagggcctcaaaggccagagggcttccctggaggccgccattgcagatgccgagcagcgtggagagctggccattaaggatgccaacgccaagttgtccgagctggaggccgccctgcagcgggccaagcaggacatggcgcggcagctgcgtgagtaccaggagctgatgaacgtcaagctggccctggacatcgagatcgccacctacaggaagctgctggagggcgaggagagccggctggagtctgggatgcagaacatgagtattcatacgaagaccaccagcggctatgcaggtggtctgagctcggcctatgggggcctcacaagccccggcctcagctacagcctgggctccagctttggctctggcgcgggctccagctccttcagccgcaccagctcctccagggccgtggttgtgaagaagatcgagacacgtgatgggaagctggtgtctgagtcctctgacgtcctgcccaagtgaacagctgcggcagcccctcccagcctacccctcctgcgctgccccagagcctgggaaggaggccgctatgcagggtagcactgggaacaggagacccacctgaggctcagccctagccctcagcccacctggggagtttactacctggggaccccccttgcccatgcctccagctacaaaacaattcaattgctttttttttttggtccaaaataaaacctcagctagctctgccaaaaaaaaaaaaanaaagaaaaacaaaannaaaaaaanaaaaaaaaaaagcaaaaaaaaaaccgcgcagaggatttcatgtgggggggggggaagaaaaagagaggatgaaaagaagagggagccgaggtggtgaccaatatggtggtgtgccgagaccacatttttttgttaaaaagagggggagaaaaagagggggggcctcccattaataggggagggagggattatatttgggagagagccgaggggagagccgggttattaagg

SEQ ID NO: 734839 - DNA, 2627 bp, Homo sapiens
ggcattgtcaatctgcagaacgatgcgggcattgtccacagtatttgcgaagatctggagggattgtagagagaggttgttccatgaatagaaagccagggatgggtggggtgagtgtgtaaaaagtgttatgtatcctagtgaaaacttcctggtcccaggaatagccagaggctctccctggacacctatcccttttcatctagccccaccccattccctcctttcctggattcccagatcccagcactctgcccctcttgggaagcctcagcaggctggctagctggctggcctgcctgcccagaagtgagtcgctactaacaagtcctcttcctggccctctcctggcattttttccctagtgcacctggtcactctgggccccctacaccctggattggctcctcccaaaggaaggcctcttgtttactcctagatgactcagccttagccacatccgcttaaccctccaatagtccccattccgccagagccggtgtctcctcctctttacaggcctttccttacctccctccatgctgtccacttcctctgtaaagctctcaaccctgtccccttccccctctctcctgggaaagagccctcccatgcctagctgctgctcttagggaccctgtggctaggtgcgcggatggaaatccaggtatgcccaaccccctcccggtggagtaggggttgggtggttatggaatgacggaaagaggcaaaggagtgtataattggagggtcagacaaggctgggagttgaggtccctcctaccccttacctgagccctcaggtcctcgatgatcttgaagtaatggctccagtctctgacctggggtcccttcttctccaagtgctcccggattttgctctccagcctccggttctcggtctccaggctcctcactctttctaggatctccgcctggttcggcccgcctgcctccactcctgcctctaccatgtccatcagggtgacccagaagtcctacaaggtgtccacctctggcccccgggccttcagcagccgctcctacacgagtgggcccggttcccgcatcagctcctcgagcttctcccgagtgggcagcagcaactttcgcggtggcctgggcggcggctatggtggggccagcggcatgggaggcatcaccgcagttacggtcaaccagagcctgctgagcccccttgtcctggaggtggaccccaacatccaggccgtgcgcacccaggagaaggagcagatcaagaccctcaacaacaagtttgcctccttcatagacaaggtacggttcctggagcagcagaacaagatgctggagaccaagtggagcctcctgcagcagcagaagacggctcgaagcaacatggacaacatgttcgagagctacatcaacaaccttaggcggcagctggagactctgggccaggagaagctgaagctggaggcggagcttggcaacatgcaggggctggtggaggacttcaagaacaagtatgaggatgagatcaataagcgtacagagatggagaacgaatttgtcctcatcaagaaggatgtggatgaagcttacatgaacaaggtagagctggagtctcgcctggaagggctgaccgacgagatcaacttcctcaggcagctatatgaagaggagatccgggagctgcagtcccagatctcggacacatctgtggtgctgtccatggacaacagccgctccctggacatggacagcatcattgctgaggtcaaggcacagtacgaggatattgccaaccgcagccgggctgaggctgagagcatgtaccagatcaagtatgaggagctgcagagcctggctgggaagcacggggatgacctgcggcgcacaaagactgagatctctgagatgaaccggaacatcagccggctccaggctgagattgagggcctcaaaggccagagggcttccctggaggccgccattgcagatgccgagcagcgtggagagctggccattaaggatgccaacgccaagttgtccgagctggaggccgccctgcagcgggccaagcaggacatggcgcggcagctgcgtgagtaccaggagctgatgaacgtcaagctggccctggacatcgagatcgccacctacaggaagctgctggagggcgaggagagccggctggagtctgggatgcagaacatgagtattcatacgaagaccaccagcggctatgcaggtggtctgagctcggcctatgggggcctcacaagccccggcctcagctacagcctgggctccagctttggctctggcgcgggctccagctccttcagccgcaccagctcctccagggccgtggttgtgaagaagatcgagacacgtgatgggaagctggtgtctgagtcctctgacgtcctgcccaagtgaacagctgcggcagcccctcccagcctacccctcctgcgctgccccagagcctgggaaggaggccgctatgcagggtagcactgggaacaggagacccacctgaggctcagccctagccctcagcccacctggggagtttactacctggggaccccccttgcccatggggccattcaacgcctccgggccattgaacgcctccg

SEQ ID NO: 734840 - DNA, 2615 bp, Homo sapiens
ggcattgtcaatctgcagaacgatgcgggcattgtccacagtatttgcgaagatctggagggattgtagagagaggttgttccatgaatagaaagccagggatgggtggggtgagtgtgtaaaaagtgttatgtatcctagtgaaaacttcctggtcccaggaatagccagaggctctccctggacacctatcccttttcatctagccccaccccattccctcctttcctggattcccagatcccagcactctgcccctcttgggaagcctcagcaggctggctagctggctggcctgcctgcccagaagtgagtcgctactaacaagtcctcttcctggccctctcctggcattttttccctagtgcacctggtcactctgggccccctacaccctggattggctcctcccaaaggaaggcctcttgtttactcctagatgactcagccttagccacatccgcttaaccctccaatagtccccattccgccagagccggtgtctcctcctctttacaggcctttccttacctccctccatgctgtccacttcctctgtaaagctctcaaccctgtccccttccccctctctcctgggaaagagccctcccatgcctagctgctgctcttagggaccctgtggctaggtgcgcggatggaaatccaggtatgcccaaccccctcccggtggagtaggggttgggtggttatggaatgacggaaagaggcaaaggagtgtataattggagggtcagacaaggctgggagttgaggtccctcctaccccttacctgagccctcaggtcctcgatgatcttgaagtaatggctccagtctctgacctggggtcccttcttctccaagtgctcccggattttgctctccagcctccggttctcggtctccaggctcctcactctttctaggatctccgcctggttcggcccgcctgcctccactcctgcctctaccatgtccatcagggtgacccagaagtcctacaaggtgtccacctctggcccccgggccttcagcagccgctcctacacgagtgggcccggttcccgcatcagctcctcgagcttctcccgagtgggcagcagcaactttcgcggtggcctgggcggcggctatggtggggccagcggcatgggaggcatcaccgcagttacggtcaaccagagcctgctgagcccccttgtcctggaggtggaccccaacatccaggccgtgcgcacccaggagaaggagcagatcaagaccctcaacaacaagtttgcctccttcatagacaaggtacggttcctggagcagcagaacaagatgctggagaccaagtggagcctcctgcagcagcagaagacggctcgaagcaacatggacaacatgttcgagagctacatcaacaaccttaggcggcagctggagactctgggccaggagaagctgaagctggaggcggagcttggcaacatgcaggggctggtggaggacttcaagaacaagtatgaggatgagatcaataagcgtacagagatggagaacgaatttgtcctcatcaagaaggatgtggatgaagcttacatgaacaaggtagagctggagtctcgcctggaagggctgaccgacgagatcaacttcctcaggcagctatatgaagaggagatccgggagctgcagtcccagatctcggacacatctgtggtgctgtccatggacaacagccgctccctggacatggacagcatcattgctgaggtcaaggcacagtacgaggatattgccaaccgcagccgggctgaggctgagagcatgtaccagatcaagtatgaggagctgcagagcctggctgggaagcacggggatgacctgcggcgcacaaagactgagatctctgagatgaaccggaacatcagccggctccaggctgagattgagggcctcaaaggccagagggcttccctggaggccgccattgcagatgccgagcagcgtggagagctggccattaaggatgccaacgccaagttgtccgagctggaggccgccctgcagcgggccaagcaggacatggcgcggcagctgcgtgagtaccaggagctgatgaacgtcaagctggccctggacatcgagatcgccacctacaggaagctgctggagggcgaggagagccggctggagtctgggatgcagaacatgagtattcatacgaagaccaccagcggctatgcaggtggtctgagctcggcctatgggggcctcacaagccccggcctcagctacagcctgggctccagctttggctctggcgcgggctccagctccttcagccgcaccagctcctccagggccgtggttgtgaagaagatcgagacacgtgatgggaagctggtgtctgagtcctctgacgtcctgcccaagtgaacagctgcggcagcccctcccagcctacccctcctgcgctgccccagagcctgggaaggaggccgctatgcagggtagcactgggaacaggagacccacctgaggctcagccctagccctcagcccacctggggagtttactacctggggaccccccttgcccatgattgggccaggggggggtaccgagg

SEQ ID NO: 734841 - DNA, 2488 bp, Homo sapiens
  misc_feature (2456)..(2456): n is a, c, g, or t
  misc_feature (2469)..(2469): n is a, c, g, or t
  misc_feature (2473)..(2473): n is a, c, g, or t
  misc_feature (2488)..(2488): n is a, c, g, or t
ggcattgtcaatctgcagaacgatgcgggcattgtccacagtatttgcgaagatctggagggattgtagagagaggttgttccatgaatagaaagccagggatgggtggggtgagtgtgtaaaaagtgttatgtatcctagtgaaaacttcctggtcccaggaatagccagaggctctccctggacacctatcccttttcatctagccccaccccattccctcctttcctggattcccagatcccagcactctgcccctcttgggaagcctcagcaggctggctagctggctggcctgcctgcccagaagtgagtcgctactaacaagtcctcttcctggccctctcctggcattttttccctagtgcacctggtcactctgggccccctacaccctggattggctcctcccaaaggaaggcctcttgtttactcctagatgactcagccttagccacatccgcttaaccctccaatagtccccattccgccagagccggtgtctcctcctctttacaggcctttccttacctccctccatgctgtccacttcctctgtaaagctctcaaccctgtccccttccccctctctcctgggaaagagccctcccatgcctagctgctgctcttagggaccctgtggctaggtgcgcggatggaaatccaggtatgcccaaccccctcccggtggagtaggggttgggtggttatggaatgacggaaagaggcaaaggagtgtataattggagggtcagacaaggctgggagttgaggtccctcctaccccttacctgagccctcaggtcctcgatgatcttgaagtaatggctccagtctctgacctggggtcccttcttctccaagtgctcccggattttgctctccagcctccggttctcggtctccaggctcctcactctttctaggatctccgcctggttcggcccgcctgcctccactcctgcctctaccatgtccatcagggtgacccagaagtcctacaaggtgtccacctctggcccccgggccttcagcagccgctcctacacgagtgggcccggttcccgcatcagctcctcgagcttctcccgagtgggcagcagcaactttcgcggtggcctgggcggcggctatggtggggccagcggcatgggaggcatcaccgcagttacggtcaaccagagcctgctgagcccccttgtcctggaggtggaccccaacatccaggccgtgcgcacccaggagaaggagcagatcaagaccctcaacaacaagtttgcctccttcatagacaaggtacggttcctggagcagcagaacaagatgctggagaccaagtggagcctcctgcagcagcagaagacggctcgaagcaacatggacaacatgttcgagagctacatcaacaaccttaggcggcagctggagactctgggccaggagaagctgaagctggaggcggagcttggcaacatgcaggggctggtggaggacttcaagaacaagtatgaggatgagatcaataagcgtacagagatggagaacgaatttgtcctcatcaagaaggatgtggatgaagcttacatgaacaaggtagagctggagtctcgcctggaagggctgaccgacgagatcaacttcctcaggcagctatatgaagaggagatccgggagctgcagtcccagatctcggacacatctgtggtgctgtccatggacaacagccgctccctggacatggacagcatcattgctgaggtcaaggcacagtacgaggatattgccaaccgcagccgggctgaggctgagagcatgtaccagatcaagtatgaggagctgcagagcctggctgggaagcacggggatgacctgcggcgcacaaagactgagatctctgagatgaaccggaacatcagccggctccaggctgagattgagggcctcaaaggccagagggcttccctggaggccgccattgcagatgccgagcagcgtggagagctggccattaaggatgccaacgccaagttgtccgagctggaggccgccctgcagcgggccaagcaggacatggcgcggcagctgcgtgagtaccaggagctgatgaacgtcaagctggccctggacatcgagatcgccacctacaggaagctgctggagggcgaggagagccggctggagtctgggatgcagaacatgagtattcatacgaagaccaccagcggctatgcaggtggtctgagctcggcctatgggggcctcacaagccccggcctcagctacagcctgggctccagctttggctctggcgcgggctccagctccttcagccgcaccagctcctccagggccgtggttgtgaagaagatcgagacacgtgatgggaagctggtgtctgagtcctctgacgtcctgcccaagtgaacagctgcggcagcccctcccagcctaccccnggggcctccgaanaagnaaaagctcgaattgn

SEQ ID NO: 734842 - DNA, 2912 bp, Homo sapiens
ggcattgtcaatctgcagaacgatgcgggcattgtccacagtatttgcgaagatctggagggattgtagagagaggttgttccatgaatagaaagccagggatgggtggggtgagtgtgtaaaaagtgttatgtatcctagtgaaaacttcctggtcccaggaatagccagaggctctccctggacacctatcccttttcatctagccccaccccattccctcctttcctggattcccagatcccagcactctgcccctcttgggaagcctcagcaggctggctagctggctggcctgcctgcccagaagtgagtcgctactaacaagtcctcttcctggccctctcctggcattttttccctagtgcacctggtcactctgggccccctacaccctggattggctcctcccaaaggaaggcctcttgtttactcctagatgactcagccttagccacatccgcttaaccctccaatagtccccattccgccagagccggtgtctcctcctctttacaggcctttccttacctccctccatgctgtccacttcctctgtaaagctctcaaccctgtccccttccccctctctcctgggaaagagccctcccatgcctagctgctgctcttagggaccctgtggctaggtgcgcggatggaaatccaggtatgcccaaccccctcccggtggagtaggggttgggtggttatggaatgacggaaagaggcaaaggagtgtataattggagggtcagacaaggctgggagttgaggtccctcctaccccttacctgagccctcaggtcctcgatgatcttgaagtaatggctccagtctctgacctggggtcccttcttctccaagtgctcccggattttgctctccagcctccggttctcggtctccaggctcctcactctttctaggatctccgcctggttcggcccgcctgcctccactcctgcctctaccatgtccatcagggtgacccagaagtcctacaaggtgtccacctctggcccccgggccttcagcagccgctcctacacgagtgggcccggttcccgcatcagctcctcgagcttctcccgagtgggcagcagcaactttcgcggtggcctgggcggcggctatggtggggccagcggcatgggaggcatcaccgcagttacggtcaaccagagcctgctgagcccccttgtcctggaggtggaccccaacatccaggccgtgcgcacccaggagaaggagcagatcaagaccctcaacaacaagtttgcctccttcatagacaaggtacggttcctggagcagcagaacaagatgctggagaccaagtggagcctcctgcagcagcagaagacggctcgaagcaacatggacaacatgttcgagagctacatcaacaaccttaggcggcagctggagactctgggccaggagaagctgaagctggaggcggagcttggcaacatgcaggggctggtggaggacttcaagaacaagtatgaggatgagatcaataagcgtacagagatggagaacgaatttgtcctcatcaagaaggatgtggatgaagcttacatgaacaaggtagagctggagtctcgcctggaagggctgaccgacgagatcaacttcctcaggcagctatatgaagaggagatccgggagctgcagtcccagatctcggacacatctgtggtgctgtccatggacaacagccgctccctggacatggacagcatcattgctgaggtcaaggcacagtacgaggatattgccaaccgcagccgggctgaggctgagagcatgtaccagatcaagtatgaggagctgcagagcctggctgggaagcacggggatgacctgcggcgcacaaagactgagatctctgagatgaaccggaacatcagccggctccaggctgagattgagggcctcaaaggccagagggcttccctggaggccgccattgcagatgccgagcagcgtggagagctggccattaaggatgccaacgccaagttgtccgagctggaggccgccctgcagcgggccaagcaggacatggcgcggcagctgcgtgagtaccaggagctgatgaacgtcaagctggccctggacatcgagatcgccacctacaggaagctgctggagggcgaggagagccggctggagtctgggatgcagaacatgagtattcatacgaagaccaccagcggctatgcaggtggtctgagctcggcctatgggggcctcacaagccccggcctcagctacagcctgggctccagctttggctctggcgcgggctccagctccttcagccgcaccagctcctccagggccgtggttgtgaagaagatcgagacacgtgatgggaagctggtgtctgagtcctctgacgtcctgcccaagtcgcctccagggccgtggttgtgaagaagatcgagacacgtgatgggaagctggtgtctgagtcctctgacgtcctgcccaagtgaacagctgcggcagcccctcccagcctacccctcctgcgctgccccagagcctgggaaggaggccgctatgcagggtagcactgggaacaggagacccacctgaggctcagccctagccctcagcccacctggggagtttactacctggggaccccccttgcccatgcctccagctacaaaacaattcaattgctttttttttttggtccaaaataaaacctcagctagctctgccaaaacaaacacaaaacaacacacacaacaaacaacaaaaaacaacaaccacacacacaaacacacacaaccaagagagggggcgcgcgccgccaaaaagagagagaccacccccaggggggcgcacgcaaacacagcagcgaacccccacgctgtggagcacaaaagggg

SEQ ID NO: 734843 - DNA, 2857 bp, Homo sapiens
  misc_feature (2664)..(2666): n is a, c, g, or t
ggcattgtcaatctgcagaacgatgcgggcattgtccacagtatttgcgaagatctggagggattgtagagagaggttgttccatgaatagaaagccagggatgggtggggtgagtgtgtaaaaagtgttatgtatcctagtgaaaacttcctggtcccaggaatagccagaggctctccctggacacctatcccttttcatctagccccaccccattccctcctttcctggattcccagatcccagcactctgcccctcttgggaagcctcagcaggctggctagctggctggcctgcctgcccagaagtgagtcgctactaacaagtcctcttcctggccctctcctggcattttttccctagtgcacctggtcactctgggccccctacaccctggattggctcctcccaaaggaaggcctcttgtttactcctagatgactcagccttagccacatccgcttaaccctccaatagtccccattccgccagagccggtgtctcctcctctttacaggcctttccttacctccctccatgctgtccacttcctctgtaaagctctcaaccctgtccccttccccctctctcctgggaaagagccctcccatgcctagctgctgctcttagggaccctgtggctaggtgcgcggatggaaatccaggtatgcccaaccccctcccggtggagtaggggttgggtggttatggaatgacggaaagaggcaaaggagtgtataattggagggtcagacaaggctgggagttgaggtccctcctaccccttacctgagccctcaggtcctcgatgatcttgaagtaatggctccagtctctgacctggggtcccttcttctccaagtgctcccggattttgctctccagcctccggttctcggtctccaggctcctcactctttctaggatctccgcctggttcggcccgcctgcctccactcctgcctctaccatgtccatcagggtgacccagaagtcctacaaggtgtccacctctggcccccgggccttcagcagccgctcctacacgagtgggcccggttcccgcatcagctcctcgagcttctcccgagtgggcagcagcaactttcgcggtggcctgggcggcggctatggtggggccagcggcatgggaggcatcaccgcagttacggtcaaccagagcctgctgagcccccttgtcctggaggtggaccccaacatccaggccgtgcgcacccaggagaaggagcagatcaagaccctcaacaacaagtttgcctccttcatagacaaggtacggttcctggagcagcagaacaagatgctggagaccaagtggagcctcctgcagcagcagaagacggctcgaagcaacatggacaacatgttcgagagctacatcaacaaccttaggcggcagctggagactctgggccaggagaagctgaagctggaggcggagcttggcaacatgcaggggctggtggaggacttcaagaacaagtatgaggatgagatcaataagcgtacagagatggagaacgaatttgtcctcatcaagaaggatgtggatgaagcttacatgaacaaggtagagctggagtctcgcctggaagggctgaccgacgagatcaacttcctcaggcagctatatgaagaggagatccgggagctgcagtcccagatctcggacacatctgtggtgctgtccatggacaacagccgctccctggacatggacagcatcattgctgaggtcaaggcacagtacgaggatattgccaaccgcagccgggctgaggctgagagcatgtaccagatcaagtatgaggagctgcagagcctggctgggaagcacggggatgacctgcggcgcacaaagactgagatctctgagatgaaccggaacatcagccggctccaggctgagattgagggcctcaaaggccagagggcttccctggaggccgccattgcagatgccgagcagcgtggagagctggccattaaggatgccaacgccaacgggccaagcaggacatggcgcggcagctgcgtgagtaccaggagctgatgaacgtcaagctggccctggacatcgagatcgccacctacaggaagctgctggagggcgaggagagccggctggagtctgggatgcagaacatgagtattcatacgaagaccaccagcggctatgcaggtggtctgagctcggcctatgggggcctcacaagccccggcctcagctacagcctgggctccagctttggctctggcgcgggctccagctccttcagccgcaccagctcctccagggccgtggttgtgaagaagatcgagacacgtgatgggaagctggtgtctgagtcctctgacgtcctgcccaagtgaacagctgcggcagcccctcccagcctacccctcctgcgctgccccagagcctgggaaggaggccgctatgcagggtagcactgggaacaggagacccacctgaggctcagccctagccctcagcccacctggggagtttactacctggggaccccccttgcccatgcctccagctacaaaacaattcaattgctttttttttttggtccaaaataaaacctcagctagctctgccaacaaaaaacaaaacaaacaaaaaaaaacaaannncgcgggctaaaatcccgggggcagtacgtccccttttggcacgggcctagagggataaaaagacccgggacaacgcggaggaagcggcggcttggcgccttctgggtgacgaaacccagagttcccgcaacgttgtgaccttggtgtatacatcttagcgcggacatactctcacgcactcacctcacatc

SEQ ID NO: 734844 - DNA, 2777 bp, Homo sapiens
  misc_feature (2650)..(2650): n is a, c, g, or t
ggcattgtcaatctgcagaacgatgcgggcattgtccacagtatttgcgaagatctggagggattgtagagagaggttgttccatgaatagaaagccagggatgggtggggtgagtgtgtaaaaagtgttatgtatcctagtgaaaacttcctggtcccaggaatagccagaggctctccctggacacctatcccttttcatctagccccaccccattccctcctttcctggattcccagatcccagcactctgcccctcttgggaagcctcagcaggctggctagctggctggcctgcctgcccagaagtgagtcgctactaacaagtcctcttcctggccctctcctggcattttttccctagtgcacctggtcactctgggccccctacaccctggattggctcctcccaaaggaaggcctcttgtttactcctagatgactcagccttagccacatccgcttaaccctccaatagtccccattccgccagagccggtgtctcctcctctttacaggcctttccttacctccctccatgctgtccacttcctctgtaaagctctcaaccctgtccccttccccctctctcctgggaaagagccctcccatgcctagctgctgctcttagggaccctgtggctaggtgcgcggatggaaatccaggtatgcccaaccccctcccggtggagtaggggttgggtggttatggaatgacggaaagaggcaaaggagtgtataattggagggtcagacaaggctgggagttgaggtccctcctaccccttacctgagccctcaggtcctcgatgatcttgaagtaatggctccagtctctgacctggggtcccttcttctccaagtgctcccggattttgctctccagcctccggttctcggtctccaggctcctcactctttctaggatctccgcctggttcggcccgcctgcctccactcctgcctctaccatgtccatcagggtgacccagaagtcctacaaggtgtccacctctggcccccgggccttcagcagccgctcctacacgagtgggcccggttcccgcatcagctcctcgagcttctcccgagtgggcagcagcaactttcgcggtggcctgggcggcggctatggtggggccagcggcatgggaggcatcaccgcagttacggtcaaccagagcctgctgagcccccttgtcctggaggtggaccccaacatccaggccgtgcgcacccaggagaaggagcagatcaagaccctcaacaacaagtttgcctccttcatagacaaggtacggttcctggagcagcagaacaagatgctggagaccaagtggagcctcctgcagcagcagaagacggctcgaagcaacatggacaacatgttcgagagctacatcaacaaccttaggcggcagctggagactctgggccaggagaagctgaagctggaggcggagcttggcaacatgcaggggctggtggaggacttcaagaacaagtatgaggatgagatcaataagcgtacagagatggagaacgaatttgtcctcatcaagaaggatgtggatgaagcttacatgaacaaggtagagctggagtctcgcctggaagggctgaccgacgagatcaacttcctcaggcagctatatgaagaggagatccgggagctgcagtcccagatctcggacacatctgtggtgctgtccatggacaacagccgctccctggacatggacagcatcattgctgaggtcaaggcacagtacgaggatattgccaaccgcagccgggctgaggctgagagcatgtaccagatcaagtatgaggagctgcagagcctggctgggaagcacggggatgacctgcggcgcacaaagactgagatctctgagatgaaccggaacatcagccggctccaggctgagattgagggcctcaaaggccagagggcttccctggaggccgccattgcagatgccgagcagcgtggagagctggccattaaggatgccaacgccaacgggccaagcaggacatggcgcggcagctgcgtgagtaccaggagctgatgaacgtcaagctggccctggacatcgagatcgccacctacaggaagctgctggagggcgaggagagccggctggagtctgggatgcagaacatgagtattcatacgaagaccaccagcggctatgcaggtggtctgagctcggcctatgggggcctcacaagccccggcctcagctacagcctgggctccagctttggctctggcgcgggctccagctccttcagccgcaccagctcctccagggccgtggttgtgaagaagatcgagacacgtgatgggaagctggtgtctgagtcctctgacgtcctgcccaagtgaacagctgcggcagcccctcccagcctacccctcctgcgctgccccagagcctgggaaggaggccgctatgcagggtagcactgggaacaggagacccacctgaggctcagccctagccctcagcccacctggggagtttactacctggggaccccccttgcccatgcctccagctacaaaacaattcaattgctttttttttttggtccaaaataaaacctcagctagctctgccaaaaaaaaaaaacatacanaaaaaaaagggggggttttttggggggggggaaaaagggttttgaagggaaggggtaagggtttctggacccgttttgttaaagggggaaatgggggccccaagggggggaaaaaggaagggggacg

SEQ ID NO: 734845 - DNA, 3043 bp, Homo sapiens
  misc_feature (2657)..(2657): n is a, c, g, or t
ggcattgtcaatctgcagaacgatgcgggcattgtccacagtatttgcgaagatctggagggattgtagagagaggttgttccatgaatagaaagccagggatgggtggggtgagtgtgtaaaaagtgttatgtatcctagtgaaaacttcctggtcccaggaatagccagaggctctccctggacacctatcccttttcatctagccccaccccattccctcctttcctggattcccagatcccagcactctgcccctcttgggaagcctcagcaggctggctagctggctggcctgcctgcccagaagtgagtcgctactaacaagtcctcttcctggccctctcctggcattttttccctagtgcacctggtcactctgggccccctacaccctggattggctcctcccaaaggaaggcctcttgtttactcctagatgactcagccttagccacatccgcttaaccctccaatagtccccattccgccagagccggtgtctcctcctctttacaggcctttccttacctccctccatgctgtccacttcctctgtaaagctctcaaccctgtccccttccccctctctcctgggaaagagccctcccatgcctagctgctgctcttagggaccctgtggctaggtgcgcggatggaaatccaggtatgcccaaccccctcccggtggagtaggggttgggtggttatggaatgacggaaagaggcaaaggagtgtataattggagggtcagacaaggctgggagttgaggtccctcctaccccttacctgagccctcaggtcctcgatgatcttgaagtaatggctccagtctctgacctggggtcccttcttctccaagtgctcccggattttgctctccagcctccggttctcggtctccaggctcctcactctttctaggatctccgcctggttcggcccgcctgcctccactcctgcctctaccatgtccatcagggtgacccagaagtcctacaaggtgtccacctctggcccccgggccttcagcagccgctcctacacgagtgggcccggttcccgcatcagctcctcgagcttctcccgagtgggcagcagcaactttcgcggtggcctgggcggcggctatggtggggccagcggcatgggaggcatcaccgcagttacggtcaaccagagcctgctgagcccccttgtcctggaggtggaccccaacatccaggccgtgcgcacccaggagaaggagcagatcaagaccctcaacaacaagtttgcctccttcatagacaaggtacggttcctggagcagcagaacaagatgctggagaccaagtggagcctcctgcagcagcagaagacggctcgaagcaacatggacaacatgttcgagagctacatcaacaaccttaggcggcagctggagactctgggccaggagaagctgaagctggaggcggagcttggcaacatgcaggggctggtggaggacttcaagaacaagtatgaggatgagatcaataagcgtacagagatggagaacgaatttgtcctcatcaagaaggatgtggatgaagcttacatgaacaaggtagagctggagtctcgcctggaagggctgaccgacgagatcaacttcctcaggcagctatatgaagaggagatccgggagctgcagtcccagatctcggacacatctgtggtgctgtccatggacaacagccgctccctggacatggacagcatcattgctgaggtcaaggcacagtacgaggatattgccaaccgcagccgggctgaggctgagagcatgtaccagatcaagtatgaggagctgcagagcctggctgggaagcacggggatgacctgcggcgcacaaagactgagatctctgagatgaaccggaacatcagccggctccaggctgagattgagggcctcaaaggccagagggcttccctggaggccgccattgcagatgccgagcagcgtggagagctggccattaaggatgccaacgccaacgggccaagcaggacatggcgcggcagctgcgtgagtaccaggagctgatgaacgtcaagctggccctggacatcgagatcgccacctacaggaagctgctggagggcgaggagagccggctggagtctgggatgcagaacatgagtattcatacgaagaccaccagcggctatgcaggtggtctgagctcggcctatgggggcctcacaagccccggcctcagctacagcctgggctccagctttggctctggcgcgggctccagctccttcagccgcaccagctcctccagggccgtggttgtgaagaagatcgagacacgtgatgggaagctggtgtctgagtcctctgacgtcctgcccaagtgaacagctgcggcagcccctcccagcctacccctcctgcgctgccccagagcctgggaaggaggccgctatgcagggtagcactgggaacaggagacccacctgaggctcagccctagccctcagcccacctggggagtttactacctggggaccccccttgcccatgcctccagctacaaaacaattcaattgctttttttttttggtccaaaataaaacctcagctagctctgccaaaaaaaaaaacaaaaaaaaaaaaanaaatttgggggtctggtggtgtgcgggtggaatggcctgtgagtccctctagctgtccttaacctgcagcccaaattatccacttgtggaggggatcttgggggcatcctggagccccaggagtcccggggaagaaaggctgggagctggagaagaggaggagaagcaatgcccagcctcatagctgcttgcttacacactcacaccccagctgcacctggctcccaaacactcctcgcctacccacgtttcctcacacacactcacacccgaatcatacagaggtgtgctttcaaatgcacacacacatacattcactcagcaaataggtgcagactccccaaaacaaacccagtctctgatcccacatgaagggatcctctaga

SEQ ID NO: 734846 - DNA, 3332 bp, Homo sapiens
  misc_feature (2657)..(2657): n is a, c, g, or t
  misc_feature (2671)..(2671): n is a, c, g, or t
ggcattgtcaatctgcagaacgatgcgggcattgtccacagtatttgcgaagatctggagggattgtagagagaggttgttccatgaatagaaagccagggatgggtggggtgagtgtgtaaaaagtgttatgtatcctagtgaaaacttcctggtcccaggaatagccagaggctctccctggacacctatcccttttcatctagccccaccccattccctcctttcctggattcccagatcccagcactctgcccctcttgggaagcctcagcaggctggctagctggctggcctgcctgcccagaagtgagtcgctactaacaagtcctcttcctggccctctcctggcattttttccctagtgcacctggtcactctgggccccctacaccctggattggctcctcccaaaggaaggcctcttgtttactcctagatgactcagccttagccacatccgcttaaccctccaatagtccccattccgccagagccggtgtctcctcctctttacaggcctttccttacctccctccatgctgtccacttcctctgtaaagctctcaaccctgtccccttccccctctctcctgggaaagagccctcccatgcctagctgctgctcttagggaccctgtggctaggtgcgcggatggaaatccaggtatgcccaaccccctcccggtggagtaggggttgggtggttatggaatgacggaaagaggcaaaggagtgtataattggagggtcagacaaggctgggagttgaggtccctcctaccccttacctgagccctcaggtcctcgatgatcttgaagtaatggctccagtctctgacctggggtcccttcttctccaagtgctcccggattttgctctccagcctccggttctcggtctccaggctcctcactctttctaggatctccgcctggttcggcccgcctgcctccactcctgcctctaccatgtccatcagggtgacccagaagtcctacaaggtgtccacctctggcccccgggccttcagcagccgctcctacacgagtgggcccggttcccgcatcagctcctcgagcttctcccgagtgggcagcagcaactttcgcggtggcctgggcggcggctatggtggggccagcggcatgggaggcatcaccgcagttacggtcaaccagagcctgctgagcccccttgtcctggaggtggaccccaacatccaggccgtgcgcacccaggagaaggagcagatcaagaccctcaacaacaagtttgcctccttcatagacaaggtacggttcctggagcagcagaacaagatgctggagaccaagtggagcctcctgcagcagcagaagacggctcgaagcaacatggacaacatgttcgagagctacatcaacaaccttaggcggcagctggagactctgggccaggagaagctgaagctggaggcggagcttggcaacatgcaggggctggtggaggacttcaagaacaagtatgaggatgagatcaataagcgtacagagatggagaacgaatttgtcctcatcaagaaggatgtggatgaagcttacatgaacaaggtagagctggagtctcgcctggaagggctgaccgacgagatcaacttcctcaggcagctatatgaagaggagatccgggagctgcagtcccagatctcggacacatctgtggtgctgtccatggacaacagccgctccctggacatggacagcatcattgctgaggtcaaggcacagtacgaggatattgccaaccgcagccgggctgaggctgagagcatgtaccagatcaagtatgaggagctgcagagcctggctgggaagcacggggatgacctgcggcgcacaaagactgagatctctgagatgaaccggaacatcagccggctccaggctgagattgagggcctcaaaggccagagggcttccctggaggccgccattgcagatgccgagcagcgtggagagctggccattaaggatgccaacgccaacgggccaagcaggacatggcgcggcagctgcgtgagtaccaggagctgatgaacgtcaagctggccctggacatcgagatcgccacctacaggaagctgctggagggcgaggagagccggctggagtctgggatgcagaacatgagtattcatacgaagaccaccagcggctatgcaggtggtctgagctcggcctatgggggcctcacaagccccggcctcagctacagcctgggctccagctttggctctggcgcgggctccagctccttcagccgcaccagctcctccagggccgtggttgtgaagaagatcgagacacgtgatgggaagctggtgtctgagtcctctgacgtcctgcccaagtgaacagctgcggcagcccctcccagcctacccctcctgcgctgccccagagcctgggaaggaggccgctatgcagggtagcactgggaacaggagacccacctgaggctcagccctagccctcagcccacctggggagtttactacctggggaccccccttgcccatgcctccagctacaaaacaattcaattgctttttttttttggtccaaaataaaacctcagctagctctgccaaaaaaaaaaacaaaaaaaaaaaaanaaaaaaaaaaaaanaaaaaaaaaaaaaaaaaaaaaaaaaaaacaacaagcagccacaagaaaacccaaccaacgagacaaaacaaaaacagcaacaaaaaaaaaagaacagagccgcggcgccggctgcacacatacacatcgcagggcggcgccccagcaccacagcaccccccacgcctatacaggagcggcggcccaccaacccggcccagctcctactaacacggacgcccgggccggccacaccccaccggcacggccgaacaccaaccacccagcaggcaatgtggcggcacccccacccgtggcgcgagtacagatcaggccagcacgaacccacccaatcagcagtaatggcgctacggagtactaaaatataagaggagcgctgcaagaaccacccacaccatctcgtcgggcagccagaacgccccgcgacgaccgcagactacatccatccacgggcggacggccaacagagtccgaggctggcgacgacgtcggacggcccgcggcaccgaggcgtcgacgaaacgacgccggaagacacactgcgagcaggcgaccagactgcagccccacgcccatcatggacacaagcgactcggacgacgcacgccatagatcaggtcccagaccaccttaacccagacggacagcgcggagacaagca

SEQ ID NO: 734847 - DNA, 3233 bp, Homo sapiens
  misc_feature (2657)..(2657): n is a, c, g, or t
  misc_feature (2671)..(2671): n is a, c, g, or t
  misc_feature (3233)..(3233): n is a, c, g, or t
ggcattgtcaatctgcagaacgatgcgggcattgtccacagtatttgcgaagatctggagggattgtagagagaggttgttccatgaatagaaagccagggatgggtggggtgagtgtgtaaaaagtgttatgtatcctagtgaaaacttcctggtcccaggaatagccagaggctctccctggacacctatcccttttcatctagccccaccccattccctcctttcctggattcccagatcccagcactctgcccctcttgggaagcctcagcaggctggctagctggctggcctgcctgcccagaagtgagtcgctactaacaagtcctcttcctggccctctcctggcattttttccctagtgcacctggtcactctgggccccctacaccctggattggctcctcccaaaggaaggcctcttgtttactcctagatgactcagccttagccacatccgcttaaccctccaatagtccccattccgccagagccggtgtctcctcctctttacaggcctttccttacctccctccatgctgtccacttcctctgtaaagctctcaaccctgtccccttccccctctctcctgggaaagagccctcccatgcctagctgctgctcttagggaccctgtggctaggtgcgcggatggaaatccaggtatgcccaaccccctcccggtggagtaggggttgggtggttatggaatgacggaaagaggcaaaggagtgtataattggagggtcagacaaggctgggagttgaggtccctcctaccccttacctgagccctcaggtcctcgatgatcttgaagtaatggctccagtctctgacctggggtcccttcttctccaagtgctcccggattttgctctccagcctccggttctcggtctccaggctcctcactctttctaggatctccgcctggttcggcccgcctgcctccactcctgcctctaccatgtccatcagggtgacccagaagtcctacaaggtgtccacctctggcccccgggccttcagcagccgctcctacacgagtgggcccggttcccgcatcagctcctcgagcttctcccgagtgggcagcagcaactttcgcggtggcctgggcggcggctatggtggggccagcggcatgggaggcatcaccgcagttacggtcaaccagagcctgctgagcccccttgtcctggaggtggaccccaacatccaggccgtgcgcacccaggagaaggagcagatcaagaccctcaacaacaagtttgcctccttcatagacaaggtacggttcctggagcagcagaacaagatgctggagaccaagtggagcctcctgcagcagcagaagacggctcgaagcaacatggacaacatgttcgagagctacatcaacaaccttaggcggcagctggagactctgggccaggagaagctgaagctggaggcggagcttggcaacatgcaggggctggtggaggacttcaagaacaagtatgaggatgagatcaataagcgtacagagatggagaacgaatttgtcctcatcaagaaggatgtggatgaagcttacatgaacaaggtagagctggagtctcgcctggaagggctgaccgacgagatcaacttcctcaggcagctatatgaagaggagatccgggagctgcagtcccagatctcggacacatctgtggtgctgtccatggacaacagccgctccctggacatggacagcatcattgctgaggtcaaggcacagtacgaggatattgccaaccgcagccgggctgaggctgagagcatgtaccagatcaagtatgaggagctgcagagcctggctgggaagcacggggatgacctgcggcgcacaaagactgagatctctgagatgaaccggaacatcagccggctccaggctgagattgagggcctcaaaggccagagggcttccctggaggccgccattgcagatgccgagcagcgtggagagctggccattaaggatgccaacgccaacgggccaagcaggacatggcgcggcagctgcgtgagtaccaggagctgatgaacgtcaagctggccctggacatcgagatcgccacctacaggaagctgctggagggcgaggagagccggctggagtctgggatgcagaacatgagtattcatacgaagaccaccagcggctatgcaggtggtctgagctcggcctatgggggcctcacaagccccggcctcagctacagcctgggctccagctttggctctggcgcgggctccagctccttcagccgcaccagctcctccagggccgtggttgtgaagaagatcgagacacgtgatgggaagctggtgtctgagtcctctgacgtcctgcccaagtgaacagctgcggcagcccctcccagcctacccctcctgcgctgccccagagcctgggaaggaggccgctatgcagggtagcactgggaacaggagacccacctgaggctcagccctagccctcagcccacctggggagtttactacctggggaccccccttgcccatgcctccagctacaaaacaattcaattgctttttttttttggtccaaaataaaacctcagctagctctgccaaaaaaaaaaacaaaaaaaaaaaaanaaaaaaaaaaaaanaaaaaaaaaaaaaaaaaaaaaaaagaggggggcgcgcgcgcgcccaagaaggttccccccgagggggcgcccagatacccgcgcggcccccgggttttggggaacaagggggggccccccaataggaggaggagccgcgccaattataatagcgacagcgggccggtgggcgccggcggcttatcacacaacggcgcaggcgaccgggggggaaaacagcgcggccaccgccgcggcgaaacccctcggggagagagggacaccctataaacccgcgaggcgggagggaacaaatatggtgggagaccaaaacattgcgctctccagaggggaatttataaacgcctctctatcgaggggagagacacattgtatcgcagtttgtttaaacgcgtctgtgtaaattacgggtgggggtcaaaacataagctgtgagagatatgttagctgagtgaggtgcgaaggaaaaaactgttgagaggtatacaataggggatatattagattatgtaagaaaaaaattattttatcaccccaggggacccgctttggaggagtaagn

SEQ ID NO: 734848 - DNA, 2666 bp, Homo sapiens
  misc_feature (2634)..(2634): n is a, c, g, or t
ggcattgtcaatctgcagaacgatgcgggcattgtccacagtatttgcgaagatctggagggattgtagagagaggttgttccatgaatagaaagccagggatgggtggggtgagtgtgtaaaaagtgttatgtatcctagtgaaaacttcctggtcccaggaatagccagaggctctccctggacacctatcccttttcatctagccccaccccattccctcctttcctggattcccagatcccagcactctgcccctcttgggaagcctcagcaggctggctagctggctggcctgcctgcccagaagtgagtcgctactaacaagtcctcttcctggccctctcctggcattttttccctagtgcacctggtcactctgggccccctacaccctggattggctcctcccaaaggaaggcctcttgtttactcctagatgactcagccttagccacatccgcttaaccctccaatagtccccattccgccagagccggtgtctcctcctctttacaggcctttccttacctccctccatgctgtccacttcctctgtaaagctctcaaccctgtccccttccccctctctcctgggaaagagccctcccatgcctagctgctgctcttagggaccctgtggctaggtgcgcggatggaaatccaggtatgcccaaccccctcccggtggagtaggggttgggtggttatggaatgacggaaagaggcaaaggagtgtataattggagggtcagacaaggctgggagttgaggtccctcctaccccttacctgagccctcaggtcctcgatgatcttgaagtaatggctccagtctctgacctggggtcccttcttctccaagtgctcccggattttgctctccagcctccggttctcggtctccaggctcctcactctttctaggatctccgcctggttcggcccgcctgcctccactcctgcctctaccatgtccatcagggtgacccagaagtcctacaaggtgtccacctctggcccccgggccttcagcagccgctcctacacgagtgggcccggttcccgcatcagctcctcgagcttctcccgagtgggcagcagcaactttcgcggtggcctgggcggcggctatggtggggccagcggcatgggaggcatcaccgcagttacggtcaaccagagcctgctgagcccccttgtcctggaggtggaccccaacatccaggccgtgcgcacccaggagaaggagcagatcaagaccctcaacaacaagtttgcctccttcatagacaaggtacggttcctggagcagcagaacaagatgctggagaccaagtggagcctcctgcagcagcagaagacggctcgaagcaacatggacaacatgttcgagagctacatcaacaaccttaggcggcagctggagactctgggccaggagaagctgaagctggaggcggagcttggcaacatgcaggggctggtggaggacttcaagaacaagtatgaggatgagatcaataagcgtacagagatggagaacgaatttgtcctcatcaagaaggatgtggatgaagcttacatgaacaaggtagagctggagtctcgcctggaagggctgaccgacgagatcaacttcctcaggcagctatatgaagaggagatccgggagctgcagtcccagatctcggacacatctgtggtgctgtccatggacaacagccgctccctggacatggacagcatcattgctgaggtcaaggcacagtacgaggatattgccaaccgcagccgggctgaggctgagagcatgtaccagatcaagtatgaggagctgcagagcctggctgggaagcacggggatgacctgcggcgcacaaagactgagatctctgagatgaaccggaacatcagccggctccaggctgagattgagggcctcaaaggccagagggcttccctggaggccgccattgcagatgccgagcagcgtggagagctggccattaaggatgccaacgccaacgggccaagcaggacatggcgcggcagctgcgtgagtaccaggagctgatgaacgtcaagctggccctggacatcgagatcgccacctacaggaagctgctggagggcgaggagagccggctggagtctgggatgcagaacatgagtattcatacgaagaccaccagcggctatgcaggtggtctgagctcggcctatgggggcctcacaagccccggcctcagctacagcctgggctccagctttggctctggcgcgggctccagctccttcagccgcaccagctcctccagggccgtggttgtgaagaagatcgagacacgtgatgggaagctggtgtctgagtcctctgacgtcctgcccaagtgaacagctgcggcagcccctcccagcctacccctcctgcgctgccccagagcctgggaaggaggccgctatgcagggtagcactgggaacaggagacccacctgaggctcagccctagccctcagcccacctggggagtttactacctggggaccccccttgcccatgcctccagctacaaaacaattcaattgctttttttttttggtccaaaataaaacctcagctagctctgccaanggaaaaggcagcagacagaagaaaaagttttg

SEQ ID NO: 734849 - DNA, 3305 bp, Homo sapiens
  misc_feature (2644)..(2644): n is a, c, g, or t
ggcattgtcaatctgcagaacgatgcgggcattgtccacagtatttgcgaagatctggagggattgtagagagaggttgttccatgaatagaaagccagggatgggtggggtgagtgtgtaaaaagtgttatgtatcctagtgaaaacttcctggtcccaggaatagccagaggctctccctggacacctatcccttttcatctagccccaccccattccctcctttcctggattcccagatcccagcactctgcccctcttgggaagcctcagcaggctggctagctggctggcctgcctgcccagaagtgagtcgctactaacaagtcctcttcctggccctctcctggcattttttccctagtgcacctggtcactctgggccccctacaccctggattggctcctcccaaaggaaggcctcttgtttactcctagatgactcagccttagccacatccgcttaaccctccaatagtccccattccgccagagccggtgtctcctcctctttacaggcctttccttacctccctccatgctgtccacttcctctgtaaagctctcaaccctgtccccttccccctctctcctgggaaagagccctcccatgcctagctgctgctcttagggaccctgtggctaggtgcgcggatggaaatccaggtatgcccaaccccctcccggtggagtaggggttgggtggttatggaatgacggaaagaggcaaaggagtgtataattggagggtcagacaaggctgggagttgaggtccctcctaccccttacctgagccctcaggtcctcgatgatcttgaagtaatggctccagtctctgacctggggtcccttcttctccaagtgctcccggattttgctctccagcctccggttctcggtctccaggctcctcactctttctaggatctccgcctggttcggcccgcctgcctccactcctgcctctaccatgtccatcagggtgacccagaagtcctacaaggtgtccacctctggcccccgggccttcagcagccgctcctacacgagtgggcccggttcccgcatcagctcctcgagcttctcccgagtgggcagcagcaactttcgcggtggcctgggcggcggctatggtggggccagcggcatgggaggcatcaccgcagttacggtcaaccagagcctgctgagcccccttgtcctggaggtggaccccaacatccaggccgtgcgcacccaggagaaggagcagatcaagaccctcaacaacaagtttgcctccttcatagacaaggtacggttcctggagcagcagaacaagatgctggagaccaagtggagcctcctgcagcagcagaagacggctcgaagcaacatggacaacatgttcgagagctacatcaacaaccttaggcggcagctggagactctgggccaggagaagctgaagctggaggcggagcttggcaacatgcaggggctggtggaggacttcaagaacaagtatgaggatgagatcaataagcgtacagagatggagaacgaatttgtcctcatcaagaaggatgtggatgaagcttacatgaacaaggtagagctggagtctcgcctggaagggctgaccgacgagatcaacttcctcaggcagctatatgaagaggagatccgggagctgcagtcccagatctcggacacatctgtggtgctgtccatggacaacagccgctccctggacatggacagcatcattgctgaggtcaaggcacagtacgaggatattgccaaccgcagccgggctgaggctgagagcatgtaccagatcaagtatgaggagctgcagagcctggctgggaagcacggggatgacctgcggcgcacaaagactgagatctctgagatgaaccggaacatcagccggctccaggctgagattgagggcctcaaaggccagagggcttccctggaggccgccattgcagatgccgagcagcgtggagagctggccattaaggatgccaacgccaacgggccaagcaggacatggcgcggcagctgcgtgagtaccaggagctgatgaacgtcaagctggccctggacatcgagatcgccacctacaggaagctgctggagggcgaggagagccggctggagtctgggatgcagaacatgagtattcatacgaagaccaccagcggctatgcaggtggtctgagctcggcctatgggggcctcacaagccccggcctcagctacagcctgggctccagctttggctctggcgcgggctccagctccttcagccgcaccagctcctccagggccgtggttgtgaagaagatcgagacacgtgatgggaagctggtgtctgagtcctctgacgtcctgcccaagtgaacagctgcggcagcccctcccagcctacccctcctgcgctgccccagagcctgggaaggaggccgctatgcagggtagcactgggaacaggagacccacctgaggctcagccctagccctcagcccacctggggagtttactacctggggaccccccttgcccatgcctccagctacaaaacaattcaattgctttttttttttggtccaaaataaaacctcagctagctctgccaaaaaaaaaaaanaaaaaaaaaaaaaaaaaaaaaaaaaaaacaacaagcagccacaagaaaacccaaccaacgagacaaaacaaaaacagcaacaaaaaaaaaagaacagagccgcggcgccggctgcacacatacacatcgcagggcggcgccccagcaccacagcaccccccacgcctatacaggagcggcggcccaccaacccggcccagctcctactaacacggacgcccgggccggccacaccccaccggcacggccgaacaccaaccacccagcaggcaatgtggcggcacccccacccgtggcgcgagtacagatcaggccagcacgaacccacccaatcagcagtaatggcgctacggagtactaaaatataagaggagcgctgcaagaaccacccacaccatctcgtcgggcagccagaacgccccgcgacgaccgcagactacatccatccacgggcggacggccaacagagtccgaggctggcgacgacgtcggacggcccgcggcaccgaggcgtcgacgaaacgacgccggaagacacactgcgagcaggcgaccagactgcagccccacgcccatcatggacacaagcgactcggacgacgcacgccatagatcaggtcccagaccaccttaacccagacggacagcgcggagacaagca

SEQ ID NO: 734850 - DNA, 3206 bp, Homo sapiens
  misc_feature (2644)..(2644): n is a, c, g, or t
  misc_feature (3206)..(3206): n is a, c, g, or t
ggcattgtcaatctgcagaacgatgcgggcattgtccacagtatttgcgaagatctggagggattgtagagagaggttgttccatgaatagaaagccagggatgggtggggtgagtgtgtaaaaagtgttatgtatcctagtgaaaacttcctggtcccaggaatagccagaggctctccctggacacctatcccttttcatctagccccaccccattccctcctttcctggattcccagatcccagcactctgcccctcttgggaagcctcagcaggctggctagctggctggcctgcctgcccagaagtgagtcgctactaacaagtcctcttcctggccctctcctggcattttttccctagtgcacctggtcactctgggccccctacaccctggattggctcctcccaaaggaaggcctcttgtttactcctagatgactcagccttagccacatccgcttaaccctccaatagtccccattccgccagagccggtgtctcctcctctttacaggcctttccttacctccctccatgctgtccacttcctctgtaaagctctcaaccctgtccccttccccctctctcctgggaaagagccctcccatgcctagctgctgctcttagggaccctgtggctaggtgcgcggatggaaatccaggtatgcccaaccccctcccggtggagtaggggttgggtggttatggaatgacggaaagaggcaaaggagtgtataattggagggtcagacaaggctgggagttgaggtccctcctaccccttacctgagccctcaggtcctcgatgatcttgaagtaatggctccagtctctgacctggggtcccttcttctccaagtgctcccggattttgctctccagcctccggttctcggtctccaggctcctcactctttctaggatctccgcctggttcggcccgcctgcctccactcctgcctctaccatgtccatcagggtgacccagaagtcctacaaggtgtccacctctggcccccgggccttcagcagccgctcctacacgagtgggcccggttcccgcatcagctcctcgagcttctcccgagtgggcagcagcaactttcgcggtggcctgggcggcggctatggtggggccagcggcatgggaggcatcaccgcagttacggtcaaccagagcctgctgagcccccttgtcctggaggtggaccccaacatccaggccgtgcgcacccaggagaaggagcagatcaagaccctcaacaacaagtttgcctccttcatagacaaggtacggttcctggagcagcagaacaagatgctggagaccaagtggagcctcctgcagcagcagaagacggctcgaagcaacatggacaacatgttcgagagctacatcaacaaccttaggcggcagctggagactctgggccaggagaagctgaagctggaggcggagcttggcaacatgcaggggctggtggaggacttcaagaacaagtatgaggatgagatcaataagcgtacagagatggagaacgaatttgtcctcatcaagaaggatgtggatgaagcttacatgaacaaggtagagctggagtctcgcctggaagggctgaccgacgagatcaacttcctcaggcagctatatgaagaggagatccgggagctgcagtcccagatctcggacacatctgtggtgctgtccatggacaacagccgctccctggacatggacagcatcattgctgaggtcaaggcacagtacgaggatattgccaaccgcagccgggctgaggctgagagcatgtaccagatcaagtatgaggagctgcagagcctggctgggaagcacggggatgacctgcggcgcacaaagactgagatctctgagatgaaccggaacatcagccggctccaggctgagattgagggcctcaaaggccagagggcttccctggaggccgccattgcagatgccgagcagcgtggagagctggccattaaggatgccaacgccaacgggccaagcaggacatggcgcggcagctgcgtgagtaccaggagctgatgaacgtcaagctggccctggacatcgagatcgccacctacaggaagctgctggagggcgaggagagccggctggagtctgggatgcagaacatgagtattcatacgaagaccaccagcggctatgcaggtggtctgagctcggcctatgggggcctcacaagccccggcctcagctacagcctgggctccagctttggctctggcgcgggctccagctccttcagccgcaccagctcctccagggccgtggttgtgaagaagatcgagacacgtgatgggaagctggtgtctgagtcctctgacgtcctgcccaagtgaacagctgcggcagcccctcccagcctacccctcctgcgctgccccagagcctgggaaggaggccgctatgcagggtagcactgggaacaggagacccacctgaggctcagccctagccctcagcccacctggggagtttactacctggggaccccccttgcccatgcctccagctacaaaacaattcaattgctttttttttttggtccaaaataaaacctcagctagctctgccaaaaaaaaaaaanaaaaaaaaaaaaaaaaaaaaaaaagaggggggcgcgcgcgcgcccaagaaggttccccccgagggggcgcccagatacccgcgcggcccccgggttttggggaacaagggggggccccccaataggaggaggagccgcgccaattataatagcgacagcgggccggtgggcgccggcggcttatcacacaacggcgcaggcgaccgggggggaaaacagcgcggccaccgccgcggcgaaacccctcggggagagagggacaccctataaacccgcgaggcgggagggaacaaatatggtgggagaccaaaacattgcgctctccagaggggaatttataaacgcctctctatcgaggggagagacacattgtatcgcagtttgtttaaacgcgtctgtgtaaattacgggtgggggtcaaaacataagctgtgagagatatgttagctgagtgaggtgcgaaggaaaaaactgttgagaggtatacaataggggatatattagattatgtaagaaaaaaattattttatcaccccaggggacccgctttggaggagtaagn

SEQ ID NO: 734851 - DNA, 2789 bp, Homo sapiens
  misc_feature (2645)..(2645): n is a, c, g, or t
  misc_feature (2660)..(2661): n is a, c, g, or t
  misc_feature (2669)..(2669): n is a, c, g, or t
ggcattgtcaatctgcagaacgatgcgggcattgtccacagtatttgcgaagatctggagggattgtagagagaggttgttccatgaatagaaagccagggatgggtggggtgagtgtgtaaaaagtgttatgtatcctagtgaaaacttcctggtcccaggaatagccagaggctctccctggacacctatcccttttcatctagccccaccccattccctcctttcctggattcccagatcccagcactctgcccctcttgggaagcctcagcaggctggctagctggctggcctgcctgcccagaagtgagtcgctactaacaagtcctcttcctggccctctcctggcattttttccctagtgcacctggtcactctgggccccctacaccctggattggctcctcccaaaggaaggcctcttgtttactcctagatgactcagccttagccacatccgcttaaccctccaatagtccccattccgccagagccggtgtctcctcctctttacaggcctttccttacctccctccatgctgtccacttcctctgtaaagctctcaaccctgtccccttccccctctctcctgggaaagagccctcccatgcctagctgctgctcttagggaccctgtggctaggtgcgcggatggaaatccaggtatgcccaaccccctcccggtggagtaggggttgggtggttatggaatgacggaaagaggcaaaggagtgtataattggagggtcagacaaggctgggagttgaggtccctcctaccccttacctgagccctcaggtcctcgatgatcttgaagtaatggctccagtctctgacctggggtcccttcttctccaagtgctcccggattttgctctccagcctccggttctcggtctccaggctcctcactctttctaggatctccgcctggttcggcccgcctgcctccactcctgcctctaccatgtccatcagggtgacccagaagtcctacaaggtgtccacctctggcccccgggccttcagcagccgctcctacacgagtgggcccggttcccgcatcagctcctcgagcttctcccgagtgggcagcagcaactttcgcggtggcctgggcggcggctatggtggggccagcggcatgggaggcatcaccgcagttacggtcaaccagagcctgctgagcccccttgtcctggaggtggaccccaacatccaggccgtgcgcacccaggagaaggagcagatcaagaccctcaacaacaagtttgcctccttcatagacaaggtacggttcctggagcagcagaacaagatgctggagaccaagtggagcctcctgcagcagcagaagacggctcgaagcaacatggacaacatgttcgagagctacatcaacaaccttaggcggcagctggagactctgggccaggagaagctgaagctggaggcggagcttggcaacatgcaggggctggtggaggacttcaagaacaagtatgaggatgagatcaataagcgtacagagatggagaacgaatttgtcctcatcaagaaggatgtggatgaagcttacatgaacaaggtagagctggagtctcgcctggaagggctgaccgacgagatcaacttcctcaggcagctatatgaagaggagatccgggagctgcagtcccagatctcggacacatctgtggtgctgtccatggacaacagccgctccctggacatggacagcatcattgctgaggtcaaggcacagtacgaggatattgccaaccgcagccgggctgaggctgagagcatgtaccagatcaagtatgaggagctgcagagcctggctgggaagcacggggatgacctgcggcgcacaaagactgagatctctgagatgaaccggaacatcagccggctccaggctgagattgagggcctcaaaggccagagggcttccctggaggccgccattgcagatgccgagcagcgtggagagctggccattaaggatgccaacgccaacgggccaagcaggacatggcgcggcagctgcgtgagtaccaggagctgatgaacgtcaagctggccctggacatcgagatcgccacctacaggaagctgctggagggcgaggagagccggctggagtctgggatgcagaacatgagtattcatacgaagaccaccagcggctatgcaggtggtctgagctcggcctatgggggcctcacaagccccggcctcagctacagcctgggctccagctttggctctggcgcgggctccagctccttcagccgcaccagctcctccagggccgtggttgtgaagaagatcgagacacgtgatgggaagctggtgtctgagtcctctgacgtcctgcccaagtgaacagctgcggcagcccctcccagcctacccctcctgcgctgccccagagcctgggaaggaggccgctatgcagggtagcactgggaacaggagacccacctgaggctcagccctagccctcagcccacctggggagtttactacctggggaccccccttgcccatgcctccagctacaaaacaattcaattgctttttttttttggtccaaaataaaacctcagctagctctgccaaaaaaaaaaaaanaaagaaaaacaaaannaaaaaaanaaaaagactattccaaaagaaagaactaggagtgggcccgtaccccaaaataaaaaacctcggggggggccccgtgcccaatttcgcccttatggagagcctttaacattcaaatgggcc

SEQ ID NO: 734852 - DNA, 2900 bp, Homo sapiens
  misc_feature (2645)..(2645): n is a, c, g, or t
  misc_feature (2660)..(2661): n is a, c, g, or t
  misc_feature (2669)..(2669): n is a, c, g, or t
ggcattgtcaatctgcagaacgatgcgggcattgtccacagtatttgcgaagatctggagggattgtagagagaggttgttccatgaatagaaagccagggatgggtggggtgagtgtgtaaaaagtgttatgtatcctagtgaaaacttcctggtcccaggaatagccagaggctctccctggacacctatcccttttcatctagccccaccccattccctcctttcctggattcccagatcccagcactctgcccctcttgggaagcctcagcaggctggctagctggctggcctgcctgcccagaagtgagtcgctactaacaagtcctcttcctggccctctcctggcattttttccctagtgcacctggtcactctgggccccctacaccctggattggctcctcccaaaggaaggcctcttgtttactcctagatgactcagccttagccacatccgcttaaccctccaatagtccccattccgccagagccggtgtctcctcctctttacaggcctttccttacctccctccatgctgtccacttcctctgtaaagctctcaaccctgtccccttccccctctctcctgggaaagagccctcccatgcctagctgctgctcttagggaccctgtggctaggtgcgcggatggaaatccaggtatgcccaaccccctcccggtggagtaggggttgggtggttatggaatgacggaaagaggcaaaggagtgtataattggagggtcagacaaggctgggagttgaggtccctcctaccccttacctgagccctcaggtcctcgatgatcttgaagtaatggctccagtctctgacctggggtcccttcttctccaagtgctcccggattttgctctccagcctccggttctcggtctccaggctcctcactctttctaggatctccgcctggttcggcccgcctgcctccactcctgcctctaccatgtccatcagggtgacccagaagtcctacaaggtgtccacctctggcccccgggccttcagcagccgctcctacacgagtgggcccggttcccgcatcagctcctcgagcttctcccgagtgggcagcagcaactttcgcggtggcctgggcggcggctatggtggggccagcggcatgggaggcatcaccgcagttacggtcaaccagagcctgctgagcccccttgtcctggaggtggaccccaacatccaggccgtgcgcacccaggagaaggagcagatcaagaccctcaacaacaagtttgcctccttcatagacaaggtacggttcctggagcagcagaacaagatgctggagaccaagtggagcctcctgcagcagcagaagacggctcgaagcaacatggacaacatgttcgagagctacatcaacaaccttaggcggcagctggagactctgggccaggagaagctgaagctggaggcggagcttggcaacatgcaggggctggtggaggacttcaagaacaagtatgaggatgagatcaataagcgtacagagatggagaacgaatttgtcctcatcaagaaggatgtggatgaagcttacatgaacaaggtagagctggagtctcgcctggaagggctgaccgacgagatcaacttcctcaggcagctatatgaagaggagatccgggagctgcagtcccagatctcggacacatctgtggtgctgtccatggacaacagccgctccctggacatggacagcatcattgctgaggtcaaggcacagtacgaggatattgccaaccgcagccgggctgaggctgagagcatgtaccagatcaagtatgaggagctgcagagcctggctgggaagcacggggatgacctgcggcgcacaaagactgagatctctgagatgaaccggaacatcagccggctccaggctgagattgagggcctcaaaggccagagggcttccctggaggccgccattgcagatgccgagcagcgtggagagctggccattaaggatgccaacgccaacgggccaagcaggacatggcgcggcagctgcgtgagtaccaggagctgatgaacgtcaagctggccctggacatcgagatcgccacctacaggaagctgctggagggcgaggagagccggctggagtctgggatgcagaacatgagtattcatacgaagaccaccagcggctatgcaggtggtctgagctcggcctatgggggcctcacaagccccggcctcagctacagcctgggctccagctttggctctggcgcgggctccagctccttcagccgcaccagctcctccagggccgtggttgtgaagaagatcgagacacgtgatgggaagctggtgtctgagtcctctgacgtcctgcccaagtgaacagctgcggcagcccctcccagcctacccctcctgcgctgccccagagcctgggaaggaggccgctatgcagggtagcactgggaacaggagacccacctgaggctcagccctagccctcagcccacctggggagtttactacctggggaccccccttgcccatgcctccagctacaaaacaattcaattgctttttttttttggtccaaaataaaacctcagctagctctgccaaaaaaaaaaaaanaaagaaaaacaaaannaaaaaaanaaaaaaaaaaagcaaaaaaaaaaccgcgcagaggatttcatgtgggggggggggaagaaaaagagaggatgaaaagaagagggagccgaggtggtgaccaatatggtggtgtgccgagaccacatttttttgttaaaaagagggggagaaaaagagggggggcctcccattaataggggagggagggattatatttgggagagagccgaggggagagccgggttattaagg

SEQ ID NO: 734853 - DNA, 2599 bp, Homo sapiens
ggcattgtcaatctgcagaacgatgcgggcattgtccacagtatttgcgaagatctggagggattgtagagagaggttgttccatgaatagaaagccagggatgggtggggtgagtgtgtaaaaagtgttatgtatcctagtgaaaacttcctggtcccaggaatagccagaggctctccctggacacctatcccttttcatctagccccaccccattccctcctttcctggattcccagatcccagcactctgcccctcttgggaagcctcagcaggctggctagctggctggcctgcctgcccagaagtgagtcgctactaacaagtcctcttcctggccctctcctggcattttttccctagtgcacctggtcactctgggccccctacaccctggattggctcctcccaaaggaaggcctcttgtttactcctagatgactcagccttagccacatccgcttaaccctccaatagtccccattccgccagagccggtgtctcctcctctttacaggcctttccttacctccctccatgctgtccacttcctctgtaaagctctcaaccctgtccccttccccctctctcctgggaaagagccctcccatgcctagctgctgctcttagggaccctgtggctaggtgcgcggatggaaatccaggtatgcccaaccccctcccggtggagtaggggttgggtggttatggaatgacggaaagaggcaaaggagtgtataattggagggtcagacaaggctgggagttgaggtccctcctaccccttacctgagccctcaggtcctcgatgatcttgaagtaatggctccagtctctgacctggggtcccttcttctccaagtgctcccggattttgctctccagcctccggttctcggtctccaggctcctcactctttctaggatctccgcctggttcggcccgcctgcctccactcctgcctctaccatgtccatcagggtgacccagaagtcctacaaggtgtccacctctggcccccgggccttcagcagccgctcctacacgagtgggcccggttcccgcatcagctcctcgagcttctcccgagtgggcagcagcaactttcgcggtggcctgggcggcggctatggtggggccagcggcatgggaggcatcaccgcagttacggtcaaccagagcctgctgagcccccttgtcctggaggtggaccccaacatccaggccgtgcgcacccaggagaaggagcagatcaagaccctcaacaacaagtttgcctccttcatagacaaggtacggttcctggagcagcagaacaagatgctggagaccaagtggagcctcctgcagcagcagaagacggctcgaagcaacatggacaacatgttcgagagctacatcaacaaccttaggcggcagctggagactctgggccaggagaagctgaagctggaggcggagcttggcaacatgcaggggctggtggaggacttcaagaacaagtatgaggatgagatcaataagcgtacagagatggagaacgaatttgtcctcatcaagaaggatgtggatgaagcttacatgaacaaggtagagctggagtctcgcctggaagggctgaccgacgagatcaacttcctcaggcagctatatgaagaggagatccgggagctgcagtcccagatctcggacacatctgtggtgctgtccatggacaacagccgctccctggacatggacagcatcattgctgaggtcaaggcacagtacgaggatattgccaaccgcagccgggctgaggctgagagcatgtaccagatcaagtatgaggagctgcagagcctggctgggaagcacggggatgacctgcggcgcacaaagactgagatctctgagatgaaccggaacatcagccggctccaggctgagattgagggcctcaaaggccagagggcttccctggaggccgccattgcagatgccgagcagcgtggagagctggccattaaggatgccaacgccaacgggccaagcaggacatggcgcggcagctgcgtgagtaccaggagctgatgaacgtcaagctggccctggacatcgagatcgccacctacaggaagctgctggagggcgaggagagccggctggagtctgggatgcagaacatgagtattcatacgaagaccaccagcggctatgcaggtggtctgagctcggcctatgggggcctcacaagccccggcctcagctacagcctgggctccagctttggctctggcgcgggctccagctccttcagccgcaccagctcctccagggccgtggttgtgaagaagatcgagacacgtgatgggaagctggtgtctgagtcctctgacgtcctgcccaagtgaacagctgcggcagcccctcccagcctacccctcctgcgctgccccagagcctgggaaggaggccgctatgcagggtagcactgggaacaggagacccacctgaggctcagccctagccctcagcccacctggggagtttactacctggggaccccccttgcccatggggccattcaacgcctccgggccattgaacgcctccg

SEQ ID NO: 734854 - DNA, 2587 bp, Homo sapiens
ggcattgtcaatctgcagaacgatgcgggcattgtccacagtatttgcgaagatctggagggattgtagagagaggttgttccatgaatagaaagccagggatgggtggggtgagtgtgtaaaaagtgttatgtatcctagtgaaaacttcctggtcccaggaatagccagaggctctccctggacacctatcccttttcatctagccccaccccattccctcctttcctggattcccagatcccagcactctgcccctcttgggaagcctcagcaggctggctagctggctggcctgcctgcccagaagtgagtcgctactaacaagtcctcttcctggccctctcctggcattttttccctagtgcacctggtcactctgggccccctacaccctggattggctcctcccaaaggaaggcctcttgtttactcctagatgactcagccttagccacatccgcttaaccctccaatagtccccattccgccagagccggtgtctcctcctctttacaggcctttccttacctccctccatgctgtccacttcctctgtaaagctctcaaccctgtccccttccccctctctcctgggaaagagccctcccatgcctagctgctgctcttagggaccctgtggctaggtgcgcggatggaaatccaggtatgcccaaccccctcccggtggagtaggggttgggtggttatggaatgacggaaagaggcaaaggagtgtataattggagggtcagacaaggctgggagttgaggtccctcctaccccttacctgagccctcaggtcctcgatgatcttgaagtaatggctccagtctctgacctggggtcccttcttctccaagtgctcccggattttgctctccagcctccggttctcggtctccaggctcctcactctttctaggatctccgcctggttcggcccgcctgcctccactcctgcctctaccatgtccatcagggtgacccagaagtcctacaaggtgtccacctctggcccccgggccttcagcagccgctcctacacgagtgggcccggttcccgcatcagctcctcgagcttctcccgagtgggcagcagcaactttcgcggtggcctgggcggcggctatggtggggccagcggcatgggaggcatcaccgcagttacggtcaaccagagcctgctgagcccccttgtcctggaggtggaccccaacatccaggccgtgcgcacccaggagaaggagcagatcaagaccctcaacaacaagtttgcctccttcatagacaaggtacggttcctggagcagcagaacaagatgctggagaccaagtggagcctcctgcagcagcagaagacggctcgaagcaacatggacaacatgttcgagagctacatcaacaaccttaggcggcagctggagactctgggccaggagaagctgaagctggaggcggagcttggcaacatgcaggggctggtggaggacttcaagaacaagtatgaggatgagatcaataagcgtacagagatggagaacgaatttgtcctcatcaagaaggatgtggatgaagcttacatgaacaaggtagagctggagtctcgcctggaagggctgaccgacgagatcaacttcctcaggcagctatatgaagaggagatccgggagctgcagtcccagatctcggacacatctgtggtgctgtccatggacaacagccgctccctggacatggacagcatcattgctgaggtcaaggcacagtacgaggatattgccaaccgcagccgggctgaggctgagagcatgtaccagatcaagtatgaggagctgcagagcctggctgggaagcacggggatgacctgcggcgcacaaagactgagatctctgagatgaaccggaacatcagccggctccaggctgagattgagggcctcaaaggccagagggcttccctggaggccgccattgcagatgccgagcagcgtggagagctggccattaaggatgccaacgccaacgggccaagcaggacatggcgcggcagctgcgtgagtaccaggagctgatgaacgtcaagctggccctggacatcgagatcgccacctacaggaagctgctggagggcgaggagagccggctggagtctgggatgcagaacatgagtattcatacgaagaccaccagcggctatgcaggtggtctgagctcggcctatgggggcctcacaagccccggcctcagctacagcctgggctccagctttggctctggcgcgggctccagctccttcagccgcaccagctcctccagggccgtggttgtgaagaagatcgagacacgtgatgggaagctggtgtctgagtcctctgacgtcctgcccaagtgaacagctgcggcagcccctcccagcctacccctcctgcgctgccccagagcctgggaaggaggccgctatgcagggtagcactgggaacaggagacccacctgaggctcagccctagccctcagcccacctggggagtttactacctggggaccccccttgcccatgattgggccaggggggggtaccgagg

SEQ ID NO: 734855 - DNA, 2460 bp, Homo sapiens
  misc_feature (2428)..(2428): n is a, c, g, or t
  misc_feature (2441)..(2441): n is a, c, g, or t
  misc_feature (2445)..(2445): n is a, c, g, or t
  misc_feature (2460)..(2460): n is a, c, g, or t
ggcattgtcaatctgcagaacgatgcgggcattgtccacagtatttgcgaagatctggagggattgtagagagaggttgttccatgaatagaaagccagggatgggtggggtgagtgtgtaaaaagtgttatgtatcctagtgaaaacttcctggtcccaggaatagccagaggctctccctggacacctatcccttttcatctagccccaccccattccctcctttcctggattcccagatcccagcactctgcccctcttgggaagcctcagcaggctggctagctggctggcctgcctgcccagaagtgagtcgctactaacaagtcctcttcctggccctctcctggcattttttccctagtgcacctggtcactctgggccccctacaccctggattggctcctcccaaaggaaggcctcttgtttactcctagatgactcagccttagccacatccgcttaaccctccaatagtccccattccgccagagccggtgtctcctcctctttacaggcctttccttacctccctccatgctgtccacttcctctgtaaagctctcaaccctgtccccttccccctctctcctgggaaagagccctcccatgcctagctgctgctcttagggaccctgtggctaggtgcgcggatggaaatccaggtatgcccaaccccctcccggtggagtaggggttgggtggttatggaatgacggaaagaggcaaaggagtgtataattggagggtcagacaaggctgggagttgaggtccctcctaccccttacctgagccctcaggtcctcgatgatcttgaagtaatggctccagtctctgacctggggtcccttcttctccaagtgctcccggattttgctctccagcctccggttctcggtctccaggctcctcactctttctaggatctccgcctggttcggcccgcctgcctccactcctgcctctaccatgtccatcagggtgacccagaagtcctacaaggtgtccacctctggcccccgggccttcagcagccgctcctacacgagtgggcccggttcccgcatcagctcctcgagcttctcccgagtgggcagcagcaactttcgcggtggcctgggcggcggctatggtggggccagcggcatgggaggcatcaccgcagttacggtcaaccagagcctgctgagcccccttgtcctggaggtggaccccaacatccaggccgtgcgcacccaggagaaggagcagatcaagaccctcaacaacaagtttgcctccttcatagacaaggtacggttcctggagcagcagaacaagatgctggagaccaagtggagcctcctgcagcagcagaagacggctcgaagcaacatggacaacatgttcgagagctacatcaacaaccttaggcggcagctggagactctgggccaggagaagctgaagctggaggcggagcttggcaacatgcaggggctggtggaggacttcaagaacaagtatgaggatgagatcaataagcgtacagagatggagaacgaatttgtcctcatcaagaaggatgtggatgaagcttacatgaacaaggtagagctggagtctcgcctggaagggctgaccgacgagatcaacttcctcaggcagctatatgaagaggagatccgggagctgcagtcccagatctcggacacatctgtggtgctgtccatggacaacagccgctccctggacatggacagcatcattgctgaggtcaaggcacagtacgaggatattgccaaccgcagccgggctgaggctgagagcatgtaccagatcaagtatgaggagctgcagagcctggctgggaagcacggggatgacctgcggcgcacaaagactgagatctctgagatgaaccggaacatcagccggctccaggctgagattgagggcctcaaaggccagagggcttccctggaggccgccattgcagatgccgagcagcgtggagagctggccattaaggatgccaacgccaacgggccaagcaggacatggcgcggcagctgcgtgagtaccaggagctgatgaacgtcaagctggccctggacatcgagatcgccacctacaggaagctgctggagggcgaggagagccggctggagtctgggatgcagaacatgagtattcatacgaagaccaccagcggctatgcaggtggtctgagctcggcctatgggggcctcacaagccccggcctcagctacagcctgggctccagctttggctctggcgcgggctccagctccttcagccgcaccagctcctccagggccgtggttgtgaagaagatcgagacacgtgatgggaagctggtgtctgagtcctctgacgtcctgcccaagtgaacagctgcggcagcccctcccagcctaccccnggggcctccgaanaagnaaaagctcgaattgn

SEQ ID NO: 734856 - DNA, 2884 bp, Homo sapiens
ggcattgtcaatctgcagaacgatgcgggcattgtccacagtatttgcgaagatctggagggattgtagagagaggttgttccatgaatagaaagccagggatgggtggggtgagtgtgtaaaaagtgttatgtatcctagtgaaaacttcctggtcccaggaatagccagaggctctccctggacacctatcccttttcatctagccccaccccattccctcctttcctggattcccagatcccagcactctgcccctcttgggaagcctcagcaggctggctagctggctggcctgcctgcccagaagtgagtcgctactaacaagtcctcttcctggccctctcctggcattttttccctagtgcacctggtcactctgggccccctacaccctggattggctcctcccaaaggaaggcctcttgtttactcctagatgactcagccttagccacatccgcttaaccctccaatagtccccattccgccagagccggtgtctcctcctctttacaggcctttccttacctccctccatgctgtccacttcctctgtaaagctctcaaccctgtccccttccccctctctcctgggaaagagccctcccatgcctagctgctgctcttagggaccctgtggctaggtgcgcggatggaaatccaggtatgcccaaccccctcccggtggagtaggggttgggtggttatggaatgacggaaagaggcaaaggagtgtataattggagggtcagacaaggctgggagttgaggtccctcctaccccttacctgagccctcaggtcctcgatgatcttgaagtaatggctccagtctctgacctggggtcccttcttctccaagtgctcccggattttgctctccagcctccggttctcggtctccaggctcctcactctttctaggatctccgcctggttcggcccgcctgcctccactcctgcctctaccatgtccatcagggtgacccagaagtcctacaaggtgtccacctctggcccccgggccttcagcagccgctcctacacgagtgggcccggttcccgcatcagctcctcgagcttctcccgagtgggcagcagcaactttcgcggtggcctgggcggcggctatggtggggccagcggcatgggaggcatcaccgcagttacggtcaaccagagcctgctgagcccccttgtcctggaggtggaccccaacatccaggccgtgcgcacccaggagaaggagcagatcaagaccctcaacaacaagtttgcctccttcatagacaaggtacggttcctggagcagcagaacaagatgctggagaccaagtggagcctcctgcagcagcagaagacggctcgaagcaacatggacaacatgttcgagagctacatcaacaaccttaggcggcagctggagactctgggccaggagaagctgaagctggaggcggagcttggcaacatgcaggggctggtggaggacttcaagaacaagtatgaggatgagatcaataagcgtacagagatggagaacgaatttgtcctcatcaagaaggatgtggatgaagcttacatgaacaaggtagagctggagtctcgcctggaagggctgaccgacgagatcaacttcctcaggcagctatatgaagaggagatccgggagctgcagtcccagatctcggacacatctgtggtgctgtccatggacaacagccgctccctggacatggacagcatcattgctgaggtcaaggcacagtacgaggatattgccaaccgcagccgggctgaggctgagagcatgtaccagatcaagtatgaggagctgcagagcctggctgggaagcacggggatgacctgcggcgcacaaagactgagatctctgagatgaaccggaacatcagccggctccaggctgagattgagggcctcaaaggccagagggcttccctggaggccgccattgcagatgccgagcagcgtggagagctggccattaaggatgccaacgccaacgggccaagcaggacatggcgcggcagctgcgtgagtaccaggagctgatgaacgtcaagctggccctggacatcgagatcgccacctacaggaagctgctggagggcgaggagagccggctggagtctgggatgcagaacatgagtattcatacgaagaccaccagcggctatgcaggtggtctgagctcggcctatgggggcctcacaagccccggcctcagctacagcctgggctccagctttggctctggcgcgggctccagctccttcagccgcaccagctcctccagggccgtggttgtgaagaagatcgagacacgtgatgggaagctggtgtctgagtcctctgacgtcctgcccaagtcgcctccagggccgtggttgtgaagaagatcgagacacgtgatgggaagctggtgtctgagtcctctgacgtcctgcccaagtgaacagctgcggcagcccctcccagcctacccctcctgcgctgccccagagcctgggaaggaggccgctatgcagggtagcactgggaacaggagacccacctgaggctcagccctagccctcagcccacctggggagtttactacctggggaccccccttgcccatgcctccagctacaaaacaattcaattgctttttttttttggtccaaaataaaacctcagctagctctgccaaaacaaacacaaaacaacacacacaacaaacaacaaaaaacaacaaccacacacacaaacacacacaaccaagagagggggcgcgcgccgccaaaaagagagagaccacccccaggggggcgcacgcaaacacagcagcgaacccccacgctgtggagcacaaaagggg

SEQ ID NO: 734857 - DNA, 2774 bp, Homo sapiens
  misc_feature (2581)..(2583): n is a, c, g, or t
ggcattgtcaatctgcagaacgatgcgggcattgtccacagtatttgcgaagatctggagggattgtagagagaggttgttccatgaatagaaagccagggatgggtggggtgagtgtgtaaaaagtgttatgtatcctagtgaaaacttcctggtcccaggaatagccagaggctctccctggacacctatcccttttcatctagccccaccccattccctcctttcctggattcccagatcccagcactctgcccctcttgggaagcctcagcaggctggctagctggctggcctgcctgcccagaagtgagtcgctactaacaagtcctcttcctggccctctcctggcattttttccctagtgcacctggtcactctgggccccctacaccctggattggctcctcccaaaggaaggcctcttgtttactcctagatgactcagccttagccacatccgcttaaccctccaatagtccccattccgccagagccggtgtctcctcctctttacaggcctttccttacctccctccatgctgtccacttcctctgtaaagctctcaaccctgtccccttccccctctctcctgggaaagagccctcccatgcctagctgctgctcttagggaccctgtggctaggtgcgcggatggaaatccaggtatgcccaaccccctcccggtggagtaggggttgggtggttatggaatgacggaaagaggcaaaggagtgtataattggagggtcagacaaggctgggagttgaggtccctcctaccccttacctgagccctcaggtcctcgatgatcttgaagtaatggctccagtctctgacctggggtcccttcttctccaagtgctcccggattttgctctccagcctccggttctcggtctccaggctcctcactctttctaggatctccgcctggttcggcccgcctgcctccactcctgcctctaccatgtccatcagggtgacccagaagtcctacaaggtgtccacctctggcccccgggccttcagcagccgctcctacacgagtgggcccggttcccgcatcagctcctcgagcttctcccgagtgggcagcagcaactttcgcggtggcctgggcggcggctatggtggggccagcggcatgggaggcatcaccgcagttacggtcaaccagagcctgctgagcccccttgtcctggaggtggaccccaacatccaggccgtgcgcacccaggagaaggagcagatcaagaccctcaacaacaagtttgcctccttcatagacaaggtacggttcctggagcagcagaacaagatgctggagaccaagtggagcctcctgcagcagcagaagacggctcgaagcaacatggacaacatgttcgagagctacatcaacaaccttaggcggcagctggagactctgggccaggagaagctgaagctggaggcggagcttggcaacatgcaggggctggtggaggacttcaagaacaagtatgaggatgagatcaataagcgtacagagatggagaacgaatttgtcctcatcaagaaggatgtggatgaagcttacatgaacaaggtagagctggagtctcgcctggaagggctgaccgacgagatcaacttcctcaggcagctatatgaagaggagatccgggagctgcagtcccagatctcggacacatctgtggtgctgtccatggacaacagccgctccctggacatggacagcatcattgctgaggtcaaggcacaaaagactgagatctctgagatgaaccggaacatcagccggctccaggctgagattgagggcctcaaaggccagagggcttccctggaggccgccattgcagatgccgagcagcgtggagagctggccattaaggatgccaacgccaagttgtccgagctggaggccgccctgcagcgggccaagcaggacatggcgcggcagctgcgtgagtaccaggagctgatgaacgtcaagctggccctggacatcgagatcgccacctacaggaagctgctggagggcgaggagagccggctggagtctgggatgcagaacatgagtattcatacgaagaccaccagcggctatgcaggtggtctgagctcggcctatgggggcctcacaagccccggcctcagctacagcctgggctccagctttggctctggcgcgggctccagctccttcagccgcaccagctcctccagggccgtggttgtgaagaagatcgagacacgtgatgggaagctggtgtctgagtcctctgacgtcctgcccaagtgaacagctgcggcagcccctcccagcctacccctcctgcgctgccccagagcctgggaaggaggccgctatgcagggtagcactgggaacaggagacccacctgaggctcagccctagccctcagcccacctggggagtttactacctggggaccccccttgcccatgcctccagctacaaaacaattcaattgctttttttttttggtccaaaataaaacctcagctagctctgccaacaaaaaacaaaacaaacaaaaaaaaacaaannncgcgggctaaaatcccgggggcagtacgtccccttttggcacgggcctagagggataaaaagacccgggacaacgcggaggaagcggcggcttggcgccttctgggtgacgaaacccagagttcccgcaacgttgtgaccttggtgtatacatcttagcgcggacatactctcacgcactcacctcacatc

SEQ ID NO: 734858 - DNA, 2694 bp, Homo sapiens
  misc_feature (2567)..(2567): n is a, c, g, or t
ggcattgtcaatctgcagaacgatgcgggcattgtccacagtatttgcgaagatctggagggattgtagagagaggttgttccatgaatagaaagccagggatgggtggggtgagtgtgtaaaaagtgttatgtatcctagtgaaaacttcctggtcccaggaatagccagaggctctccctggacacctatcccttttcatctagccccaccccattccctcctttcctggattcccagatcccagcactctgcccctcttgggaagcctcagcaggctggctagctggctggcctgcctgcccagaagtgagtcgctactaacaagtcctcttcctggccctctcctggcattttttccctagtgcacctggtcactctgggccccctacaccctggattggctcctcccaaaggaaggcctcttgtttactcctagatgactcagccttagccacatccgcttaaccctccaatagtccccattccgccagagccggtgtctcctcctctttacaggcctttccttacctccctccatgctgtccacttcctctgtaaagctctcaaccctgtccccttccccctctctcctgggaaagagccctcccatgcctagctgctgctcttagggaccctgtggctaggtgcgcggatggaaatccaggtatgcccaaccccctcccggtggagtaggggttgggtggttatggaatgacggaaagaggcaaaggagtgtataattggagggtcagacaaggctgggagttgaggtccctcctaccccttacctgagccctcaggtcctcgatgatcttgaagtaatggctccagtctctgacctggggtcccttcttctccaagtgctcccggattttgctctccagcctccggttctcggtctccaggctcctcactctttctaggatctccgcctggttcggcccgcctgcctccactcctgcctctaccatgtccatcagggtgacccagaagtcctacaaggtgtccacctctggcccccgggccttcagcagccgctcctacacgagtgggcccggttcccgcatcagctcctcgagcttctcccgagtgggcagcagcaactttcgcggtggcctgggcggcggctatggtggggccagcggcatgggaggcatcaccgcagttacggtcaaccagagcctgctgagcccccttgtcctggaggtggaccccaacatccaggccgtgcgcacccaggagaaggagcagatcaagaccctcaacaacaagtttgcctccttcatagacaaggtacggttcctggagcagcagaacaagatgctggagaccaagtggagcctcctgcagcagcagaagacggctcgaagcaacatggacaacatgttcgagagctacatcaacaaccttaggcggcagctggagactctgggccaggagaagctgaagctggaggcggagcttggcaacatgcaggggctggtggaggacttcaagaacaagtatgaggatgagatcaataagcgtacagagatggagaacgaatttgtcctcatcaagaaggatgtggatgaagcttacatgaacaaggtagagctggagtctcgcctggaagggctgaccgacgagatcaacttcctcaggcagctatatgaagaggagatccgggagctgcagtcccagatctcggacacatctgtggtgctgtccatggacaacagccgctccctggacatggacagcatcattgctgaggtcaaggcacaaaagactgagatctctgagatgaaccggaacatcagccggctccaggctgagattgagggcctcaaaggccagagggcttccctggaggccgccattgcagatgccgagcagcgtggagagctggccattaaggatgccaacgccaagttgtccgagctggaggccgccctgcagcgggccaagcaggacatggcgcggcagctgcgtgagtaccaggagctgatgaacgtcaagctggccctggacatcgagatcgccacctacaggaagctgctggagggcgaggagagccggctggagtctgggatgcagaacatgagtattcatacgaagaccaccagcggctatgcaggtggtctgagctcggcctatgggggcctcacaagccccggcctcagctacagcctgggctccagctttggctctggcgcgggctccagctccttcagccgcaccagctcctccagggccgtggttgtgaagaagatcgagacacgtgatgggaagctggtgtctgagtcctctgacgtcctgcccaagtgaacagctgcggcagcccctcccagcctacccctcctgcgctgccccagagcctgggaaggaggccgctatgcagggtagcactgggaacaggagacccacctgaggctcagccctagccctcagcccacctggggagtttactacctggggaccccccttgcccatgcctccagctacaaaacaattcaattgctttttttttttggtccaaaataaaacctcagctagctctgccaaaaaaaaaaaacatacanaaaaaaaagggggggttttttggggggggggaaaaagggttttgaagggaaggggtaagggtttctggacccgttttgttaaagggggaaatgggggccccaagggggggaaaaaggaagggggacg

SEQ ID NO: 734859 - DNA, 2960 bp, Homo sapiens
  misc_feature (2574)..(2574): n is a, c, g, or t
ggcattgtcaatctgcagaacgatgcgggcattgtccacagtatttgcgaagatctggagggattgtagagagaggttgttccatgaatagaaagccagggatgggtggggtgagtgtgtaaaaagtgttatgtatcctagtgaaaacttcctggtcccaggaatagccagaggctctccctggacacctatcccttttcatctagccccaccccattccctcctttcctggattcccagatcccagcactctgcccctcttgggaagcctcagcaggctggctagctggctggcctgcctgcccagaagtgagtcgctactaacaagtcctcttcctggccctctcctggcattttttccctagtgcacctggtcactctgggccccctacaccctggattggctcctcccaaaggaaggcctcttgtttactcctagatgactcagccttagccacatccgcttaaccctccaatagtccccattccgccagagccggtgtctcctcctctttacaggcctttccttacctccctccatgctgtccacttcctctgtaaagctctcaaccctgtccccttccccctctctcctgggaaagagccctcccatgcctagctgctgctcttagggaccctgtggctaggtgcgcggatggaaatccaggtatgcccaaccccctcccggtggagtaggggttgggtggttatggaatgacggaaagaggcaaaggagtgtataattggagggtcagacaaggctgggagttgaggtccctcctaccccttacctgagccctcaggtcctcgatgatcttgaagtaatggctccagtctctgacctggggtcccttcttctccaagtgctcccggattttgctctccagcctccggttctcggtctccaggctcctcactctttctaggatctccgcctggttcggcccgcctgcctccactcctgcctctaccatgtccatcagggtgacccagaagtcctacaaggtgtccacctctggcccccgggccttcagcagccgctcctacacgagtgggcccggttcccgcatcagctcctcgagcttctcccgagtgggcagcagcaactttcgcggtggcctgggcggcggctatggtggggccagcggcatgggaggcatcaccgcagttacggtcaaccagagcctgctgagcccccttgtcctggaggtggaccccaacatccaggccgtgcgcacccaggagaaggagcagatcaagaccctcaacaacaagtttgcctccttcatagacaaggtacggttcctggagcagcagaacaagatgctggagaccaagtggagcctcctgcagcagcagaagacggctcgaagcaacatggacaacatgttcgagagctacatcaacaaccttaggcggcagctggagactctgggccaggagaagctgaagctggaggcggagcttggcaacatgcaggggctggtggaggacttcaagaacaagtatgaggatgagatcaataagcgtacagagatggagaacgaatttgtcctcatcaagaaggatgtggatgaagcttacatgaacaaggtagagctggagtctcgcctggaagggctgaccgacgagatcaacttcctcaggcagctatatgaagaggagatccgggagctgcagtcccagatctcggacacatctgtggtgctgtccatggacaacagccgctccctggacatggacagcatcattgctgaggtcaaggcacaaaagactgagatctctgagatgaaccggaacatcagccggctccaggctgagattgagggcctcaaaggccagagggcttccctggaggccgccattgcagatgccgagcagcgtggagagctggccattaaggatgccaacgccaagttgtccgagctggaggccgccctgcagcgggccaagcaggacatggcgcggcagctgcgtgagtaccaggagctgatgaacgtcaagctggccctggacatcgagatcgccacctacaggaagctgctggagggcgaggagagccggctggagtctgggatgcagaacatgagtattcatacgaagaccaccagcggctatgcaggtggtctgagctcggcctatgggggcctcacaagccccggcctcagctacagcctgggctccagctttggctctggcgcgggctccagctccttcagccgcaccagctcctccagggccgtggttgtgaagaagatcgagacacgtgatgggaagctggtgtctgagtcctctgacgtcctgcccaagtgaacagctgcggcagcccctcccagcctacccctcctgcgctgccccagagcctgggaaggaggccgctatgcagggtagcactgggaacaggagacccacctgaggctcagccctagccctcagcccacctggggagtttactacctggggaccccccttgcccatgcctccagctacaaaacaattcaattgctttttttttttggtccaaaataaaacctcagctagctctgccaaaaaaaaaaacaaaaaaaaaaaaanaaatttgggggtctggtggtgtgcgggtggaatggcctgtgagtccctctagctgtccttaacctgcagcccaaattatccacttgtggaggggatcttgggggcatcctggagccccaggagtcccggggaagaaaggctgggagctggagaagaggaggagaagcaatgcccagcctcatagctgcttgcttacacactcacaccccagctgcacctggctcccaaacactcctcgcctacccacgtttcctcacacacactcacacccgaatcatacagaggtgtgctttcaaatgcacacacacatacattcactcagcaaataggtgcagactccccaaaacaaacccagtctctgatcccacatgaagggatcctctaga

SEQ ID NO: 734860 - DNA, 3249 bp, Homo sapiens
  misc_feature (2574)..(2574): n is a, c, g, or t
  misc_feature (2588)..(2588): n is a, c, g, or t
ggcattgtcaatctgcagaacgatgcgggcattgtccacagtatttgcgaagatctggagggattgtagagagaggttgttccatgaatagaaagccagggatgggtggggtgagtgtgtaaaaagtgttatgtatcctagtgaaaacttcctggtcccaggaatagccagaggctctccctggacacctatcccttttcatctagccccaccccattccctcctttcctggattcccagatcccagcactctgcccctcttgggaagcctcagcaggctggctagctggctggcctgcctgcccagaagtgagtcgctactaacaagtcctcttcctggccctctcctggcattttttccctagtgcacctggtcactctgggccccctacaccctggattggctcctcccaaaggaaggcctcttgtttactcctagatgactcagccttagccacatccgcttaaccctccaatagtccccattccgccagagccggtgtctcctcctctttacaggcctttccttacctccctccatgctgtccacttcctctgtaaagctctcaaccctgtccccttccccctctctcctgggaaagagccctcccatgcctagctgctgctcttagggaccctgtggctaggtgcgcggatggaaatccaggtatgcccaaccccctcccggtggagtaggggttgggtggttatggaatgacggaaagaggcaaaggagtgtataattggagggtcagacaaggctgggagttgaggtccctcctaccccttacctgagccctcaggtcctcgatgatcttgaagtaatggctccagtctctgacctggggtcccttcttctccaagtgctcccggattttgctctccagcctccggttctcggtctccaggctcctcactctttctaggatctccgcctggttcggcccgcctgcctccactcctgcctctaccatgtccatcagggtgacccagaagtcctacaaggtgtccacctctggcccccgggccttcagcagccgctcctacacgagtgggcccggttcccgcatcagctcctcgagcttctcccgagtgggcagcagcaactttcgcggtggcctgggcggcggctatggtggggccagcggcatgggaggcatcaccgcagttacggtcaaccagagcctgctgagcccccttgtcctggaggtggaccccaacatccaggccgtgcgcacccaggagaaggagcagatcaagaccctcaacaacaagtttgcctccttcatagacaaggtacggttcctggagcagcagaacaagatgctggagaccaagtggagcctcctgcagcagcagaagacggctcgaagcaacatggacaacatgttcgagagctacatcaacaaccttaggcggcagctggagactctgggccaggagaagctgaagctggaggcggagcttggcaacatgcaggggctggtggaggacttcaagaacaagtatgaggatgagatcaataagcgtacagagatggagaacgaatttgtcctcatcaagaaggatgtggatgaagcttacatgaacaaggtagagctggagtctcgcctggaagggctgaccgacgagatcaacttcctcaggcagctatatgaagaggagatccgggagctgcagtcccagatctcggacacatctgtggtgctgtccatggacaacagccgctccctggacatggacagcatcattgctgaggtcaaggcacaaaagactgagatctctgagatgaaccggaacatcagccggctccaggctgagattgagggcctcaaaggccagagggcttccctggaggccgccattgcagatgccgagcagcgtggagagctggccattaaggatgccaacgccaagttgtccgagctggaggccgccctgcagcgggccaagcaggacatggcgcggcagctgcgtgagtaccaggagctgatgaacgtcaagctggccctggacatcgagatcgccacctacaggaagctgctggagggcgaggagagccggctggagtctgggatgcagaacatgagtattcatacgaagaccaccagcggctatgcaggtggtctgagctcggcctatgggggcctcacaagccccggcctcagctacagcctgggctccagctttggctctggcgcgggctccagctccttcagccgcaccagctcctccagggccgtggttgtgaagaagatcgagacacgtgatgggaagctggtgtctgagtcctctgacgtcctgcccaagtgaacagctgcggcagcccctcccagcctacccctcctgcgctgccccagagcctgggaaggaggccgctatgcagggtagcactgggaacaggagacccacctgaggctcagccctagccctcagcccacctggggagtttactacctggggaccccccttgcccatgcctccagctacaaaacaattcaattgctttttttttttggtccaaaataaaacctcagctagctctgccaaaaaaaaaaacaaaaaaaaaaaaanaaaaaaaaaaaaanaaaaaaaaaaaaaaaaaaaaaaaaaaaacaacaagcagccacaagaaaacccaaccaacgagacaaaacaaaaacagcaacaaaaaaaaaagaacagagccgcggcgccggctgcacacatacacatcgcagggcggcgccccagcaccacagcaccccccacgcctatacaggagcggcggcccaccaacccggcccagctcctactaacacggacgcccgggccggccacaccccaccggcacggccgaacaccaaccacccagcaggcaatgtggcggcacccccacccgtggcgcgagtacagatcaggccagcacgaacccacccaatcagcagtaatggcgctacggagtactaaaatataagaggagcgctgcaagaaccacccacaccatctcgtcgggcagccagaacgccccgcgacgaccgcagactacatccatccacgggcggacggccaacagagtccgaggctggcgacgacgtcggacggcccgcggcaccgaggcgtcgacgaaacgacgccggaagacacactgcgagcaggcgaccagactgcagccccacgcccatcatggacacaagcgactcggacgacgcacgccatagatcaggtcccagaccaccttaacccagacggacagcgcggagacaagca

SEQ ID NO: 734861 - DNA, 3150 bp, Homo sapiens
  misc_feature (2574)..(2574): n is a, c, g, or t
  misc_feature (2588)..(2588): n is a, c, g, or t
  misc_feature (3150)..(3150): n is a, c, g, or t
ggcattgtcaatctgcagaacgatgcgggcattgtccacagtatttgcgaagatctggagggattgtagagagaggttgttccatgaatagaaagccagggatgggtggggtgagtgtgtaaaaagtgttatgtatcctagtgaaaacttcctggtcccaggaatagccagaggctctccctggacacctatcccttttcatctagccccaccccattccctcctttcctggattcccagatcccagcactctgcccctcttgggaagcctcagcaggctggctagctggctggcctgcctgcccagaagtgagtcgctactaacaagtcctcttcctggccctctcctggcattttttccctagtgcacctggtcactctgggccccctacaccctggattggctcctcccaaaggaaggcctcttgtttactcctagatgactcagccttagccacatccgcttaaccctccaatagtccccattccgccagagccggtgtctcctcctctttacaggcctttccttacctccctccatgctgtccacttcctctgtaaagctctcaaccctgtccccttccccctctctcctgggaaagagccctcccatgcctagctgctgctcttagggaccctgtggctaggtgcgcggatggaaatccaggtatgcccaaccccctcccggtggagtaggggttgggtggttatggaatgacggaaagaggcaaaggagtgtataattggagggtcagacaaggctgggagttgaggtccctcctaccccttacctgagccctcaggtcctcgatgatcttgaagtaatggctccagtctctgacctggggtcccttcttctccaagtgctcccggattttgctctccagcctccggttctcggtctccaggctcctcactctttctaggatctccgcctggttcggcccgcctgcctccactcctgcctctaccatgtccatcagggtgacccagaagtcctacaaggtgtccacctctggcccccgggccttcagcagccgctcctacacgagtgggcccggttcccgcatcagctcctcgagcttctcccgagtgggcagcagcaactttcgcggtggcctgggcggcggctatggtggggccagcggcatgggaggcatcaccgcagttacggtcaaccagagcctgctgagcccccttgtcctggaggtggaccccaacatccaggccgtgcgcacccaggagaaggagcagatcaagaccctcaacaacaagtttgcctccttcatagacaaggtacggttcctggagcagcagaacaagatgctggagaccaagtggagcctcctgcagcagcagaagacggctcgaagcaacatggacaacatgttcgagagctacatcaacaaccttaggcggcagctggagactctgggccaggagaagctgaagctggaggcggagcttggcaacatgcaggggctggtggaggacttcaagaacaagtatgaggatgagatcaataagcgtacagagatggagaacgaatttgtcctcatcaagaaggatgtggatgaagcttacatgaacaaggtagagctggagtctcgcctggaagggctgaccgacgagatcaacttcctcaggcagctatatgaagaggagatccgggagctgcagtcccagatctcggacacatctgtggtgctgtccatggacaacagccgctccctggacatggacagcatcattgctgaggtcaaggcacaaaagactgagatctctgagatgaaccggaacatcagccggctccaggctgagattgagggcctcaaaggccagagggcttccctggaggccgccattgcagatgccgagcagcgtggagagctggccattaaggatgccaacgccaagttgtccgagctggaggccgccctgcagcgggccaagcaggacatggcgcggcagctgcgtgagtaccaggagctgatgaacgtcaagctggccctggacatcgagatcgccacctacaggaagctgctggagggcgaggagagccggctggagtctgggatgcagaacatgagtattcatacgaagaccaccagcggctatgcaggtggtctgagctcggcctatgggggcctcacaagccccggcctcagctacagcctgggctccagctttggctctggcgcgggctccagctccttcagccgcaccagctcctccagggccgtggttgtgaagaagatcgagacacgtgatgggaagctggtgtctgagtcctctgacgtcctgcccaagtgaacagctgcggcagcccctcccagcctacccctcctgcgctgccccagagcctgggaaggaggccgctatgcagggtagcactgggaacaggagacccacctgaggctcagccctagccctcagcccacctggggagtttactacctggggaccccccttgcccatgcctccagctacaaaacaattcaattgctttttttttttggtccaaaataaaacctcagctagctctgccaaaaaaaaaaacaaaaaaaaaaaaanaaaaaaaaaaaaanaaaaaaaaaaaaaaaaaaaaaaaagaggggggcgcgcgcgcgcccaagaaggttccccccgagggggcgcccagatacccgcgcggcccccgggttttggggaacaagggggggccccccaataggaggaggagccgcgccaattataatagcgacagcgggccggtgggcgccggcggcttatcacacaacggcgcaggcgaccgggggggaaaacagcgcggccaccgccgcggcgaaacccctcggggagagagggacaccctataaacccgcgaggcgggagggaacaaatatggtgggagaccaaaacattgcgctctccagaggggaatttataaacgcctctctatcgaggggagagacacattgtatcgcagtttgtttaaacgcgtctgtgtaaattacgggtgggggtcaaaacataagctgtgagagatatgttagctgagtgaggtgcgaaggaaaaaactgttgagaggtatacaataggggatatattagattatgtaagaaaaaaattattttatcaccccaggggacccgctttggaggagtaagn

SEQ ID NO: 734862 - DNA, 2583 bp, Homo sapiens
  misc_feature (2551)..(2551): n is a, c, g, or t
ggcattgtcaatctgcagaacgatgcgggcattgtccacagtatttgcgaagatctggagggattgtagagagaggttgttccatgaatagaaagccagggatgggtggggtgagtgtgtaaaaagtgttatgtatcctagtgaaaacttcctggtcccaggaatagccagaggctctccctggacacctatcccttttcatctagccccaccccattccctcctttcctggattcccagatcccagcactctgcccctcttgggaagcctcagcaggctggctagctggctggcctgcctgcccagaagtgagtcgctactaacaagtcctcttcctggccctctcctggcattttttccctagtgcacctggtcactctgggccccctacaccctggattggctcctcccaaaggaaggcctcttgtttactcctagatgactcagccttagccacatccgcttaaccctccaatagtccccattccgccagagccggtgtctcctcctctttacaggcctttccttacctccctccatgctgtccacttcctctgtaaagctctcaaccctgtccccttccccctctctcctgggaaagagccctcccatgcctagctgctgctcttagggaccctgtggctaggtgcgcggatggaaatccaggtatgcccaaccccctcccggtggagtaggggttgggtggttatggaatgacggaaagaggcaaaggagtgtataattggagggtcagacaaggctgggagttgaggtccctcctaccccttacctgagccctcaggtcctcgatgatcttgaagtaatggctccagtctctgacctggggtcccttcttctccaagtgctcccggattttgctctccagcctccggttctcggtctccaggctcctcactctttctaggatctccgcctggttcggcccgcctgcctccactcctgcctctaccatgtccatcagggtgacccagaagtcctacaaggtgtccacctctggcccccgggccttcagcagccgctcctacacgagtgggcccggttcccgcatcagctcctcgagcttctcccgagtgggcagcagcaactttcgcggtggcctgggcggcggctatggtggggccagcggcatgggaggcatcaccgcagttacggtcaaccagagcctgctgagcccccttgtcctggaggtggaccccaacatccaggccgtgcgcacccaggagaaggagcagatcaagaccctcaacaacaagtttgcctccttcatagacaaggtacggttcctggagcagcagaacaagatgctggagaccaagtggagcctcctgcagcagcagaagacggctcgaagcaacatggacaacatgttcgagagctacatcaacaaccttaggcggcagctggagactctgggccaggagaagctgaagctggaggcggagcttggcaacatgcaggggctggtggaggacttcaagaacaagtatgaggatgagatcaataagcgtacagagatggagaacgaatttgtcctcatcaagaaggatgtggatgaagcttacatgaacaaggtagagctggagtctcgcctggaagggctgaccgacgagatcaacttcctcaggcagctatatgaagaggagatccgggagctgcagtcccagatctcggacacatctgtggtgctgtccatggacaacagccgctccctggacatggacagcatcattgctgaggtcaaggcacaaaagactgagatctctgagatgaaccggaacatcagccggctccaggctgagattgagggcctcaaaggccagagggcttccctggaggccgccattgcagatgccgagcagcgtggagagctggccattaaggatgccaacgccaagttgtccgagctggaggccgccctgcagcgggccaagcaggacatggcgcggcagctgcgtgagtaccaggagctgatgaacgtcaagctggccctggacatcgagatcgccacctacaggaagctgctggagggcgaggagagccggctggagtctgggatgcagaacatgagtattcatacgaagaccaccagcggctatgcaggtggtctgagctcggcctatgggggcctcacaagccccggcctcagctacagcctgggctccagctttggctctggcgcgggctccagctccttcagccgcaccagctcctccagggccgtggttgtgaagaagatcgagacacgtgatgggaagctggtgtctgagtcctctgacgtcctgcccaagtgaacagctgcggcagcccctcccagcctacccctcctgcgctgccccagagcctgggaaggaggccgctatgcagggtagcactgggaacaggagacccacctgaggctcagccctagccctcagcccacctggggagtttactacctggggaccccccttgcccatgcctccagctacaaaacaattcaattgctttttttttttggtccaaaataaaacctcagctagctctgccaanggaaaaggcagcagacagaagaaaaagttttg

SEQ ID NO: 734863 - DNA, 3222 bp, Homo sapiens
  misc_feature (2561)..(2561): n is a, c, g, or t
ggcattgtcaatctgcagaacgatgcgggcattgtccacagtatttgcgaagatctggagggattgtagagagaggttgttccatgaatagaaagccagggatgggtggggtgagtgtgtaaaaagtgttatgtatcctagtgaaaacttcctggtcccaggaatagccagaggctctccctggacacctatcccttttcatctagccccaccccattccctcctttcctggattcccagatcccagcactctgcccctcttgggaagcctcagcaggctggctagctggctggcctgcctgcccagaagtgagtcgctactaacaagtcctcttcctggccctctcctggcattttttccctagtgcacctggtcactctgggccccctacaccctggattggctcctcccaaaggaaggcctcttgtttactcctagatgactcagccttagccacatccgcttaaccctccaatagtccccattccgccagagccggtgtctcctcctctttacaggcctttccttacctccctccatgctgtccacttcctctgtaaagctctcaaccctgtccccttccccctctctcctgggaaagagccctcccatgcctagctgctgctcttagggaccctgtggctaggtgcgcggatggaaatccaggtatgcccaaccccctcccggtggagtaggggttgggtggttatggaatgacggaaagaggcaaaggagtgtataattggagggtcagacaaggctgggagttgaggtccctcctaccccttacctgagccctcaggtcctcgatgatcttgaagtaatggctccagtctctgacctggggtcccttcttctccaagtgctcccggattttgctctccagcctccggttctcggtctccaggctcctcactctttctaggatctccgcctggttcggcccgcctgcctccactcctgcctctaccatgtccatcagggtgacccagaagtcctacaaggtgtccacctctggcccccgggccttcagcagccgctcctacacgagtgggcccggttcccgcatcagctcctcgagcttctcccgagtgggcagcagcaactttcgcggtggcctgggcggcggctatggtggggccagcggcatgggaggcatcaccgcagttacggtcaaccagagcctgctgagcccccttgtcctggaggtggaccccaacatccaggccgtgcgcacccaggagaaggagcagatcaagaccctcaacaacaagtttgcctccttcatagacaaggtacggttcctggagcagcagaacaagatgctggagaccaagtggagcctcctgcagcagcagaagacggctcgaagcaacatggacaacatgttcgagagctacatcaacaaccttaggcggcagctggagactctgggccaggagaagctgaagctggaggcggagcttggcaacatgcaggggctggtggaggacttcaagaacaagtatgaggatgagatcaataagcgtacagagatggagaacgaatttgtcctcatcaagaaggatgtggatgaagcttacatgaacaaggtagagctggagtctcgcctggaagggctgaccgacgagatcaacttcctcaggcagctatatgaagaggagatccgggagctgcagtcccagatctcggacacatctgtggtgctgtccatggacaacagccgctccctggacatggacagcatcattgctgaggtcaaggcacaaaagactgagatctctgagatgaaccggaacatcagccggctccaggctgagattgagggcctcaaaggccagagggcttccctggaggccgccattgcagatgccgagcagcgtggagagctggccattaaggatgccaacgccaagttgtccgagctggaggccgccctgcagcgggccaagcaggacatggcgcggcagctgcgtgagtaccaggagctgatgaacgtcaagctggccctggacatcgagatcgccacctacaggaagctgctggagggcgaggagagccggctggagtctgggatgcagaacatgagtattcatacgaagaccaccagcggctatgcaggtggtctgagctcggcctatgggggcctcacaagccccggcctcagctacagcctgggctccagctttggctctggcgcgggctccagctccttcagccgcaccagctcctccagggccgtggttgtgaagaagatcgagacacgtgatgggaagctggtgtctgagtcctctgacgtcctgcccaagtgaacagctgcggcagcccctcccagcctacccctcctgcgctgccccagagcctgggaaggaggccgctatgcagggtagcactgggaacaggagacccacctgaggctcagccctagccctcagcccacctggggagtttactacctggggaccccccttgcccatgcctccagctacaaaacaattcaattgctttttttttttggtccaaaataaaacctcagctagctctgccaaaaaaaaaaaanaaaaaaaaaaaaaaaaaaaaaaaaaaaacaacaagcagccacaagaaaacccaaccaacgagacaaaacaaaaacagcaacaaaaaaaaaagaacagagccgcggcgccggctgcacacatacacatcgcagggcggcgccccagcaccacagcaccccccacgcctatacaggagcggcggcccaccaacccggcccagctcctactaacacggacgcccgggccggccacaccccaccggcacggccgaacaccaaccacccagcaggcaatgtggcggcacccccacccgtggcgcgagtacagatcaggccagcacgaacccacccaatcagcagtaatggcgctacggagtactaaaatataagaggagcgctgcaagaaccacccacaccatctcgtcgggcagccagaacgccccgcgacgaccgcagactacatccatccacgggcggacggccaacagagtccgaggctggcgacgacgtcggacggcccgcggcaccgaggcgtcgacgaaacgacgccggaagacacactgcgagcaggcgaccagactgcagccccacgcccatcatggacacaagcgactcggacgacgcacgccatagatcaggtcccagaccaccttaacccagacggacagcgcggagacaagca

SEQ ID NO: 734864 - DNA, 3123 bp, Homo sapiens
  misc_feature (2561)..(2561): n is a, c, g, or t
  misc_feature (3123)..(3123): n is a, c, g, or t
ggcattgtcaatctgcagaacgatgcgggcattgtccacagtatttgcgaagatctggagggattgtagagagaggttgttccatgaatagaaagccagggatgggtggggtgagtgtgtaaaaagtgttatgtatcctagtgaaaacttcctggtcccaggaatagccagaggctctccctggacacctatcccttttcatctagccccaccccattccctcctttcctggattcccagatcccagcactctgcccctcttgggaagcctcagcaggctggctagctggctggcctgcctgcccagaagtgagtcgctactaacaagtcctcttcctggccctctcctggcattttttccctagtgcacctggtcactctgggccccctacaccctggattggctcctcccaaaggaaggcctcttgtttactcctagatgactcagccttagccacatccgcttaaccctccaatagtccccattccgccagagccggtgtctcctcctctttacaggcctttccttacctccctccatgctgtccacttcctctgtaaagctctcaaccctgtccccttccccctctctcctgggaaagagccctcccatgcctagctgctgctcttagggaccctgtggctaggtgcgcggatggaaatccaggtatgcccaaccccctcccggtggagtaggggttgggtggttatggaatgacggaaagaggcaaaggagtgtataattggagggtcagacaaggctgggagttgaggtccctcctaccccttacctgagccctcaggtcctcgatgatcttgaagtaatggctccagtctctgacctggggtcccttcttctccaagtgctcccggattttgctctccagcctccggttctcggtctccaggctcctcactctttctaggatctccgcctggttcggcccgcctgcctccactcctgcctctaccatgtccatcagggtgacccagaagtcctacaaggtgtccacctctggcccccgggccttcagcagccgctcctacacgagtgggcccggttcccgcatcagctcctcgagcttctcccgagtgggcagcagcaactttcgcggtggcctgggcggcggctatggtggggccagcggcatgggaggcatcaccgcagttacggtcaaccagagcctgctgagcccccttgtcctggaggtggaccccaacatccaggccgtgcgcacccaggagaaggagcagatcaagaccctcaacaacaagtttgcctccttcatagacaaggtacggttcctggagcagcagaacaagatgctggagaccaagtggagcctcctgcagcagcagaagacggctcgaagcaacatggacaacatgttcgagagctacatcaacaaccttaggcggcagctggagactctgggccaggagaagctgaagctggaggcggagcttggcaacatgcaggggctggtggaggacttcaagaacaagtatgaggatgagatcaataagcgtacagagatggagaacgaatttgtcctcatcaagaaggatgtggatgaagcttacatgaacaaggtagagctggagtctcgcctggaagggctgaccgacgagatcaacttcctcaggcagctatatgaagaggagatccgggagctgcagtcccagatctcggacacatctgtggtgctgtccatggacaacagccgctccctggacatggacagcatcattgctgaggtcaaggcacaaaagactgagatctctgagatgaaccggaacatcagccggctccaggctgagattgagggcctcaaaggccagagggcttccctggaggccgccattgcagatgccgagcagcgtggagagctggccattaaggatgccaacgccaagttgtccgagctggaggccgccctgcagcgggccaagcaggacatggcgcggcagctgcgtgagtaccaggagctgatgaacgtcaagctggccctggacatcgagatcgccacctacaggaagctgctggagggcgaggagagccggctggagtctgggatgcagaacatgagtattcatacgaagaccaccagcggctatgcaggtggtctgagctcggcctatgggggcctcacaagccccggcctcagctacagcctgggctccagctttggctctggcgcgggctccagctccttcagccgcaccagctcctccagggccgtggttgtgaagaagatcgagacacgtgatgggaagctggtgtctgagtcctctgacgtcctgcccaagtgaacagctgcggcagcccctcccagcctacccctcctgcgctgccccagagcctgggaaggaggccgctatgcagggtagcactgggaacaggagacccacctgaggctcagccctagccctcagcccacctggggagtttactacctggggaccccccttgcccatgcctccagctacaaaacaattcaattgctttttttttttggtccaaaataaaacctcagctagctctgccaaaaaaaaaaaanaaaaaaaaaaaaaaaaaaaaaaaagaggggggcgcgcgcgcgcccaagaaggttccccccgagggggcgcccagatacccgcgcggcccccgggttttggggaacaagggggggccccccaataggaggaggagccgcgccaattataatagcgacagcgggccggtgggcgccggcggcttatcacacaacggcgcaggcgaccgggggggaaaacagcgcggccaccgccgcggcgaaacccctcggggagagagggacaccctataaacccgcgaggcgggagggaacaaatatggtgggagaccaaaacattgcgctctccagaggggaatttataaacgcctctctatcgaggggagagacacattgtatcgcagtttgtttaaacgcgtctgtgtaaattacgggtgggggtcaaaacataagctgtgagagatatgttagctgagtgaggtgcgaaggaaaaaactgttgagaggtatacaataggggatatattagattatgtaagaaaaaaattattttatcaccccaggggacccgctttggaggagtaagn

SEQ ID NO: 734865 - DNA, 2706 bp, Homo sapiens
  misc_feature (2562)..(2562): n is a, c, g, or t
  misc_feature (2577)..(2578): n is a, c, g, or t
  misc_feature (2586)..(2586): n is a, c, g, or t
ggcattgtcaatctgcagaacgatgcgggcattgtccacagtatttgcgaagatctggagggattgtagagagaggttgttccatgaatagaaagccagggatgggtggggtgagtgtgtaaaaagtgttatgtatcctagtgaaaacttcctggtcccaggaatagccagaggctctccctggacacctatcccttttcatctagccccaccccattccctcctttcctggattcccagatcccagcactctgcccctcttgggaagcctcagcaggctggctagctggctggcctgcctgcccagaagtgagtcgctactaacaagtcctcttcctggccctctcctggcattttttccctagtgcacctggtcactctgggccccctacaccctggattggctcctcccaaaggaaggcctcttgtttactcctagatgactcagccttagccacatccgcttaaccctccaatagtccccattccgccagagccggtgtctcctcctctttacaggcctttccttacctccctccatgctgtccacttcctctgtaaagctctcaaccctgtccccttccccctctctcctgggaaagagccctcccatgcctagctgctgctcttagggaccctgtggctaggtgcgcggatggaaatccaggtatgcccaaccccctcccggtggagtaggggttgggtggttatggaatgacggaaagaggcaaaggagtgtataattggagggtcagacaaggctgggagttgaggtccctcctaccccttacctgagccctcaggtcctcgatgatcttgaagtaatggctccagtctctgacctggggtcccttcttctccaagtgctcccggattttgctctccagcctccggttctcggtctccaggctcctcactctttctaggatctccgcctggttcggcccgcctgcctccactcctgcctctaccatgtccatcagggtgacccagaagtcctacaaggtgtccacctctggcccccgggccttcagcagccgctcctacacgagtgggcccggttcccgcatcagctcctcgagcttctcccgagtgggcagcagcaactttcgcggtggcctgggcggcggctatggtggggccagcggcatgggaggcatcaccgcagttacggtcaaccagagcctgctgagcccccttgtcctggaggtggaccccaacatccaggccgtgcgcacccaggagaaggagcagatcaagaccctcaacaacaagtttgcctccttcatagacaaggtacggttcctggagcagcagaacaagatgctggagaccaagtggagcctcctgcagcagcagaagacggctcgaagcaacatggacaacatgttcgagagctacatcaacaaccttaggcggcagctggagactctgggccaggagaagctgaagctggaggcggagcttggcaacatgcaggggctggtggaggacttcaagaacaagtatgaggatgagatcaataagcgtacagagatggagaacgaatttgtcctcatcaagaaggatgtggatgaagcttacatgaacaaggtagagctggagtctcgcctggaagggctgaccgacgagatcaacttcctcaggcagctatatgaagaggagatccgggagctgcagtcccagatctcggacacatctgtggtgctgtccatggacaacagccgctccctggacatggacagcatcattgctgaggtcaaggcacaaaagactgagatctctgagatgaaccggaacatcagccggctccaggctgagattgagggcctcaaaggccagagggcttccctggaggccgccattgcagatgccgagcagcgtggagagctggccattaaggatgccaacgccaagttgtccgagctggaggccgccctgcagcgggccaagcaggacatggcgcggcagctgcgtgagtaccaggagctgatgaacgtcaagctggccctggacatcgagatcgccacctacaggaagctgctggagggcgaggagagccggctggagtctgggatgcagaacatgagtattcatacgaagaccaccagcggctatgcaggtggtctgagctcggcctatgggggcctcacaagccccggcctcagctacagcctgggctccagctttggctctggcgcgggctccagctccttcagccgcaccagctcctccagggccgtggttgtgaagaagatcgagacacgtgatgggaagctggtgtctgagtcctctgacgtcctgcccaagtgaacagctgcggcagcccctcccagcctacccctcctgcgctgccccagagcctgggaaggaggccgctatgcagggtagcactgggaacaggagacccacctgaggctcagccctagccctcagcccacctggggagtttactacctggggaccccccttgcccatgcctccagctacaaaacaattcaattgctttttttttttggtccaaaataaaacctcagctagctctgccaaaaaaaaaaaaanaaagaaaaacaaaannaaaaaaanaaaaagactattccaaaagaaagaactaggagtgggcccgtaccccaaaataaaaaacctcggggggggccccgtgcccaatttcgcccttatggagagcctttaacattcaaatgggcc

SEQ ID NO: 734866 - DNA, 2817 bp, Homo sapiens
  misc_feature (2562)..(2562): n is a, c, g, or t
  misc_feature (2577)..(2578): n is a, c, g, or t
  misc_feature (2586)..(2586): n is a, c, g, or t
ggcattgtcaatctgcagaacgatgcgggcattgtccacagtatttgcgaagatctggagggattgtagagagaggttgttccatgaatagaaagccagggatgggtggggtgagtgtgtaaaaagtgttatgtatcctagtgaaaacttcctggtcccaggaatagccagaggctctccctggacacctatcccttttcatctagccccaccccattccctcctttcctggattcccagatcccagcactctgcccctcttgggaagcctcagcaggctggctagctggctggcctgcctgcccagaagtgagtcgctactaacaagtcctcttcctggccctctcctggcattttttccctagtgcacctggtcactctgggccccctacaccctggattggctcctcccaaaggaaggcctcttgtttactcctagatgactcagccttagccacatccgcttaaccctccaatagtccccattccgccagagccggtgtctcctcctctttacaggcctttccttacctccctccatgctgtccacttcctctgtaaagctctcaaccctgtccccttccccctctctcctgggaaagagccctcccatgcctagctgctgctcttagggaccctgtggctaggtgcgcggatggaaatccaggtatgcccaaccccctcccggtggagtaggggttgggtggttatggaatgacggaaagaggcaaaggagtgtataattggagggtcagacaaggctgggagttgaggtccctcctaccccttacctgagccctcaggtcctcgatgatcttgaagtaatggctccagtctctgacctggggtcccttcttctccaagtgctcccggattttgctctccagcctccggttctcggtctccaggctcctcactctttctaggatctccgcctggttcggcccgcctgcctccactcctgcctctaccatgtccatcagggtgacccagaagtcctacaaggtgtccacctctggcccccgggccttcagcagccgctcctacacgagtgggcccggttcccgcatcagctcctcgagcttctcccgagtgggcagcagcaactttcgcggtggcctgggcggcggctatggtggggccagcggcatgggaggcatcaccgcagttacggtcaaccagagcctgctgagcccccttgtcctggaggtggaccccaacatccaggccgtgcgcacccaggagaaggagcagatcaagaccctcaacaacaagtttgcctccttcatagacaaggtacggttcctggagcagcagaacaagatgctggagaccaagtggagcctcctgcagcagcagaagacggctcgaagcaacatggacaacatgttcgagagctacatcaacaaccttaggcggcagctggagactctgggccaggagaagctgaagctggaggcggagcttggcaacatgcaggggctggtggaggacttcaagaacaagtatgaggatgagatcaataagcgtacagagatggagaacgaatttgtcctcatcaagaaggatgtggatgaagcttacatgaacaaggtagagctggagtctcgcctggaagggctgaccgacgagatcaacttcctcaggcagctatatgaagaggagatccgggagctgcagtcccagatctcggacacatctgtggtgctgtccatggacaacagccgctccctggacatggacagcatcattgctgaggtcaaggcacaaaagactgagatctctgagatgaaccggaacatcagccggctccaggctgagattgagggcctcaaaggccagagggcttccctggaggccgccattgcagatgccgagcagcgtggagagctggccattaaggatgccaacgccaagttgtccgagctggaggccgccctgcagcgggccaagcaggacatggcgcggcagctgcgtgagtaccaggagctgatgaacgtcaagctggccctggacatcgagatcgccacctacaggaagctgctggagggcgaggagagccggctggagtctgggatgcagaacatgagtattcatacgaagaccaccagcggctatgcaggtggtctgagctcggcctatgggggcctcacaagccccggcctcagctacagcctgggctccagctttggctctggcgcgggctccagctccttcagccgcaccagctcctccagggccgtggttgtgaagaagatcgagacacgtgatgggaagctggtgtctgagtcctctgacgtcctgcccaagtgaacagctgcggcagcccctcccagcctacccctcctgcgctgccccagagcctgggaaggaggccgctatgcagggtagcactgggaacaggagacccacctgaggctcagccctagccctcagcccacctggggagtttactacctggggaccccccttgcccatgcctccagctacaaaacaattcaattgctttttttttttggtccaaaataaaacctcagctagctctgccaaaaaaaaaaaaanaaagaaaaacaaaannaaaaaaanaaaaaaaaaaagcaaaaaaaaaaccgcgcagaggatttcatgtgggggggggggaagaaaaagagaggatgaaaagaagagggagccgaggtggtgaccaatatggtggtgtgccgagaccacatttttttgttaaaaagagggggagaaaaagagggggggcctcccattaataggggagggagggattatatttgggagagagccgaggggagagccgggttattaagg

SEQ ID NO: 734867 - DNA, 2516 bp, Homo sapiens
ggcattgtcaatctgcagaacgatgcgggcattgtccacagtatttgcgaagatctggagggattgtagagagaggttgttccatgaatagaaagccagggatgggtggggtgagtgtgtaaaaagtgttatgtatcctagtgaaaacttcctggtcccaggaatagccagaggctctccctggacacctatcccttttcatctagccccaccccattccctcctttcctggattcccagatcccagcactctgcccctcttgggaagcctcagcaggctggctagctggctggcctgcctgcccagaagtgagtcgctactaacaagtcctcttcctggccctctcctggcattttttccctagtgcacctggtcactctgggccccctacaccctggattggctcctcccaaaggaaggcctcttgtttactcctagatgactcagccttagccacatccgcttaaccctccaatagtccccattccgccagagccggtgtctcctcctctttacaggcctttccttacctccctccatgctgtccacttcctctgtaaagctctcaaccctgtccccttccccctctctcctgggaaagagccctcccatgcctagctgctgctcttagggaccctgtggctaggtgcgcggatggaaatccaggtatgcccaaccccctcccggtggagtaggggttgggtggttatggaatgacggaaagaggcaaaggagtgtataattggagggtcagacaaggctgggagttgaggtccctcctaccccttacctgagccctcaggtcctcgatgatcttgaagtaatggctccagtctctgacctggggtcccttcttctccaagtgctcccggattttgctctccagcctccggttctcggtctccaggctcctcactctttctaggatctccgcctggttcggcccgcctgcctccactcctgcctctaccatgtccatcagggtgacccagaagtcctacaaggtgtccacctctggcccccgggccttcagcagccgctcctacacgagtgggcccggttcccgcatcagctcctcgagcttctcccgagtgggcagcagcaactttcgcggtggcctgggcggcggctatggtggggccagcggcatgggaggcatcaccgcagttacggtcaaccagagcctgctgagcccccttgtcctggaggtggaccccaacatccaggccgtgcgcacccaggagaaggagcagatcaagaccctcaacaacaagtttgcctccttcatagacaaggtacggttcctggagcagcagaacaagatgctggagaccaagtggagcctcctgcagcagcagaagacggctcgaagcaacatggacaacatgttcgagagctacatcaacaaccttaggcggcagctggagactctgggccaggagaagctgaagctggaggcggagcttggcaacatgcaggggctggtggaggacttcaagaacaagtatgaggatgagatcaataagcgtacagagatggagaacgaatttgtcctcatcaagaaggatgtggatgaagcttacatgaacaaggtagagctggagtctcgcctggaagggctgaccgacgagatcaacttcctcaggcagctatatgaagaggagatccgggagctgcagtcccagatctcggacacatctgtggtgctgtccatggacaacagccgctccctggacatggacagcatcattgctgaggtcaaggcacaaaagactgagatctctgagatgaaccggaacatcagccggctccaggctgagattgagggcctcaaaggccagagggcttccctggaggccgccattgcagatgccgagcagcgtggagagctggccattaaggatgccaacgccaagttgtccgagctggaggccgccctgcagcgggccaagcaggacatggcgcggcagctgcgtgagtaccaggagctgatgaacgtcaagctggccctggacatcgagatcgccacctacaggaagctgctggagggcgaggagagccggctggagtctgggatgcagaacatgagtattcatacgaagaccaccagcggctatgcaggtggtctgagctcggcctatgggggcctcacaagccccggcctcagctacagcctgggctccagctttggctctggcgcgggctccagctccttcagccgcaccagctcctccagggccgtggttgtgaagaagatcgagacacgtgatgggaagctggtgtctgagtcctctgacgtcctgcccaagtgaacagctgcggcagcccctcccagcctacccctcctgcgctgccccagagcctgggaaggaggccgctatgcagggtagcactgggaacaggagacccacctgaggctcagccctagccctcagcccacctggggagtttactacctggggaccccccttgcccatggggccattcaacgcctccgggccattgaacgcctccg

SEQ ID NO: 734868 - DNA, 2504 bp, Homo sapiens
ggcattgtcaatctgcagaacgatgcgggcattgtccacagtatttgcgaagatctggagggattgtagagagaggttgttccatgaatagaaagccagggatgggtggggtgagtgtgtaaaaagtgttatgtatcctagtgaaaacttcctggtcccaggaatagccagaggctctccctggacacctatcccttttcatctagccccaccccattccctcctttcctggattcccagatcccagcactctgcccctcttgggaagcctcagcaggctggctagctggctggcctgcctgcccagaagtgagtcgctactaacaagtcctcttcctggccctctcctggcattttttccctagtgcacctggtcactctgggccccctacaccctggattggctcctcccaaaggaaggcctcttgtttactcctagatgactcagccttagccacatccgcttaaccctccaatagtccccattccgccagagccggtgtctcctcctctttacaggcctttccttacctccctccatgctgtccacttcctctgtaaagctctcaaccctgtccccttccccctctctcctgggaaagagccctcccatgcctagctgctgctcttagggaccctgtggctaggtgcgcggatggaaatccaggtatgcccaaccccctcccggtggagtaggggttgggtggttatggaatgacggaaagaggcaaaggagtgtataattggagggtcagacaaggctgggagttgaggtccctcctaccccttacctgagccctcaggtcctcgatgatcttgaagtaatggctccagtctctgacctggggtcccttcttctccaagtgctcccggattttgctctccagcctccggttctcggtctccaggctcctcactctttctaggatctccgcctggttcggcccgcctgcctccactcctgcctctaccatgtccatcagggtgacccagaagtcctacaaggtgtccacctctggcccccgggccttcagcagccgctcctacacgagtgggcccggttcccgcatcagctcctcgagcttctcccgagtgggcagcagcaactttcgcggtggcctgggcggcggctatggtggggccagcggcatgggaggcatcaccgcagttacggtcaaccagagcctgctgagcccccttgtcctggaggtggaccccaacatccaggccgtgcgcacccaggagaaggagcagatcaagaccctcaacaacaagtttgcctccttcatagacaaggtacggttcctggagcagcagaacaagatgctggagaccaagtggagcctcctgcagcagcagaagacggctcgaagcaacatggacaacatgttcgagagctacatcaacaaccttaggcggcagctggagactctgggccaggagaagctgaagctggaggcggagcttggcaacatgcaggggctggtggaggacttcaagaacaagtatgaggatgagatcaataagcgtacagagatggagaacgaatttgtcctcatcaagaaggatgtggatgaagcttacatgaacaaggtagagctggagtctcgcctggaagggctgaccgacgagatcaacttcctcaggcagctatatgaagaggagatccgggagctgcagtcccagatctcggacacatctgtggtgctgtccatggacaacagccgctccctggacatggacagcatcattgctgaggtcaaggcacaaaagactgagatctctgagatgaaccggaacatcagccggctccaggctgagattgagggcctcaaaggccagagggcttccctggaggccgccattgcagatgccgagcagcgtggagagctggccattaaggatgccaacgccaagttgtccgagctggaggccgccctgcagcgggccaagcaggacatggcgcggcagctgcgtgagtaccaggagctgatgaacgtcaagctggccctggacatcgagatcgccacctacaggaagctgctggagggcgaggagagccggctggagtctgggatgcagaacatgagtattcatacgaagaccaccagcggctatgcaggtggtctgagctcggcctatgggggcctcacaagccccggcctcagctacagcctgggctccagctttggctctggcgcgggctccagctccttcagccgcaccagctcctccagggccgtggttgtgaagaagatcgagacacgtgatgggaagctggtgtctgagtcctctgacgtcctgcccaagtgaacagctgcggcagcccctcccagcctacccctcctgcgctgccccagagcctgggaaggaggccgctatgcagggtagcactgggaacaggagacccacctgaggctcagccctagccctcagcccacctggggagtttactacctggggaccccccttgcccatgattgggccaggggggggtaccgagg

SEQ ID NO: 734869 - DNA, 2377 bp, Homo sapiens
  misc_feature (2345)..(2345): n is a, c, g, or t
  misc_feature (2358)..(2358): n is a, c, g, or t
  misc_feature (2362)..(2362): n is a, c, g, or t
  misc_feature (2377)..(2377): n is a, c, g, or t
ggcattgtcaatctgcagaacgatgcgggcattgtccacagtatttgcgaagatctggagggattgtagagagaggttgttccatgaatagaaagccagggatgggtggggtgagtgtgtaaaaagtgttatgtatcctagtgaaaacttcctggtcccaggaatagccagaggctctccctggacacctatcccttttcatctagccccaccccattccctcctttcctggattcccagatcccagcactctgcccctcttgggaagcctcagcaggctggctagctggctggcctgcctgcccagaagtgagtcgctactaacaagtcctcttcctggccctctcctggcattttttccctagtgcacctggtcactctgggccccctacaccctggattggctcctcccaaaggaaggcctcttgtttactcctagatgactcagccttagccacatccgcttaaccctccaatagtccccattccgccagagccggtgtctcctcctctttacaggcctttccttacctccctccatgctgtccacttcctctgtaaagctctcaaccctgtccccttccccctctctcctgggaaagagccctcccatgcctagctgctgctcttagggaccctgtggctaggtgcgcggatggaaatccaggtatgcccaaccccctcccggtggagtaggggttgggtggttatggaatgacggaaagaggcaaaggagtgtataattggagggtcagacaaggctgggagttgaggtccctcctaccccttacctgagccctcaggtcctcgatgatcttgaagtaatggctccagtctctgacctggggtcccttcttctccaagtgctcccggattttgctctccagcctccggttctcggtctccaggctcctcactctttctaggatctccgcctggttcggcccgcctgcctccactcctgcctctaccatgtccatcagggtgacccagaagtcctacaaggtgtccacctctggcccccgggccttcagcagccgctcctacacgagtgggcccggttcccgcatcagctcctcgagcttctcccgagtgggcagcagcaactttcgcggtggcctgggcggcggctatggtggggccagcggcatgggaggcatcaccgcagttacggtcaaccagagcctgctgagcccccttgtcctggaggtggaccccaacatccaggccgtgcgcacccaggagaaggagcagatcaagaccctcaacaacaagtttgcctccttcatagacaaggtacggttcctggagcagcagaacaagatgctggagaccaagtggagcctcctgcagcagcagaagacggctcgaagcaacatggacaacatgttcgagagctacatcaacaaccttaggcggcagctggagactctgggccaggagaagctgaagctggaggcggagcttggcaacatgcaggggctggtggaggacttcaagaacaagtatgaggatgagatcaataagcgtacagagatggagaacgaatttgtcctcatcaagaaggatgtggatgaagcttacatgaacaaggtagagctggagtctcgcctggaagggctgaccgacgagatcaacttcctcaggcagctatatgaagaggagatccgggagctgcagtcccagatctcggacacatctgtggtgctgtccatggacaacagccgctccctggacatggacagcatcattgctgaggtcaaggcacaaaagactgagatctctgagatgaaccggaacatcagccggctccaggctgagattgagggcctcaaaggccagagggcttccctggaggccgccattgcagatgccgagcagcgtggagagctggccattaaggatgccaacgccaagttgtccgagctggaggccgccctgcagcgggccaagcaggacatggcgcggcagctgcgtgagtaccaggagctgatgaacgtcaagctggccctggacatcgagatcgccacctacaggaagctgctggagggcgaggagagccggctggagtctgggatgcagaacatgagtattcatacgaagaccaccagcggctatgcaggtggtctgagctcggcctatgggggcctcacaagccccggcctcagctacagcctgggctccagctttggctctggcgcgggctccagctccttcagccgcaccagctcctccagggccgtggttgtgaagaagatcgagacacgtgatgggaagctggtgtctgagtcctctgacgtcctgcccaagtgaacagctgcggcagcccctcccagcctaccccnggggcctccgaanaagnaaaagctcgaattgn

SEQ ID NO: 734870 - DNA, 2801 bp, Homo sapiens
ggcattgtcaatctgcagaacgatgcgggcattgtccacagtatttgcgaagatctggagggattgtagagagaggttgttccatgaatagaaagccagggatgggtggggtgagtgtgtaaaaagtgttatgtatcctagtgaaaacttcctggtcccaggaatagccagaggctctccctggacacctatcccttttcatctagccccaccccattccctcctttcctggattcccagatcccagcactctgcccctcttgggaagcctcagcaggctggctagctggctggcctgcctgcccagaagtgagtcgctactaacaagtcctcttcctggccctctcctggcattttttccctagtgcacctggtcactctgggccccctacaccctggattggctcctcccaaaggaaggcctcttgtttactcctagatgactcagccttagccacatccgcttaaccctccaatagtccccattccgccagagccggtgtctcctcctctttacaggcctttccttacctccctccatgctgtccacttcctctgtaaagctctcaaccctgtccccttccccctctctcctgggaaagagccctcccatgcctagctgctgctcttagggaccctgtggctaggtgcgcggatggaaatccaggtatgcccaaccccctcccggtggagtaggggttgggtggttatggaatgacggaaagaggcaaaggagtgtataattggagggtcagacaaggctgggagttgaggtccctcctaccccttacctgagccctcaggtcctcgatgatcttgaagtaatggctccagtctctgacctggggtcccttcttctccaagtgctcccggattttgctctccagcctccggttctcggtctccaggctcctcactctttctaggatctccgcctggttcggcccgcctgcctccactcctgcctctaccatgtccatcagggtgacccagaagtcctacaaggtgtccacctctggcccccgggccttcagcagccgctcctacacgagtgggcccggttcccgcatcagctcctcgagcttctcccgagtgggcagcagcaactttcgcggtggcctgggcggcggctatggtggggccagcggcatgggaggcatcaccgcagttacggtcaaccagagcctgctgagcccccttgtcctggaggtggaccccaacatccaggccgtgcgcacccaggagaaggagcagatcaagaccctcaacaacaagtttgcctccttcatagacaaggtacggttcctggagcagcagaacaagatgctggagaccaagtggagcctcctgcagcagcagaagacggctcgaagcaacatggacaacatgttcgagagctacatcaacaaccttaggcggcagctggagactctgggccaggagaagctgaagctggaggcggagcttggcaacatgcaggggctggtggaggacttcaagaacaagtatgaggatgagatcaataagcgtacagagatggagaacgaatttgtcctcatcaagaaggatgtggatgaagcttacatgaacaaggtagagctggagtctcgcctggaagggctgaccgacgagatcaacttcctcaggcagctatatgaagaggagatccgggagctgcagtcccagatctcggacacatctgtggtgctgtccatggacaacagccgctccctggacatggacagcatcattgctgaggtcaaggcacaaaagactgagatctctgagatgaaccggaacatcagccggctccaggctgagattgagggcctcaaaggccagagggcttccctggaggccgccattgcagatgccgagcagcgtggagagctggccattaaggatgccaacgccaagttgtccgagctggaggccgccctgcagcgggccaagcaggacatggcgcggcagctgcgtgagtaccaggagctgatgaacgtcaagctggccctggacatcgagatcgccacctacaggaagctgctggagggcgaggagagccggctggagtctgggatgcagaacatgagtattcatacgaagaccaccagcggctatgcaggtggtctgagctcggcctatgggggcctcacaagccccggcctcagctacagcctgggctccagctttggctctggcgcgggctccagctccttcagccgcaccagctcctccagggccgtggttgtgaagaagatcgagacacgtgatgggaagctggtgtctgagtcctctgacgtcctgcccaagtcgcctccagggccgtggttgtgaagaagatcgagacacgtgatgggaagctggtgtctgagtcctctgacgtcctgcccaagtgaacagctgcggcagcccctcccagcctacccctcctgcgctgccccagagcctgggaaggaggccgctatgcagggtagcactgggaacaggagacccacctgaggctcagccctagccctcagcccacctggggagtttactacctggggaccccccttgcccatgcctccagctacaaaacaattcaattgctttttttttttggtccaaaataaaacctcagctagctctgccaaaacaaacacaaaacaacacacacaacaaacaacaaaaaacaacaaccacacacacaaacacacacaaccaagagagggggcgcgcgccgccaaaaagagagagaccacccccaggggggcgcacgcaaacacagcagcgaacccccacgctgtggagcacaaaagggg

SEQ ID NO: 734871 - DNA, 2746 bp, Homo sapiens
  misc_feature (2553)..(2555): n is a, c, g, or t
ggcattgtcaatctgcagaacgatgcgggcattgtccacagtatttgcgaagatctggagggattgtagagagaggttgttccatgaatagaaagccagggatgggtggggtgagtgtgtaaaaagtgttatgtatcctagtgaaaacttcctggtcccaggaatagccagaggctctccctggacacctatcccttttcatctagccccaccccattccctcctttcctggattcccagatcccagcactctgcccctcttgggaagcctcagcaggctggctagctggctggcctgcctgcccagaagtgagtcgctactaacaagtcctcttcctggccctctcctggcattttttccctagtgcacctggtcactctgggccccctacaccctggattggctcctcccaaaggaaggcctcttgtttactcctagatgactcagccttagccacatccgcttaaccctccaatagtccccattccgccagagccggtgtctcctcctctttacaggcctttccttacctccctccatgctgtccacttcctctgtaaagctctcaaccctgtccccttccccctctctcctgggaaagagccctcccatgcctagctgctgctcttagggaccctgtggctaggtgcgcggatggaaatccaggtatgcccaaccccctcccggtggagtaggggttgggtggttatggaatgacggaaagaggcaaaggagtgtataattggagggtcagacaaggctgggagttgaggtccctcctaccccttacctgagccctcaggtcctcgatgatcttgaagtaatggctccagtctctgacctggggtcccttcttctccaagtgctcccggattttgctctccagcctccggttctcggtctccaggctcctcactctttctaggatctccgcctggttcggcccgcctgcctccactcctgcctctaccatgtccatcagggtgacccagaagtcctacaaggtgtccacctctggcccccgggccttcagcagccgctcctacacgagtgggcccggttcccgcatcagctcctcgagcttctcccgagtgggcagcagcaactttcgcggtggcctgggcggcggctatggtggggccagcggcatgggaggcatcaccgcagttacggtcaaccagagcctgctgagcccccttgtcctggaggtggaccccaacatccaggccgtgcgcacccaggagaaggagcagatcaagaccctcaacaacaagtttgcctccttcatagacaaggtacggttcctggagcagcagaacaagatgctggagaccaagtggagcctcctgcagcagcagaagacggctcgaagcaacatggacaacatgttcgagagctacatcaacaaccttaggcggcagctggagactctgggccaggagaagctgaagctggaggcggagcttggcaacatgcaggggctggtggaggacttcaagaacaagtatgaggatgagatcaataagcgtacagagatggagaacgaatttgtcctcatcaagaaggatgtggatgaagcttacatgaacaaggtagagctggagtctcgcctggaagggctgaccgacgagatcaacttcctcaggcagctatatgaagaggagatccgggagctgcagtcccagatctcggacacatctgtggtgctgtccatggacaacagccgctccctggacatggacagcatcattgctgaggtcaaggcacaaaagactgagatctctgagatgaaccggaacatcagccggctccaggctgagattgagggcctcaaaggccagagggcttccctggaggccgccattgcagatgccgagcagcgtggagagctggccattaaggatgccaacgccaacgggccaagcaggacatggcgcggcagctgcgtgagtaccaggagctgatgaacgtcaagctggccctggacatcgagatcgccacctacaggaagctgctggagggcgaggagagccggctggagtctgggatgcagaacatgagtattcatacgaagaccaccagcggctatgcaggtggtctgagctcggcctatgggggcctcacaagccccggcctcagctacagcctgggctccagctttggctctggcgcgggctccagctccttcagccgcaccagctcctccagggccgtggttgtgaagaagatcgagacacgtgatgggaagctggtgtctgagtcctctgacgtcctgcccaagtgaacagctgcggcagcccctcccagcctacccctcctgcgctgccccagagcctgggaaggaggccgctatgcagggtagcactgggaacaggagacccacctgaggctcagccctagccctcagcccacctggggagtttactacctggggaccccccttgcccatgcctccagctacaaaacaattcaattgctttttttttttggtccaaaataaaacctcagctagctctgccaacaaaaaacaaaacaaacaaaaaaaaacaaannncgcgggctaaaatcccgggggcagtacgtccccttttggcacgggcctagagggataaaaagacccgggacaacgcggaggaagcggcggcttggcgccttctgggtgacgaaacccagagttcccgcaacgttgtgaccttggtgtatacatcttagcgcggacatactctcacgcactcacctcacatc

SEQ ID NO: 734872 - DNA, 2666 bp, Homo sapiens
  misc_feature (2539)..(2539): n is a, c, g, or t
ggcattgtcaatctgcagaacgatgcgggcattgtccacagtatttgcgaagatctggagggattgtagagagaggttgttccatgaatagaaagccagggatgggtggggtgagtgtgtaaaaagtgttatgtatcctagtgaaaacttcctggtcccaggaatagccagaggctctccctggacacctatcccttttcatctagccccaccccattccctcctttcctggattcccagatcccagcactctgcccctcttgggaagcctcagcaggctggctagctggctggcctgcctgcccagaagtgagtcgctactaacaagtcctcttcctggccctctcctggcattttttccctagtgcacctggtcactctgggccccctacaccctggattggctcctcccaaaggaaggcctcttgtttactcctagatgactcagccttagccacatccgcttaaccctccaatagtccccattccgccagagccggtgtctcctcctctttacaggcctttccttacctccctccatgctgtccacttcctctgtaaagctctcaaccctgtccccttccccctctctcctgggaaagagccctcccatgcctagctgctgctcttagggaccctgtggctaggtgcgcggatggaaatccaggtatgcccaaccccctcccggtggagtaggggttgggtggttatggaatgacggaaagaggcaaaggagtgtataattggagggtcagacaaggctgggagttgaggtccctcctaccccttacctgagccctcaggtcctcgatgatcttgaagtaatggctccagtctctgacctggggtcccttcttctccaagtgctcccggattttgctctccagcctccggttctcggtctccaggctcctcactctttctaggatctccgcctggttcggcccgcctgcctccactcctgcctctaccatgtccatcagggtgacccagaagtcctacaaggtgtccacctctggcccccgggccttcagcagccgctcctacacgagtgggcccggttcccgcatcagctcctcgagcttctcccgagtgggcagcagcaactttcgcggtggcctgggcggcggctatggtggggccagcggcatgggaggcatcaccgcagttacggtcaaccagagcctgctgagcccccttgtcctggaggtggaccccaacatccaggccgtgcgcacccaggagaaggagcagatcaagaccctcaacaacaagtttgcctccttcatagacaaggtacggttcctggagcagcagaacaagatgctggagaccaagtggagcctcctgcagcagcagaagacggctcgaagcaacatggacaacatgttcgagagctacatcaacaaccttaggcggcagctggagactctgggccaggagaagctgaagctggaggcggagcttggcaacatgcaggggctggtggaggacttcaagaacaagtatgaggatgagatcaataagcgtacagagatggagaacgaatttgtcctcatcaagaaggatgtggatgaagcttacatgaacaaggtagagctggagtctcgcctggaagggctgaccgacgagatcaacttcctcaggcagctatatgaagaggagatccgggagctgcagtcccagatctcggacacatctgtggtgctgtccatggacaacagccgctccctggacatggacagcatcattgctgaggtcaaggcacaaaagactgagatctctgagatgaaccggaacatcagccggctccaggctgagattgagggcctcaaaggccagagggcttccctggaggccgccattgcagatgccgagcagcgtggagagctggccattaaggatgccaacgccaacgggccaagcaggacatggcgcggcagctgcgtgagtaccaggagctgatgaacgtcaagctggccctggacatcgagatcgccacctacaggaagctgctggagggcgaggagagccggctggagtctgggatgcagaacatgagtattcatacgaagaccaccagcggctatgcaggtggtctgagctcggcctatgggggcctcacaagccccggcctcagctacagcctgggctccagctttggctctggcgcgggctccagctccttcagccgcaccagctcctccagggccgtggttgtgaagaagatcgagacacgtgatgggaagctggtgtctgagtcctctgacgtcctgcccaagtgaacagctgcggcagcccctcccagcctacccctcctgcgctgccccagagcctgggaaggaggccgctatgcagggtagcactgggaacaggagacccacctgaggctcagccctagccctcagcccacctggggagtttactacctggggaccccccttgcccatgcctccagctacaaaacaattcaattgctttttttttttggtccaaaataaaacctcagctagctctgccaaaaaaaaaaaacatacanaaaaaaaagggggggttttttggggggggggaaaaagggttttgaagggaaggggtaagggtttctggacccgttttgttaaagggggaaatgggggccccaagggggggaaaaaggaagggggacg

SEQ ID NO: 734873 - DNA, 2932 bp, Homo sapiens
  misc_feature (2546)..(2546): n is a, c, g, or t
ggcattgtcaatctgcagaacgatgcgggcattgtccacagtatttgcgaagatctggagggattgtagagagaggttgttccatgaatagaaagccagggatgggtggggtgagtgtgtaaaaagtgttatgtatcctagtgaaaacttcctggtcccaggaatagccagaggctctccctggacacctatcccttttcatctagccccaccccattccctcctttcctggattcccagatcccagcactctgcccctcttgggaagcctcagcaggctggctagctggctggcctgcctgcccagaagtgagtcgctactaacaagtcctcttcctggccctctcctggcattttttccctagtgcacctggtcactctgggccccctacaccctggattggctcctcccaaaggaaggcctcttgtttactcctagatgactcagccttagccacatccgcttaaccctccaatagtccccattccgccagagccggtgtctcctcctctttacaggcctttccttacctccctccatgctgtccacttcctctgtaaagctctcaaccctgtccccttccccctctctcctgggaaagagccctcccatgcctagctgctgctcttagggaccctgtggctaggtgcgcggatggaaatccaggtatgcccaaccccctcccggtggagtaggggttgggtggttatggaatgacggaaagaggcaaaggagtgtataattggagggtcagacaaggctgggagttgaggtccctcctaccccttacctgagccctcaggtcctcgatgatcttgaagtaatggctccagtctctgacctggggtcccttcttctccaagtgctcccggattttgctctccagcctccggttctcggtctccaggctcctcactctttctaggatctccgcctggttcggcccgcctgcctccactcctgcctctaccatgtccatcagggtgacccagaagtcctacaaggtgtccacctctggcccccgggccttcagcagccgctcctacacgagtgggcccggttcccgcatcagctcctcgagcttctcccgagtgggcagcagcaactttcgcggtggcctgggcggcggctatggtggggccagcggcatgggaggcatcaccgcagttacggtcaaccagagcctgctgagcccccttgtcctggaggtggaccccaacatccaggccgtgcgcacccaggagaaggagcagatcaagaccctcaacaacaagtttgcctccttcatagacaaggtacggttcctggagcagcagaacaagatgctggagaccaagtggagcctcctgcagcagcagaagacggctcgaagcaacatggacaacatgttcgagagctacatcaacaaccttaggcggcagctggagactctgggccaggagaagctgaagctggaggcggagcttggcaacatgcaggggctggtggaggacttcaagaacaagtatgaggatgagatcaataagcgtacagagatggagaacgaatttgtcctcatcaagaaggatgtggatgaagcttacatgaacaaggtagagctggagtctcgcctggaagggctgaccgacgagatcaacttcctcaggcagctatatgaagaggagatccgggagctgcagtcccagatctcggacacatctgtggtgctgtccatggacaacagccgctccctggacatggacagcatcattgctgaggtcaaggcacaaaagactgagatctctgagatgaaccggaacatcagccggctccaggctgagattgagggcctcaaaggccagagggcttccctggaggccgccattgcagatgccgagcagcgtggagagctggccattaaggatgccaacgccaacgggccaagcaggacatggcgcggcagctgcgtgagtaccaggagctgatgaacgtcaagctggccctggacatcgagatcgccacctacaggaagctgctggagggcgaggagagccggctggagtctgggatgcagaacatgagtattcatacgaagaccaccagcggctatgcaggtggtctgagctcggcctatgggggcctcacaagccccggcctcagctacagcctgggctccagctttggctctggcgcgggctccagctccttcagccgcaccagctcctccagggccgtggttgtgaagaagatcgagacacgtgatgggaagctggtgtctgagtcctctgacgtcctgcccaagtgaacagctgcggcagcccctcccagcctacccctcctgcgctgccccagagcctgggaaggaggccgctatgcagggtagcactgggaacaggagacccacctgaggctcagccctagccctcagcccacctggggagtttactacctggggaccccccttgcccatgcctccagctacaaaacaattcaattgctttttttttttggtccaaaataaaacctcagctagctctgccaaaaaaaaaaacaaaaaaaaaaaaanaaatttgggggtctggtggtgtgcgggtggaatggcctgtgagtccctctagctgtccttaacctgcagcccaaattatccacttgtggaggggatcttgggggcatcctggagccccaggagtcccggggaagaaaggctgggagctggagaagaggaggagaagcaatgcccagcctcatagctgcttgcttacacactcacaccccagctgcacctggctcccaaacactcctcgcctacccacgtttcctcacacacactcacacccgaatcatacagaggtgtgctttcaaatgcacacacacatacattcactcagcaaataggtgcagactccccaaaacaaacccagtctctgatcccacatgaagggatcctctaga

SEQ ID NO: 734874 - DNA, 3221 bp, Homo sapiens
  misc_feature (2546)..(2546): n is a, c, g, or t
  misc_feature (2560)..(2560): n is a, c, g, or t
ggcattgtcaatctgcagaacgatgcgggcattgtccacagtatttgcgaagatctggagggattgtagagagaggttgttccatgaatagaaagccagggatgggtggggtgagtgtgtaaaaagtgttatgtatcctagtgaaaacttcctggtcccaggaatagccagaggctctccctggacacctatcccttttcatctagccccaccccattccctcctttcctggattcccagatcccagcactctgcccctcttgggaagcctcagcaggctggctagctggctggcctgcctgcccagaagtgagtcgctactaacaagtcctcttcctggccctctcctggcattttttccctagtgcacctggtcactctgggccccctacaccctggattggctcctcccaaaggaaggcctcttgtttactcctagatgactcagccttagccacatccgcttaaccctccaatagtccccattccgccagagccggtgtctcctcctctttacaggcctttccttacctccctccatgctgtccacttcctctgtaaagctctcaaccctgtccccttccccctctctcctgggaaagagccctcccatgcctagctgctgctcttagggaccctgtggctaggtgcgcggatggaaatccaggtatgcccaaccccctcccggtggagtaggggttgggtggttatggaatgacggaaagaggcaaaggagtgtataattggagggtcagacaaggctgggagttgaggtccctcctaccccttacctgagccctcaggtcctcgatgatcttgaagtaatggctccagtctctgacctggggtcccttcttctccaagtgctcccggattttgctctccagcctccggttctcggtctccaggctcctcactctttctaggatctccgcctggttcggcccgcctgcctccactcctgcctctaccatgtccatcagggtgacccagaagtcctacaaggtgtccacctctggcccccgggccttcagcagccgctcctacacgagtgggcccggttcccgcatcagctcctcgagcttctcccgagtgggcagcagcaactttcgcggtggcctgggcggcggctatggtggggccagcggcatgggaggcatcaccgcagttacggtcaaccagagcctgctgagcccccttgtcctggaggtggaccccaacatccaggccgtgcgcacccaggagaaggagcagatcaagaccctcaacaacaagtttgcctccttcatagacaaggtacggttcctggagcagcagaacaagatgctggagaccaagtggagcctcctgcagcagcagaagacggctcgaagcaacatggacaacatgttcgagagctacatcaacaaccttaggcggcagctggagactctgggccaggagaagctgaagctggaggcggagcttggcaacatgcaggggctggtggaggacttcaagaacaagtatgaggatgagatcaataagcgtacagagatggagaacgaatttgtcctcatcaagaaggatgtggatgaagcttacatgaacaaggtagagctggagtctcgcctggaagggctgaccgacgagatcaacttcctcaggcagctatatgaagaggagatccgggagctgcagtcccagatctcggacacatctgtggtgctgtccatggacaacagccgctccctggacatggacagcatcattgctgaggtcaaggcacaaaagactgagatctctgagatgaaccggaacatcagccggctccaggctgagattgagggcctcaaaggccagagggcttccctggaggccgccattgcagatgccgagcagcgtggagagctggccattaaggatgccaacgccaacgggccaagcaggacatggcgcggcagctgcgtgagtaccaggagctgatgaacgtcaagctggccctggacatcgagatcgccacctacaggaagctgctggagggcgaggagagccggctggagtctgggatgcagaacatgagtattcatacgaagaccaccagcggctatgcaggtggtctgagctcggcctatgggggcctcacaagccccggcctcagctacagcctgggctccagctttggctctggcgcgggctccagctccttcagccgcaccagctcctccagggccgtggttgtgaagaagatcgagacacgtgatgggaagctggtgtctgagtcctctgacgtcctgcccaagtgaacagctgcggcagcccctcccagcctacccctcctgcgctgccccagagcctgggaaggaggccgctatgcagggtagcactgggaacaggagacccacctgaggctcagccctagccctcagcccacctggggagtttactacctggggaccccccttgcccatgcctccagctacaaaacaattcaattgctttttttttttggtccaaaataaaacctcagctagctctgccaaaaaaaaaaacaaaaaaaaaaaaanaaaaaaaaaaaaanaaaaaaaaaaaaaaaaaaaaaaaaaaaacaacaagcagccacaagaaaacccaaccaacgagacaaaacaaaaacagcaacaaaaaaaaaagaacagagccgcggcgccggctgcacacatacacatcgcagggcggcgccccagcaccacagcaccccccacgcctatacaggagcggcggcccaccaacccggcccagctcctactaacacggacgcccgggccggccacaccccaccggcacggccgaacaccaaccacccagcaggcaatgtggcggcacccccacccgtggcgcgagtacagatcaggccagcacgaacccacccaatcagcagtaatggcgctacggagtactaaaatataagaggagcgctgcaagaaccacccacaccatctcgtcgggcagccagaacgccccgcgacgaccgcagactacatccatccacgggcggacggccaacagagtccgaggctggcgacgacgtcggacggcccgcggcaccgaggcgtcgacgaaacgacgccggaagacacactgcgagcaggcgaccagactgcagccccacgcccatcatggacacaagcgactcggacgacgcacgccatagatcaggtcccagaccaccttaacccagacggacagcgcggagacaagca

SEQ ID NO: 734875 - DNA, 3122 bp, Homo sapiens
  misc_feature (2546)..(2546): n is a, c, g, or t
  misc_feature (2560)..(2560): n is a, c, g, or t
  misc_feature (3122)..(3122): n is a, c, g, or t
ggcattgtcaatctgcagaacgatgcgggcattgtccacagtatttgcgaagatctggagggattgtagagagaggttgttccatgaatagaaagccagggatgggtggggtgagtgtgtaaaaagtgttatgtatcctagtgaaaacttcctggtcccaggaatagccagaggctctccctggacacctatcccttttcatctagccccaccccattccctcctttcctggattcccagatcccagcactctgcccctcttgggaagcctcagcaggctggctagctggctggcctgcctgcccagaagtgagtcgctactaacaagtcctcttcctggccctctcctggcattttttccctagtgcacctggtcactctgggccccctacaccctggattggctcctcccaaaggaaggcctcttgtttactcctagatgactcagccttagccacatccgcttaaccctccaatagtccccattccgccagagccggtgtctcctcctctttacaggcctttccttacctccctccatgctgtccacttcctctgtaaagctctcaaccctgtccccttccccctctctcctgggaaagagccctcccatgcctagctgctgctcttagggaccctgtggctaggtgcgcggatggaaatccaggtatgcccaaccccctcccggtggagtaggggttgggtggttatggaatgacggaaagaggcaaaggagtgtataattggagggtcagacaaggctgggagttgaggtccctcctaccccttacctgagccctcaggtcctcgatgatcttgaagtaatggctccagtctctgacctggggtcccttcttctccaagtgctcccggattttgctctccagcctccggttctcggtctccaggctcctcactctttctaggatctccgcctggttcggcccgcctgcctccactcctgcctctaccatgtccatcagggtgacccagaagtcctacaaggtgtccacctctggcccccgggccttcagcagccgctcctacacgagtgggcccggttcccgcatcagctcctcgagcttctcccgagtgggcagcagcaactttcgcggtggcctgggcggcggctatggtggggccagcggcatgggaggcatcaccgcagttacggtcaaccagagcctgctgagcccccttgtcctggaggtggaccccaacatccaggccgtgcgcacccaggagaaggagcagatcaagaccctcaacaacaagtttgcctccttcatagacaaggtacggttcctggagcagcagaacaagatgctggagaccaagtggagcctcctgcagcagcagaagacggctcgaagcaacatggacaacatgttcgagagctacatcaacaaccttaggcggcagctggagactctgggccaggagaagctgaagctggaggcggagcttggcaacatgcaggggctggtggaggacttcaagaacaagtatgaggatgagatcaataagcgtacagagatggagaacgaatttgtcctcatcaagaaggatgtggatgaagcttacatgaacaaggtagagctggagtctcgcctggaagggctgaccgacgagatcaacttcctcaggcagctatatgaagaggagatccgggagctgcagtcccagatctcggacacatctgtggtgctgtccatggacaacagccgctccctggacatggacagcatcattgctgaggtcaaggcacaaaagactgagatctctgagatgaaccggaacatcagccggctccaggctgagattgagggcctcaaaggccagagggcttccctggaggccgccattgcagatgccgagcagcgtggagagctggccattaaggatgccaacgccaacgggccaagcaggacatggcgcggcagctgcgtgagtaccaggagctgatgaacgtcaagctggccctggacatcgagatcgccacctacaggaagctgctggagggcgaggagagccggctggagtctgggatgcagaacatgagtattcatacgaagaccaccagcggctatgcaggtggtctgagctcggcctatgggggcctcacaagccccggcctcagctacagcctgggctccagctttggctctggcgcgggctccagctccttcagccgcaccagctcctccagggccgtggttgtgaagaagatcgagacacgtgatgggaagctggtgtctgagtcctctgacgtcctgcccaagtgaacagctgcggcagcccctcccagcctacccctcctgcgctgccccagagcctgggaaggaggccgctatgcagggtagcactgggaacaggagacccacctgaggctcagccctagccctcagcccacctggggagtttactacctggggaccccccttgcccatgcctccagctacaaaacaattcaattgctttttttttttggtccaaaataaaacctcagctagctctgccaaaaaaaaaaacaaaaaaaaaaaaanaaaaaaaaaaaaanaaaaaaaaaaaaaaaaaaaaaaaagaggggggcgcgcgcgcgcccaagaaggttccccccgagggggcgcccagatacccgcgcggcccccgggttttggggaacaagggggggccccccaataggaggaggagccgcgccaattataatagcgacagcgggccggtgggcgccggcggcttatcacacaacggcgcaggcgaccgggggggaaaacagcgcggccaccgccgcggcgaaacccctcggggagagagggacaccctataaacccgcgaggcgggagggaacaaatatggtgggagaccaaaacattgcgctctccagaggggaatttataaacgcctctctatcgaggggagagacacattgtatcgcagtttgtttaaacgcgtctgtgtaaattacgggtgggggtcaaaacataagctgtgagagatatgttagctgagtgaggtgcgaaggaaaaaactgttgagaggtatacaataggggatatattagattatgtaagaaaaaaattattttatcaccccaggggacccgctttggaggagtaagn

SEQ ID NO: 734876 - DNA, 2555 bp, Homo sapiens
  misc_feature (2523)..(2523): n is a, c, g, or t
ggcattgtcaatctgcagaacgatgcgggcattgtccacagtatttgcgaagatctggagggattgtagagagaggttgttccatgaatagaaagccagggatgggtggggtgagtgtgtaaaaagtgttatgtatcctagtgaaaacttcctggtcccaggaatagccagaggctctccctggacacctatcccttttcatctagccccaccccattccctcctttcctggattcccagatcccagcactctgcccctcttgggaagcctcagcaggctggctagctggctggcctgcctgcccagaagtgagtcgctactaacaagtcctcttcctggccctctcctggcattttttccctagtgcacctggtcactctgggccccctacaccctggattggctcctcccaaaggaaggcctcttgtttactcctagatgactcagccttagccacatccgcttaaccctccaatagtccccattccgccagagccggtgtctcctcctctttacaggcctttccttacctccctccatgctgtccacttcctctgtaaagctctcaaccctgtccccttccccctctctcctgggaaagagccctcccatgcctagctgctgctcttagggaccctgtggctaggtgcgcggatggaaatccaggtatgcccaaccccctcccggtggagtaggggttgggtggttatggaatgacggaaagaggcaaaggagtgtataattggagggtcagacaaggctgggagttgaggtccctcctaccccttacctgagccctcaggtcctcgatgatcttgaagtaatggctccagtctctgacctggggtcccttcttctccaagtgctcccggattttgctctccagcctccggttctcggtctccaggctcctcactctttctaggatctccgcctggttcggcccgcctgcctccactcctgcctctaccatgtccatcagggtgacccagaagtcctacaaggtgtccacctctggcccccgggccttcagcagccgctcctacacgagtgggcccggttcccgcatcagctcctcgagcttctcccgagtgggcagcagcaactttcgcggtggcctgggcggcggctatggtggggccagcggcatgggaggcatcaccgcagttacggtcaaccagagcctgctgagcccccttgtcctggaggtggaccccaacatccaggccgtgcgcacccaggagaaggagcagatcaagaccctcaacaacaagtttgcctccttcatagacaaggtacggttcctggagcagcagaacaagatgctggagaccaagtggagcctcctgcagcagcagaagacggctcgaagcaacatggacaacatgttcgagagctacatcaacaaccttaggcggcagctggagactctgggccaggagaagctgaagctggaggcggagcttggcaacatgcaggggctggtggaggacttcaagaacaagtatgaggatgagatcaataagcgtacagagatggagaacgaatttgtcctcatcaagaaggatgtggatgaagcttacatgaacaaggtagagctggagtctcgcctggaagggctgaccgacgagatcaacttcctcaggcagctatatgaagaggagatccgggagctgcagtcccagatctcggacacatctgtggtgctgtccatggacaacagccgctccctggacatggacagcatcattgctgaggtcaaggcacaaaagactgagatctctgagatgaaccggaacatcagccggctccaggctgagattgagggcctcaaaggccagagggcttccctggaggccgccattgcagatgccgagcagcgtggagagctggccattaaggatgccaacgccaacgggccaagcaggacatggcgcggcagctgcgtgagtaccaggagctgatgaacgtcaagctggccctggacatcgagatcgccacctacaggaagctgctggagggcgaggagagccggctggagtctgggatgcagaacatgagtattcatacgaagaccaccagcggctatgcaggtggtctgagctcggcctatgggggcctcacaagccccggcctcagctacagcctgggctccagctttggctctggcgcgggctccagctccttcagccgcaccagctcctccagggccgtggttgtgaagaagatcgagacacgtgatgggaagctggtgtctgagtcctctgacgtcctgcccaagtgaacagctgcggcagcccctcccagcctacccctcctgcgctgccccagagcctgggaaggaggccgctatgcagggtagcactgggaacaggagacccacctgaggctcagccctagccctcagcccacctggggagtttactacctggggaccccccttgcccatgcctccagctacaaaacaattcaattgctttttttttttggtccaaaataaaacctcagctagctctgccaanggaaaaggcagcagacagaagaaaaagttttg

SEQ ID NO: 734877 - DNA, 3194 bp, Homo sapiens
  misc_feature (2533)..(2533): n is a, c, g, or t
ggcattgtcaatctgcagaacgatgcgggcattgtccacagtatttgcgaagatctggagggattgtagagagaggttgttccatgaatagaaagccagggatgggtggggtgagtgtgtaaaaagtgttatgtatcctagtgaaaacttcctggtcccaggaatagccagaggctctccctggacacctatcccttttcatctagccccaccccattccctcctttcctggattcccagatcccagcactctgcccctcttgggaagcctcagcaggctggctagctggctggcctgcctgcccagaagtgagtcgctactaacaagtcctcttcctggccctctcctggcattttttccctagtgcacctggtcactctgggccccctacaccctggattggctcctcccaaaggaaggcctcttgtttactcctagatgactcagccttagccacatccgcttaaccctccaatagtccccattccgccagagccggtgtctcctcctctttacaggcctttccttacctccctccatgctgtccacttcctctgtaaagctctcaaccctgtccccttccccctctctcctgggaaagagccctcccatgcctagctgctgctcttagggaccctgtggctaggtgcgcggatggaaatccaggtatgcccaaccccctcccggtggagtaggggttgggtggttatggaatgacggaaagaggcaaaggagtgtataattggagggtcagacaaggctgggagttgaggtccctcctaccccttacctgagccctcaggtcctcgatgatcttgaagtaatggctccagtctctgacctggggtcccttcttctccaagtgctcccggattttgctctccagcctccggttctcggtctccaggctcctcactctttctaggatctccgcctggttcggcccgcctgcctccactcctgcctctaccatgtccatcagggtgacccagaagtcctacaaggtgtccacctctggcccccgggccttcagcagccgctcctacacgagtgggcccggttcccgcatcagctcctcgagcttctcccgagtgggcagcagcaactttcgcggtggcctgggcggcggctatggtggggccagcggcatgggaggcatcaccgcagttacggtcaaccagagcctgctgagcccccttgtcctggaggtggaccccaacatccaggccgtgcgcacccaggagaaggagcagatcaagaccctcaacaacaagtttgcctccttcatagacaaggtacggttcctggagcagcagaacaagatgctggagaccaagtggagcctcctgcagcagcagaagacggctcgaagcaacatggacaacatgttcgagagctacatcaacaaccttaggcggcagctggagactctgggccaggagaagctgaagctggaggcggagcttggcaacatgcaggggctggtggaggacttcaagaacaagtatgaggatgagatcaataagcgtacagagatggagaacgaatttgtcctcatcaagaaggatgtggatgaagcttacatgaacaaggtagagctggagtctcgcctggaagggctgaccgacgagatcaacttcctcaggcagctatatgaagaggagatccgggagctgcagtcccagatctcggacacatctgtggtgctgtccatggacaacagccgctccctggacatggacagcatcattgctgaggtcaaggcacaaaagactgagatctctgagatgaaccggaacatcagccggctccaggctgagattgagggcctcaaaggccagagggcttccctggaggccgccattgcagatgccgagcagcgtggagagctggccattaaggatgccaacgccaacgggccaagcaggacatggcgcggcagctgcgtgagtaccaggagctgatgaacgtcaagctggccctggacatcgagatcgccacctacaggaagctgctggagggcgaggagagccggctggagtctgggatgcagaacatgagtattcatacgaagaccaccagcggctatgcaggtggtctgagctcggcctatgggggcctcacaagccccggcctcagctacagcctgggctccagctttggctctggcgcgggctccagctccttcagccgcaccagctcctccagggccgtggttgtgaagaagatcgagacacgtgatgggaagctggtgtctgagtcctctgacgtcctgcccaagtgaacagctgcggcagcccctcccagcctacccctcctgcgctgccccagagcctgggaaggaggccgctatgcagggtagcactgggaacaggagacccacctgaggctcagccctagccctcagcccacctggggagtttactacctggggaccccccttgcccatgcctccagctacaaaacaattcaattgctttttttttttggtccaaaataaaacctcagctagctctgccaaaaaaaaaaaanaaaaaaaaaaaaaaaaaaaaaaaaaaaacaacaagcagccacaagaaaacccaaccaacgagacaaaacaaaaacagcaacaaaaaaaaaagaacagagccgcggcgccggctgcacacatacacatcgcagggcggcgccccagcaccacagcaccccccacgcctatacaggagcggcggcccaccaacccggcccagctcctactaacacggacgcccgggccggccacaccccaccggcacggccgaacaccaaccacccagcaggcaatgtggcggcacccccacccgtggcgcgagtacagatcaggccagcacgaacccacccaatcagcagtaatggcgctacggagtactaaaatataagaggagcgctgcaagaaccacccacaccatctcgtcgggcagccagaacgccccgcgacgaccgcagactacatccatccacgggcggacggccaacagagtccgaggctggcgacgacgtcggacggcccgcggcaccgaggcgtcgacgaaacgacgccggaagacacactgcgagcaggcgaccagactgcagccccacgcccatcatggacacaagcgactcggacgacgcacgccatagatcaggtcccagaccaccttaacccagacggacagcgcggagacaagca

SEQ ID NO: 734878 - DNA, 3095 bp, Homo sapiens
  misc_feature (2533)..(2533): n is a, c, g, or t
  misc_feature (3095)..(3095): n is a, c, g, or t
ggcattgtcaatctgcagaacgatgcgggcattgtccacagtatttgcgaagatctggagggattgtagagagaggttgttccatgaatagaaagccagggatgggtggggtgagtgtgtaaaaagtgttatgtatcctagtgaaaacttcctggtcccaggaatagccagaggctctccctggacacctatcccttttcatctagccccaccccattccctcctttcctggattcccagatcccagcactctgcccctcttgggaagcctcagcaggctggctagctggctggcctgcctgcccagaagtgagtcgctactaacaagtcctcttcctggccctctcctggcattttttccctagtgcacctggtcactctgggccccctacaccctggattggctcctcccaaaggaaggcctcttgtttactcctagatgactcagccttagccacatccgcttaaccctccaatagtccccattccgccagagccggtgtctcctcctctttacaggcctttccttacctccctccatgctgtccacttcctctgtaaagctctcaaccctgtccccttccccctctctcctgggaaagagccctcccatgcctagctgctgctcttagggaccctgtggctaggtgcgcggatggaaatccaggtatgcccaaccccctcccggtggagtaggggttgggtggttatggaatgacggaaagaggcaaaggagtgtataattggagggtcagacaaggctgggagttgaggtccctcctaccccttacctgagccctcaggtcctcgatgatcttgaagtaatggctccagtctctgacctggggtcccttcttctccaagtgctcccggattttgctctccagcctccggttctcggtctccaggctcctcactctttctaggatctccgcctggttcggcccgcctgcctccactcctgcctctaccatgtccatcagggtgacccagaagtcctacaaggtgtccacctctggcccccgggccttcagcagccgctcctacacgagtgggcccggttcccgcatcagctcctcgagcttctcccgagtgggcagcagcaactttcgcggtggcctgggcggcggctatggtggggccagcggcatgggaggcatcaccgcagttacggtcaaccagagcctgctgagcccccttgtcctggaggtggaccccaacatccaggccgtgcgcacccaggagaaggagcagatcaagaccctcaacaacaagtttgcctccttcatagacaaggtacggttcctggagcagcagaacaagatgctggagaccaagtggagcctcctgcagcagcagaagacggctcgaagcaacatggacaacatgttcgagagctacatcaacaaccttaggcggcagctggagactctgggccaggagaagctgaagctggaggcggagcttggcaacatgcaggggctggtggaggacttcaagaacaagtatgaggatgagatcaataagcgtacagagatggagaacgaatttgtcctcatcaagaaggatgtggatgaagcttacatgaacaaggtagagctggagtctcgcctggaagggctgaccgacgagatcaacttcctcaggcagctatatgaagaggagatccgggagctgcagtcccagatctcggacacatctgtggtgctgtccatggacaacagccgctccctggacatggacagcatcattgctgaggtcaaggcacaaaagactgagatctctgagatgaaccggaacatcagccggctccaggctgagattgagggcctcaaaggccagagggcttccctggaggccgccattgcagatgccgagcagcgtggagagctggccattaaggatgccaacgccaacgggccaagcaggacatggcgcggcagctgcgtgagtaccaggagctgatgaacgtcaagctggccctggacatcgagatcgccacctacaggaagctgctggagggcgaggagagccggctggagtctgggatgcagaacatgagtattcatacgaagaccaccagcggctatgcaggtggtctgagctcggcctatgggggcctcacaagccccggcctcagctacagcctgggctccagctttggctctggcgcgggctccagctccttcagccgcaccagctcctccagggccgtggttgtgaagaagatcgagacacgtgatgggaagctggtgtctgagtcctctgacgtcctgcccaagtgaacagctgcggcagcccctcccagcctacccctcctgcgctgccccagagcctgggaaggaggccgctatgcagggtagcactgggaacaggagacccacctgaggctcagccctagccctcagcccacctggggagtttactacctggggaccccccttgcccatgcctccagctacaaaacaattcaattgctttttttttttggtccaaaataaaacctcagctagctctgccaaaaaaaaaaaanaaaaaaaaaaaaaaaaaaaaaaaagaggggggcgcgcgcgcgcccaagaaggttccccccgagggggcgcccagatacccgcgcggcccccgggttttggggaacaagggggggccccccaataggaggaggagccgcgccaattataatagcgacagcgggccggtgggcgccggcggcttatcacacaacggcgcaggcgaccgggggggaaaacagcgcggccaccgccgcggcgaaacccctcggggagagagggacaccctataaacccgcgaggcgggagggaacaaatatggtgggagaccaaaacattgcgctctccagaggggaatttataaacgcctctctatcgaggggagagacacattgtatcgcagtttgtttaaacgcgtctgtgtaaattacgggtgggggtcaaaacataagctgtgagagatatgttagctgagtgaggtgcgaaggaaaaaactgttgagaggtatacaataggggatatattagattatgtaagaaaaaaattattttatcaccccaggggacccgctttggaggagtaagn

SEQ ID NO: 734879 - DNA, 2678 bp, Homo sapiens
  misc_feature (2534)..(2534): n is a, c, g, or t
  misc_feature (2549)..(2550): n is a, c, g, or t
  misc_feature (2558)..(2558): n is a, c, g, or t
ggcattgtcaatctgcagaacgatgcgggcattgtccacagtatttgcgaagatctggagggattgtagagagaggttgttccatgaatagaaagccagggatgggtggggtgagtgtgtaaaaagtgttatgtatcctagtgaaaacttcctggtcccaggaatagccagaggctctccctggacacctatcccttttcatctagccccaccccattccctcctttcctggattcccagatcccagcactctgcccctcttgggaagcctcagcaggctggctagctggctggcctgcctgcccagaagtgagtcgctactaacaagtcctcttcctggccctctcctggcattttttccctagtgcacctggtcactctgggccccctacaccctggattggctcctcccaaaggaaggcctcttgtttactcctagatgactcagccttagccacatccgcttaaccctccaatagtccccattccgccagagccggtgtctcctcctctttacaggcctttccttacctccctccatgctgtccacttcctctgtaaagctctcaaccctgtccccttccccctctctcctgggaaagagccctcccatgcctagctgctgctcttagggaccctgtggctaggtgcgcggatggaaatccaggtatgcccaaccccctcccggtggagtaggggttgggtggttatggaatgacggaaagaggcaaaggagtgtataattggagggtcagacaaggctgggagttgaggtccctcctaccccttacctgagccctcaggtcctcgatgatcttgaagtaatggctccagtctctgacctggggtcccttcttctccaagtgctcccggattttgctctccagcctccggttctcggtctccaggctcctcactctttctaggatctccgcctggttcggcccgcctgcctccactcctgcctctaccatgtccatcagggtgacccagaagtcctacaaggtgtccacctctggcccccgggccttcagcagccgctcctacacgagtgggcccggttcccgcatcagctcctcgagcttctcccgagtgggcagcagcaactttcgcggtggcctgggcggcggctatggtggggccagcggcatgggaggcatcaccgcagttacggtcaaccagagcctgctgagcccccttgtcctggaggtggaccccaacatccaggccgtgcgcacccaggagaaggagcagatcaagaccctcaacaacaagtttgcctccttcatagacaaggtacggttcctggagcagcagaacaagatgctggagaccaagtggagcctcctgcagcagcagaagacggctcgaagcaacatggacaacatgttcgagagctacatcaacaaccttaggcggcagctggagactctgggccaggagaagctgaagctggaggcggagcttggcaacatgcaggggctggtggaggacttcaagaacaagtatgaggatgagatcaataagcgtacagagatggagaacgaatttgtcctcatcaagaaggatgtggatgaagcttacatgaacaaggtagagctggagtctcgcctggaagggctgaccgacgagatcaacttcctcaggcagctatatgaagaggagatccgggagctgcagtcccagatctcggacacatctgtggtgctgtccatggacaacagccgctccctggacatggacagcatcattgctgaggtcaaggcacaaaagactgagatctctgagatgaaccggaacatcagccggctccaggctgagattgagggcctcaaaggccagagggcttccctggaggccgccattgcagatgccgagcagcgtggagagctggccattaaggatgccaacgccaacgggccaagcaggacatggcgcggcagctgcgtgagtaccaggagctgatgaacgtcaagctggccctggacatcgagatcgccacctacaggaagctgctggagggcgaggagagccggctggagtctgggatgcagaacatgagtattcatacgaagaccaccagcggctatgcaggtggtctgagctcggcctatgggggcctcacaagccccggcctcagctacagcctgggctccagctttggctctggcgcgggctccagctccttcagccgcaccagctcctccagggccgtggttgtgaagaagatcgagacacgtgatgggaagctggtgtctgagtcctctgacgtcctgcccaagtgaacagctgcggcagcccctcccagcctacccctcctgcgctgccccagagcctgggaaggaggccgctatgcagggtagcactgggaacaggagacccacctgaggctcagccctagccctcagcccacctggggagtttactacctggggaccccccttgcccatgcctccagctacaaaacaattcaattgctttttttttttggtccaaaataaaacctcagctagctctgccaaaaaaaaaaaaanaaagaaaaacaaaannaaaaaaanaaaaagactattccaaaagaaagaactaggagtgggcccgtaccccaaaataaaaaacctcggggggggccccgtgcccaatttcgcccttatggagagcctttaacattcaaatgggcc

SEQ ID NO: 734880 - DNA, 2789 bp, Homo sapiens
  misc_feature (2534)..(2534): n is a, c, g, or t
  misc_feature (2549)..(2550): n is a, c, g, or t
  misc_feature (2558)..(2558): n is a, c, g, or t
ggcattgtcaatctgcagaacgatgcgggcattgtccacagtatttgcgaagatctggagggattgtagagagaggttgttccatgaatagaaagccagggatgggtggggtgagtgtgtaaaaagtgttatgtatcctagtgaaaacttcctggtcccaggaatagccagaggctctccctggacacctatcccttttcatctagccccaccccattccctcctttcctggattcccagatcccagcactctgcccctcttgggaagcctcagcaggctggctagctggctggcctgcctgcccagaagtgagtcgctactaacaagtcctcttcctggccctctcctggcattttttccctagtgcacctggtcactctgggccccctacaccctggattggctcctcccaaaggaaggcctcttgtttactcctagatgactcagccttagccacatccgcttaaccctccaatagtccccattccgccagagccggtgtctcctcctctttacaggcctttccttacctccctccatgctgtccacttcctctgtaaagctctcaaccctgtccccttccccctctctcctgggaaagagccctcccatgcctagctgctgctcttagggaccctgtggctaggtgcgcggatggaaatccaggtatgcccaaccccctcccggtggagtaggggttgggtggttatggaatgacggaaagaggcaaaggagtgtataattggagggtcagacaaggctgggagttgaggtccctcctaccccttacctgagccctcaggtcctcgatgatcttgaagtaatggctccagtctctgacctggggtcccttcttctccaagtgctcccggattttgctctccagcctccggttctcggtctccaggctcctcactctttctaggatctccgcctggttcggcccgcctgcctccactcctgcctctaccatgtccatcagggtgacccagaagtcctacaaggtgtccacctctggcccccgggccttcagcagccgctcctacacgagtgggcccggttcccgcatcagctcctcgagcttctcccgagtgggcagcagcaactttcgcggtggcctgggcggcggctatggtggggccagcggcatgggaggcatcaccgcagttacggtcaaccagagcctgctgagcccccttgtcctggaggtggaccccaacatccaggccgtgcgcacccaggagaaggagcagatcaagaccctcaacaacaagtttgcctccttcatagacaaggtacggttcctggagcagcagaacaagatgctggagaccaagtggagcctcctgcagcagcagaagacggctcgaagcaacatggacaacatgttcgagagctacatcaacaaccttaggcggcagctggagactctgggccaggagaagctgaagctggaggcggagcttggcaacatgcaggggctggtggaggacttcaagaacaagtatgaggatgagatcaataagcgtacagagatggagaacgaatttgtcctcatcaagaaggatgtggatgaagcttacatgaacaaggtagagctggagtctcgcctggaagggctgaccgacgagatcaacttcctcaggcagctatatgaagaggagatccgggagctgcagtcccagatctcggacacatctgtggtgctgtccatggacaacagccgctccctggacatggacagcatcattgctgaggtcaaggcacaaaagactgagatctctgagatgaaccggaacatcagccggctccaggctgagattgagggcctcaaaggccagagggcttccctggaggccgccattgcagatgccgagcagcgtggagagctggccattaaggatgccaacgccaacgggccaagcaggacatggcgcggcagctgcgtgagtaccaggagctgatgaacgtcaagctggccctggacatcgagatcgccacctacaggaagctgctggagggcgaggagagccggctggagtctgggatgcagaacatgagtattcatacgaagaccaccagcggctatgcaggtggtctgagctcggcctatgggggcctcacaagccccggcctcagctacagcctgggctccagctttggctctggcgcgggctccagctccttcagccgcaccagctcctccagggccgtggttgtgaagaagatcgagacacgtgatgggaagctggtgtctgagtcctctgacgtcctgcccaagtgaacagctgcggcagcccctcccagcctacccctcctgcgctgccccagagcctgggaaggaggccgctatgcagggtagcactgggaacaggagacccacctgaggctcagccctagccctcagcccacctggggagtttactacctggggaccccccttgcccatgcctccagctacaaaacaattcaattgctttttttttttggtccaaaataaaacctcagctagctctgccaaaaaaaaaaaaanaaagaaaaacaaaannaaaaaaanaaaaaaaaaaagcaaaaaaaaaaccgcgcagaggatttcatgtgggggggggggaagaaaaagagaggatgaaaagaagagggagccgaggtggtgaccaatatggtggtgtgccgagaccacatttttttgttaaaaagagggggagaaaaagagggggggcctcccattaataggggagggagggattatatttgggagagagccgaggggagagccgggttattaagg

SEQ ID NO: 734881 - DNA, 2488 bp, Homo sapiens
ggcattgtcaatctgcagaacgatgcgggcattgtccacagtatttgcgaagatctggagggattgtagagagaggttgttccatgaatagaaagccagggatgggtggggtgagtgtgtaaaaagtgttatgtatcctagtgaaaacttcctggtcccaggaatagccagaggctctccctggacacctatcccttttcatctagccccaccccattccctcctttcctggattcccagatcccagcactctgcccctcttgggaagcctcagcaggctggctagctggctggcctgcctgcccagaagtgagtcgctactaacaagtcctcttcctggccctctcctggcattttttccctagtgcacctggtcactctgggccccctacaccctggattggctcctcccaaaggaaggcctcttgtttactcctagatgactcagccttagccacatccgcttaaccctccaatagtccccattccgccagagccggtgtctcctcctctttacaggcctttccttacctccctccatgctgtccacttcctctgtaaagctctcaaccctgtccccttccccctctctcctgggaaagagccctcccatgcctagctgctgctcttagggaccctgtggctaggtgcgcggatggaaatccaggtatgcccaaccccctcccggtggagtaggggttgggtggttatggaatgacggaaagaggcaaaggagtgtataattggagggtcagacaaggctgggagttgaggtccctcctaccccttacctgagccctcaggtcctcgatgatcttgaagtaatggctccagtctctgacctggggtcccttcttctccaagtgctcccggattttgctctccagcctccggttctcggtctccaggctcctcactctttctaggatctccgcctggttcggcccgcctgcctccactcctgcctctaccatgtccatcagggtgacccagaagtcctacaaggtgtccacctctggcccccgggccttcagcagccgctcctacacgagtgggcccggttcccgcatcagctcctcgagcttctcccgagtgggcagcagcaactttcgcggtggcctgggcggcggctatggtggggccagcggcatgggaggcatcaccgcagttacggtcaaccagagcctgctgagcccccttgtcctggaggtggaccccaacatccaggccgtgcgcacccaggagaaggagcagatcaagaccctcaacaacaagtttgcctccttcatagacaaggtacggttcctggagcagcagaacaagatgctggagaccaagtggagcctcctgcagcagcagaagacggctcgaagcaacatggacaacatgttcgagagctacatcaacaaccttaggcggcagctggagactctgggccaggagaagctgaagctggaggcggagcttggcaacatgcaggggctggtggaggacttcaagaacaagtatgaggatgagatcaataagcgtacagagatggagaacgaatttgtcctcatcaagaaggatgtggatgaagcttacatgaacaaggtagagctggagtctcgcctggaagggctgaccgacgagatcaacttcctcaggcagctatatgaagaggagatccgggagctgcagtcccagatctcggacacatctgtggtgctgtccatggacaacagccgctccctggacatggacagcatcattgctgaggtcaaggcacaaaagactgagatctctgagatgaaccggaacatcagccggctccaggctgagattgagggcctcaaaggccagagggcttccctggaggccgccattgcagatgccgagcagcgtggagagctggccattaaggatgccaacgccaacgggccaagcaggacatggcgcggcagctgcgtgagtaccaggagctgatgaacgtcaagctggccctggacatcgagatcgccacctacaggaagctgctggagggcgaggagagccggctggagtctgggatgcagaacatgagtattcatacgaagaccaccagcggctatgcaggtggtctgagctcggcctatgggggcctcacaagccccggcctcagctacagcctgggctccagctttggctctggcgcgggctccagctccttcagccgcaccagctcctccagggccgtggttgtgaagaagatcgagacacgtgatgggaagctggtgtctgagtcctctgacgtcctgcccaagtgaacagctgcggcagcccctcccagcctacccctcctgcgctgccccagagcctgggaaggaggccgctatgcagggtagcactgggaacaggagacccacctgaggctcagccctagccctcagcccacctggggagtttactacctggggaccccccttgcccatggggccattcaacgcctccgggccattgaacgcctccg

SEQ ID NO: 734882 - DNA, 2476 bp, Homo sapiens
ggcattgtcaatctgcagaacgatgcgggcattgtccacagtatttgcgaagatctggagggattgtagagagaggttgttccatgaatagaaagccagggatgggtggggtgagtgtgtaaaaagtgttatgtatcctagtgaaaacttcctggtcccaggaatagccagaggctctccctggacacctatcccttttcatctagccccaccccattccctcctttcctggattcccagatcccagcactctgcccctcttgggaagcctcagcaggctggctagctggctggcctgcctgcccagaagtgagtcgctactaacaagtcctcttcctggccctctcctggcattttttccctagtgcacctggtcactctgggccccctacaccctggattggctcctcccaaaggaaggcctcttgtttactcctagatgactcagccttagccacatccgcttaaccctccaatagtccccattccgccagagccggtgtctcctcctctttacaggcctttccttacctccctccatgctgtccacttcctctgtaaagctctcaaccctgtccccttccccctctctcctgggaaagagccctcccatgcctagctgctgctcttagggaccctgtggctaggtgcgcggatggaaatccaggtatgcccaaccccctcccggtggagtaggggttgggtggttatggaatgacggaaagaggcaaaggagtgtataattggagggtcagacaaggctgggagttgaggtccctcctaccccttacctgagccctcaggtcctcgatgatcttgaagtaatggctccagtctctgacctggggtcccttcttctccaagtgctcccggattttgctctccagcctccggttctcggtctccaggctcctcactctttctaggatctccgcctggttcggcccgcctgcctccactcctgcctctaccatgtccatcagggtgacccagaagtcctacaaggtgtccacctctggcccccgggccttcagcagccgctcctacacgagtgggcccggttcccgcatcagctcctcgagcttctcccgagtgggcagcagcaactttcgcggtggcctgggcggcggctatggtggggccagcggcatgggaggcatcaccgcagttacggtcaaccagagcctgctgagcccccttgtcctggaggtggaccccaacatccaggccgtgcgcacccaggagaaggagcagatcaagaccctcaacaacaagtttgcctccttcatagacaaggtacggttcctggagcagcagaacaagatgctggagaccaagtggagcctcctgcagcagcagaagacggctcgaagcaacatggacaacatgttcgagagctacatcaacaaccttaggcggcagctggagactctgggccaggagaagctgaagctggaggcggagcttggcaacatgcaggggctggtggaggacttcaagaacaagtatgaggatgagatcaataagcgtacagagatggagaacgaatttgtcctcatcaagaaggatgtggatgaagcttacatgaacaaggtagagctggagtctcgcctggaagggctgaccgacgagatcaacttcctcaggcagctatatgaagaggagatccgggagctgcagtcccagatctcggacacatctgtggtgctgtccatggacaacagccgctccctggacatggacagcatcattgctgaggtcaaggcacaaaagactgagatctctgagatgaaccggaacatcagccggctccaggctgagattgagggcctcaaaggccagagggcttccctggaggccgccattgcagatgccgagcagcgtggagagctggccattaaggatgccaacgccaacgggccaagcaggacatggcgcggcagctgcgtgagtaccaggagctgatgaacgtcaagctggccctggacatcgagatcgccacctacaggaagctgctggagggcgaggagagccggctggagtctgggatgcagaacatgagtattcatacgaagaccaccagcggctatgcaggtggtctgagctcggcctatgggggcctcacaagccccggcctcagctacagcctgggctccagctttggctctggcgcgggctccagctccttcagccgcaccagctcctccagggccgtggttgtgaagaagatcgagacacgtgatgggaagctggtgtctgagtcctctgacgtcctgcccaagtgaacagctgcggcagcccctcccagcctacccctcctgcgctgccccagagcctgggaaggaggccgctatgcagggtagcactgggaacaggagacccacctgaggctcagccctagccctcagcccacctggggagtttactacctggggaccccccttgcccatgattgggccaggggggggtaccgagg

SEQ ID NO: 734883 - DNA, 2349 bp, Homo sapiens
  misc_feature (2317)..(2317): n is a, c, g, or t
  misc_feature (2330)..(2330): n is a, c, g, or t
  misc_feature (2334)..(2334): n is a, c, g, or t
  misc_feature (2349)..(2349): n is a, c, g, or t
ggcattgtcaatctgcagaacgatgcgggcattgtccacagtatttgcgaagatctggagggattgtagagagaggttgttccatgaatagaaagccagggatgggtggggtgagtgtgtaaaaagtgttatgtatcctagtgaaaacttcctggtcccaggaatagccagaggctctccctggacacctatcccttttcatctagccccaccccattccctcctttcctggattcccagatcccagcactctgcccctcttgggaagcctcagcaggctggctagctggctggcctgcctgcccagaagtgagtcgctactaacaagtcctcttcctggccctctcctggcattttttccctagtgcacctggtcactctgggccccctacaccctggattggctcctcccaaaggaaggcctcttgtttactcctagatgactcagccttagccacatccgcttaaccctccaatagtccccattccgccagagccggtgtctcctcctctttacaggcctttccttacctccctccatgctgtccacttcctctgtaaagctctcaaccctgtccccttccccctctctcctgggaaagagccctcccatgcctagctgctgctcttagggaccctgtggctaggtgcgcggatggaaatccaggtatgcccaaccccctcccggtggagtaggggttgggtggttatggaatgacggaaagaggcaaaggagtgtataattggagggtcagacaaggctgggagttgaggtccctcctaccccttacctgagccctcaggtcctcgatgatcttgaagtaatggctccagtctctgacctggggtcccttcttctccaagtgctcccggattttgctctccagcctccggttctcggtctccaggctcctcactctttctaggatctccgcctggttcggcccgcctgcctccactcctgcctctaccatgtccatcagggtgacccagaagtcctacaaggtgtccacctctggcccccgggccttcagcagccgctcctacacgagtgggcccggttcccgcatcagctcctcgagcttctcccgagtgggcagcagcaactttcgcggtggcctgggcggcggctatggtggggccagcggcatgggaggcatcaccgcagttacggtcaaccagagcctgctgagcccccttgtcctggaggtggaccccaacatccaggccgtgcgcacccaggagaaggagcagatcaagaccctcaacaacaagtttgcctccttcatagacaaggtacggttcctggagcagcagaacaagatgctggagaccaagtggagcctcctgcagcagcagaagacggctcgaagcaacatggacaacatgttcgagagctacatcaacaaccttaggcggcagctggagactctgggccaggagaagctgaagctggaggcggagcttggcaacatgcaggggctggtggaggacttcaagaacaagtatgaggatgagatcaataagcgtacagagatggagaacgaatttgtcctcatcaagaaggatgtggatgaagcttacatgaacaaggtagagctggagtctcgcctggaagggctgaccgacgagatcaacttcctcaggcagctatatgaagaggagatccgggagctgcagtcccagatctcggacacatctgtggtgctgtccatggacaacagccgctccctggacatggacagcatcattgctgaggtcaaggcacaaaagactgagatctctgagatgaaccggaacatcagccggctccaggctgagattgagggcctcaaaggccagagggcttccctggaggccgccattgcagatgccgagcagcgtggagagctggccattaaggatgccaacgccaacgggccaagcaggacatggcgcggcagctgcgtgagtaccaggagctgatgaacgtcaagctggccctggacatcgagatcgccacctacaggaagctgctggagggcgaggagagccggctggagtctgggatgcagaacatgagtattcatacgaagaccaccagcggctatgcaggtggtctgagctcggcctatgggggcctcacaagccccggcctcagctacagcctgggctccagctttggctctggcgcgggctccagctccttcagccgcaccagctcctccagggccgtggttgtgaagaagatcgagacacgtgatgggaagctggtgtctgagtcctctgacgtcctgcccaagtgaacagctgcggcagcccctcccagcctaccccnggggcctccgaanaagnaaaagctcgaattgn

SEQ ID NO: 734884 - DNA, 2773 bp, Homo sapiens
ggcattgtcaatctgcagaacgatgcgggcattgtccacagtatttgcgaagatctggagggattgtagagagaggttgttccatgaatagaaagccagggatgggtggggtgagtgtgtaaaaagtgttatgtatcctagtgaaaacttcctggtcccaggaatagccagaggctctccctggacacctatcccttttcatctagccccaccccattccctcctttcctggattcccagatcccagcactctgcccctcttgggaagcctcagcaggctggctagctggctggcctgcctgcccagaagtgagtcgctactaacaagtcctcttcctggccctctcctggcattttttccctagtgcacctggtcactctgggccccctacaccctggattggctcctcccaaaggaaggcctcttgtttactcctagatgactcagccttagccacatccgcttaaccctccaatagtccccattccgccagagccggtgtctcctcctctttacaggcctttccttacctccctccatgctgtccacttcctctgtaaagctctcaaccctgtccccttccccctctctcctgggaaagagccctcccatgcctagctgctgctcttagggaccctgtggctaggtgcgcggatggaaatccaggtatgcccaaccccctcccggtggagtaggggttgggtggttatggaatgacggaaagaggcaaaggagtgtataattggagggtcagacaaggctgggagttgaggtccctcctaccccttacctgagccctcaggtcctcgatgatcttgaagtaatggctccagtctctgacctggggtcccttcttctccaagtgctcccggattttgctctccagcctccggttctcggtctccaggctcctcactctttctaggatctccgcctggttcggcccgcctgcctccactcctgcctctaccatgtccatcagggtgacccagaagtcctacaaggtgtccacctctggcccccgggccttcagcagccgctcctacacgagtgggcccggttcccgcatcagctcctcgagcttctcccgagtgggcagcagcaactttcgcggtggcctgggcggcggctatggtggggccagcggcatgggaggcatcaccgcagttacggtcaaccagagcctgctgagcccccttgtcctggaggtggaccccaacatccaggccgtgcgcacccaggagaaggagcagatcaagaccctcaacaacaagtttgcctccttcatagacaaggtacggttcctggagcagcagaacaagatgctggagaccaagtggagcctcctgcagcagcagaagacggctcgaagcaacatggacaacatgttcgagagctacatcaacaaccttaggcggcagctggagactctgggccaggagaagctgaagctggaggcggagcttggcaacatgcaggggctggtggaggacttcaagaacaagtatgaggatgagatcaataagcgtacagagatggagaacgaatttgtcctcatcaagaaggatgtggatgaagcttacatgaacaaggtagagctggagtctcgcctggaagggctgaccgacgagatcaacttcctcaggcagctatatgaagaggagatccgggagctgcagtcccagatctcggacacatctgtggtgctgtccatggacaacagccgctccctggacatggacagcatcattgctgaggtcaaggcacaaaagactgagatctctgagatgaaccggaacatcagccggctccaggctgagattgagggcctcaaaggccagagggcttccctggaggccgccattgcagatgccgagcagcgtggagagctggccattaaggatgccaacgccaacgggccaagcaggacatggcgcggcagctgcgtgagtaccaggagctgatgaacgtcaagctggccctggacatcgagatcgccacctacaggaagctgctggagggcgaggagagccggctggagtctgggatgcagaacatgagtattcatacgaagaccaccagcggctatgcaggtggtctgagctcggcctatgggggcctcacaagccccggcctcagctacagcctgggctccagctttggctctggcgcgggctccagctccttcagccgcaccagctcctccagggccgtggttgtgaagaagatcgagacacgtgatgggaagctggtgtctgagtcctctgacgtcctgcccaagtcgcctccagggccgtggttgtgaagaagatcgagacacgtgatgggaagctggtgtctgagtcctctgacgtcctgcccaagtgaacagctgcggcagcccctcccagcctacccctcctgcgctgccccagagcctgggaaggaggccgctatgcagggtagcactgggaacaggagacccacctgaggctcagccctagccctcagcccacctggggagtttactacctggggaccccccttgcccatgcctccagctacaaaacaattcaattgctttttttttttggtccaaaataaaacctcagctagctctgccaaaacaaacacaaaacaacacacacaacaaacaacaaaaaacaacaaccacacacacaaacacacacaaccaagagagggggcgcgcgccgccaaaaagagagagaccacccccaggggggcgcacgcaaacacagcagcgaacccccacgctgtggagcacaaaagggg

SEQ ID NO: 734885 - DNA, 2274 bp, Homo sapiens
  misc_feature (2081)..(2083): n is a, c, g, or t
ggcattgtcaatctgcagaacgatgcgggcattgtccacagtatttgcgaagatctggagggattgtagagagaggttgttccatgaatagaaagccagggatgggtggggtgagtgtgtaaaaagtgttatgtatcctagtgaaaacttcctggtcccaggaatagccagaggctctccctggacacctatcccttttcatctagccccaccccattccctcctttcctggattcccagatcccagcactctgcccctcttgggaagcctcagcaggctggctagctggctggcctgcctgcccagaagtgagtcgctactaacaagtcctcttcctggccctctcctggcattttttccctagtgcacctggtcactctgggccccctacaccctggattggctcctcccaaaggaaggcctcttgtttactcctagatgactcagccttagccacatccgcttaaccctccaatagtccccattccgccagagccggtgtctcctcctctttacaggcctttccttacctccctccatgctgtccacttcctctgtaaagctctcaaccctgtccccttccccctctctcctgggaaagagccctcccatgcctagctgctgctcttagggaccctgtggctaggtgcgcggatggaaatccaggtatgcccaaccccctcccggtggagtaggggttgggtggttatggaatgacggaaagaggcaaaggagtgtataattggagggtcagacaaggctgggagttgaggtccctcctaccccttacctgagccctcaggtcctcgatgatcttgaagtaatggctccagtctctgacctggggtcccttcttctccaagtgctcccggattttgctctccagcctccggttctcggtctccaggctcctcactctttctaggatctccgcctggttcggcccgcctgcctccactcctgcctctaccatgtccatcagggtgacccagaagtcctacaaggtgtccacctctggcccccgggccttcagcagccgctcctacacgagtgggcccggttcccgcatcagctcctcgagcttctcccgagtgggcagcagcaactttcgcggtggcctgggcggcggctatggtggggccagcggcatgggaggcatcaccgcagttacggtcaaccagagcctgctgagcccccttgtcctggaggtggaccccaacatccaggccgtgcgcacccaggagaaggagcagatcaagaccctcaacaacaagtttgcctccttcatagacaaggtacggttcctggagcagcagaacaagatgctggagaccaagtggagcctcctgcagcagcagaagacggctcgaagcaacatggacaacatgttcgagagctacatcaacaaccttaggcggcagctggagactctgggccaggagaagctgaagctggaggcggagcttggcaacatgcaggggctggtggaggacttcaagaacaagtatgaggatgagatcaataagcgtacagagatggagaacgaatttgtcctcatcaagaaggatgtggatgaagcttacatgaacaaggtagagctggagtctcgcctggaagggctgaccgacgagatcaacttcctcaggcagctatatgaagaggagatccgggagctgcagtcccagatctcggacacatctgtggtgctgtccatggacaacagccgcctcctccagggccgtggttgtgaagaagatcgagacacgtgatgggaagctggtgtctgagtcctctgacgtcctgcccaagtgaacagctgcggcagcccctcccagcctacccctcctgcgctgccccagagcctgggaaggaggccgctatgcagggtagcactgggaacaggagacccacctgaggctcagccctagccctcagcccacctggggagtttactacctggggaccccccttgcccatgcctccagctacaaaacaattcaattgctttttttttttggtccaaaataaaacctcagctagctctgccaacaaaaaacaaaacaaacaaaaaaaaacaaannncgcgggctaaaatcccgggggcagtacgtccccttttggcacgggcctagagggataaaaagacccgggacaacgcggaggaagcggcggcttggcgccttctgggtgacgaaacccagagttcccgcaacgttgtgaccttggtgtatacatcttagcgcggacatactctcacgcactcacctcacatc

SEQ ID NO: 734886 - DNA, 2194 bp, Homo sapiens
  misc_feature (2067)..(2067): n is a, c, g, or t
ggcattgtcaatctgcagaacgatgcgggcattgtccacagtatttgcgaagatctggagggattgtagagagaggttgttccatgaatagaaagccagggatgggtggggtgagtgtgtaaaaagtgttatgtatcctagtgaaaacttcctggtcccaggaatagccagaggctctccctggacacctatcccttttcatctagccccaccccattccctcctttcctggattcccagatcccagcactctgcccctcttgggaagcctcagcaggctggctagctggctggcctgcctgcccagaagtgagtcgctactaacaagtcctcttcctggccctctcctggcattttttccctagtgcacctggtcactctgggccccctacaccctggattggctcctcccaaaggaaggcctcttgtttactcctagatgactcagccttagccacatccgcttaaccctccaatagtccccattccgccagagccggtgtctcctcctctttacaggcctttccttacctccctccatgctgtccacttcctctgtaaagctctcaaccctgtccccttccccctctctcctgggaaagagccctcccatgcctagctgctgctcttagggaccctgtggctaggtgcgcggatggaaatccaggtatgcccaaccccctcccggtggagtaggggttgggtggttatggaatgacggaaagaggcaaaggagtgtataattggagggtcagacaaggctgggagttgaggtccctcctaccccttacctgagccctcaggtcctcgatgatcttgaagtaatggctccagtctctgacctggggtcccttcttctccaagtgctcccggattttgctctccagcctccggttctcggtctccaggctcctcactctttctaggatctccgcctggttcggcccgcctgcctccactcctgcctctaccatgtccatcagggtgacccagaagtcctacaaggtgtccacctctggcccccgggccttcagcagccgctcctacacgagtgggcccggttcccgcatcagctcctcgagcttctcccgagtgggcagcagcaactttcgcggtggcctgggcggcggctatggtggggccagcggcatgggaggcatcaccgcagttacggtcaaccagagcctgctgagcccccttgtcctggaggtggaccccaacatccaggccgtgcgcacccaggagaaggagcagatcaagaccctcaacaacaagtttgcctccttcatagacaaggtacggttcctggagcagcagaacaagatgctggagaccaagtggagcctcctgcagcagcagaagacggctcgaagcaacatggacaacatgttcgagagctacatcaacaaccttaggcggcagctggagactctgggccaggagaagctgaagctggaggcggagcttggcaacatgcaggggctggtggaggacttcaagaacaagtatgaggatgagatcaataagcgtacagagatggagaacgaatttgtcctcatcaagaaggatgtggatgaagcttacatgaacaaggtagagctggagtctcgcctggaagggctgaccgacgagatcaacttcctcaggcagctatatgaagaggagatccgggagctgcagtcccagatctcggacacatctgtggtgctgtccatggacaacagccgcctcctccagggccgtggttgtgaagaagatcgagacacgtgatgggaagctggtgtctgagtcctctgacgtcctgcccaagtgaacagctgcggcagcccctcccagcctacccctcctgcgctgccccagagcctgggaaggaggccgctatgcagggtagcactgggaacaggagacccacctgaggctcagccctagccctcagcccacctggggagtttactacctggggaccccccttgcccatgcctccagctacaaaacaattcaattgctttttttttttggtccaaaataaaacctcagctagctctgccaaaaaaaaaaaacatacanaaaaaaaagggggggttttttggggggggggaaaaagggttttgaagggaaggggtaagggtttctggacccgttttgttaaagggggaaatgggggccccaagggggggaaaaaggaagggggacg

SEQ ID NO: 734887 - DNA, 2460 bp, Homo sapiens
  misc_feature (2074)..(2074): n is a, c, g, or t
ggcattgtcaatctgcagaacgatgcgggcattgtccacagtatttgcgaagatctggagggattgtagagagaggttgttccatgaatagaaagccagggatgggtggggtgagtgtgtaaaaagtgttatgtatcctagtgaaaacttcctggtcccaggaatagccagaggctctccctggacacctatcccttttcatctagccccaccccattccctcctttcctggattcccagatcccagcactctgcccctcttgggaagcctcagcaggctggctagctggctggcctgcctgcccagaagtgagtcgctactaacaagtcctcttcctggccctctcctggcattttttccctagtgcacctggtcactctgggccccctacaccctggattggctcctcccaaaggaaggcctcttgtttactcctagatgactcagccttagccacatccgcttaaccctccaatagtccccattccgccagagccggtgtctcctcctctttacaggcctttccttacctccctccatgctgtccacttcctctgtaaagctctcaaccctgtccccttccccctctctcctgggaaagagccctcccatgcctagctgctgctcttagggaccctgtggctaggtgcgcggatggaaatccaggtatgcccaaccccctcccggtggagtaggggttgggtggttatggaatgacggaaagaggcaaaggagtgtataattggagggtcagacaaggctgggagttgaggtccctcctaccccttacctgagccctcaggtcctcgatgatcttgaagtaatggctccagtctctgacctggggtcccttcttctccaagtgctcccggattttgctctccagcctccggttctcggtctccaggctcctcactctttctaggatctccgcctggttcggcccgcctgcctccactcctgcctctaccatgtccatcagggtgacccagaagtcctacaaggtgtccacctctggcccccgggccttcagcagccgctcctacacgagtgggcccggttcccgcatcagctcctcgagcttctcccgagtgggcagcagcaactttcgcggtggcctgggcggcggctatggtggggccagcggcatgggaggcatcaccgcagttacggtcaaccagagcctgctgagcccccttgtcctggaggtggaccccaacatccaggccgtgcgcacccaggagaaggagcagatcaagaccctcaacaacaagtttgcctccttcatagacaaggtacggttcctggagcagcagaacaagatgctggagaccaagtggagcctcctgcagcagcagaagacggctcgaagcaacatggacaacatgttcgagagctacatcaacaaccttaggcggcagctggagactctgggccaggagaagctgaagctggaggcggagcttggcaacatgcaggggctggtggaggacttcaagaacaagtatgaggatgagatcaataagcgtacagagatggagaacgaatttgtcctcatcaagaaggatgtggatgaagcttacatgaacaaggtagagctggagtctcgcctggaagggctgaccgacgagatcaacttcctcaggcagctatatgaagaggagatccgggagctgcagtcccagatctcggacacatctgtggtgctgtccatggacaacagccgcctcctccagggccgtggttgtgaagaagatcgagacacgtgatgggaagctggtgtctgagtcctctgacgtcctgcccaagtgaacagctgcggcagcccctcccagcctacccctcctgcgctgccccagagcctgggaaggaggccgctatgcagggtagcactgggaacaggagacccacctgaggctcagccctagccctcagcccacctggggagtttactacctggggaccccccttgcccatgcctccagctacaaaacaattcaattgctttttttttttggtccaaaataaaacctcagctagctctgccaaaaaaaaaaacaaaaaaaaaaaaanaaatttgggggtctggtggtgtgcgggtggaatggcctgtgagtccctctagctgtccttaacctgcagcccaaattatccacttgtggaggggatcttgggggcatcctggagccccaggagtcccggggaagaaaggctgggagctggagaagaggaggagaagcaatgcccagcctcatagctgcttgcttacacactcacaccccagctgcacctggctcccaaacactcctcgcctacccacgtttcctcacacacactcacacccgaatcatacagaggtgtgctttcaaatgcacacacacatacattcactcagcaaataggtgcagactccccaaaacaaacccagtctctgatcccacatgaagggatcctctaga

SEQ ID NO: 734888 - DNA, 2749 bp, Homo sapiens
  misc_feature (2074)..(2074): n is a, c, g, or t
  misc_feature (2088)..(2088): n is a, c, g, or t
ggcattgtcaatctgcagaacgatgcgggcattgtccacagtatttgcgaagatctggagggattgtagagagaggttgttccatgaatagaaagccagggatgggtggggtgagtgtgtaaaaagtgttatgtatcctagtgaaaacttcctggtcccaggaatagccagaggctctccctggacacctatcccttttcatctagccccaccccattccctcctttcctggattcccagatcccagcactctgcccctcttgggaagcctcagcaggctggctagctggctggcctgcctgcccagaagtgagtcgctactaacaagtcctcttcctggccctctcctggcattttttccctagtgcacctggtcactctgggccccctacaccctggattggctcctcccaaaggaaggcctcttgtttactcctagatgactcagccttagccacatccgcttaaccctccaatagtccccattccgccagagccggtgtctcctcctctttacaggcctttccttacctccctccatgctgtccacttcctctgtaaagctctcaaccctgtccccttccccctctctcctgggaaagagccctcccatgcctagctgctgctcttagggaccctgtggctaggtgcgcggatggaaatccaggtatgcccaaccccctcccggtggagtaggggttgggtggttatggaatgacggaaagaggcaaaggagtgtataattggagggtcagacaaggctgggagttgaggtccctcctaccccttacctgagccctcaggtcctcgatgatcttgaagtaatggctccagtctctgacctggggtcccttcttctccaagtgctcccggattttgctctccagcctccggttctcggtctccaggctcctcactctttctaggatctccgcctggttcggcccgcctgcctccactcctgcctctaccatgtccatcagggtgacccagaagtcctacaaggtgtccacctctggcccccgggccttcagcagccgctcctacacgagtgggcccggttcccgcatcagctcctcgagcttctcccgagtgggcagcagcaactttcgcggtggcctgggcggcggctatggtggggccagcggcatgggaggcatcaccgcagttacggtcaaccagagcctgctgagcccccttgtcctggaggtggaccccaacatccaggccgtgcgcacccaggagaaggagcagatcaagaccctcaacaacaagtttgcctccttcatagacaaggtacggttcctggagcagcagaacaagatgctggagaccaagtggagcctcctgcagcagcagaagacggctcgaagcaacatggacaacatgttcgagagctacatcaacaaccttaggcggcagctggagactctgggccaggagaagctgaagctggaggcggagcttggcaacatgcaggggctggtggaggacttcaagaacaagtatgaggatgagatcaataagcgtacagagatggagaacgaatttgtcctcatcaagaaggatgtggatgaagcttacatgaacaaggtagagctggagtctcgcctggaagggctgaccgacgagatcaacttcctcaggcagctatatgaagaggagatccgggagctgcagtcccagatctcggacacatctgtggtgctgtccatggacaacagccgcctcctccagggccgtggttgtgaagaagatcgagacacgtgatgggaagctggtgtctgagtcctctgacgtcctgcccaagtgaacagctgcggcagcccctcccagcctacccctcctgcgctgccccagagcctgggaaggaggccgctatgcagggtagcactgggaacaggagacccacctgaggctcagccctagccctcagcccacctggggagtttactacctggggaccccccttgcccatgcctccagctacaaaacaattcaattgctttttttttttggtccaaaataaaacctcagctagctctgccaaaaaaaaaaacaaaaaaaaaaaaanaaaaaaaaaaaaanaaaaaaaaaaaaaaaaaaaaaaaaaaaacaacaagcagccacaagaaaacccaaccaacgagacaaaacaaaaacagcaacaaaaaaaaaagaacagagccgcggcgccggctgcacacatacacatcgcagggcggcgccccagcaccacagcaccccccacgcctatacaggagcggcggcccaccaacccggcccagctcctactaacacggacgcccgggccggccacaccccaccggcacggccgaacaccaaccacccagcaggcaatgtggcggcacccccacccgtggcgcgagtacagatcaggccagcacgaacccacccaatcagcagtaatggcgctacggagtactaaaatataagaggagcgctgcaagaaccacccacaccatctcgtcgggcagccagaacgccccgcgacgaccgcagactacatccatccacgggcggacggccaacagagtccgaggctggcgacgacgtcggacggcccgcggcaccgaggcgtcgacgaaacgacgccggaagacacactgcgagcaggcgaccagactgcagccccacgcccatcatggacacaagcgactcggacgacgcacgccatagatcaggtcccagaccaccttaacccagacggacagcgcggagacaagca

SEQ ID NO: 734889 - DNA, 2650 bp, Homo sapiens
  misc_feature (2074)..(2074): n is a, c, g, or t
  misc_feature (2088)..(2088): n is a, c, g, or t
  misc_feature (2650)..(2650): n is a, c, g, or t
ggcattgtcaatctgcagaacgatgcgggcattgtccacagtatttgcgaagatctggagggattgtagagagaggttgttccatgaatagaaagccagggatgggtggggtgagtgtgtaaaaagtgttatgtatcctagtgaaaacttcctggtcccaggaatagccagaggctctccctggacacctatcccttttcatctagccccaccccattccctcctttcctggattcccagatcccagcactctgcccctcttgggaagcctcagcaggctggctagctggctggcctgcctgcccagaagtgagtcgctactaacaagtcctcttcctggccctctcctggcattttttccctagtgcacctggtcactctgggccccctacaccctggattggctcctcccaaaggaaggcctcttgtttactcctagatgactcagccttagccacatccgcttaaccctccaatagtccccattccgccagagccggtgtctcctcctctttacaggcctttccttacctccctccatgctgtccacttcctctgtaaagctctcaaccctgtccccttccccctctctcctgggaaagagccctcccatgcctagctgctgctcttagggaccctgtggctaggtgcgcggatggaaatccaggtatgcccaaccccctcccggtggagtaggggttgggtggttatggaatgacggaaagaggcaaaggagtgtataattggagggtcagacaaggctgggagttgaggtccctcctaccccttacctgagccctcaggtcctcgatgatcttgaagtaatggctccagtctctgacctggggtcccttcttctccaagtgctcccggattttgctctccagcctccggttctcggtctccaggctcctcactctttctaggatctccgcctggttcggcccgcctgcctccactcctgcctctaccatgtccatcagggtgacccagaagtcctacaaggtgtccacctctggcccccgggccttcagcagccgctcctacacgagtgggcccggttcccgcatcagctcctcgagcttctcccgagtgggcagcagcaactttcgcggtggcctgggcggcggctatggtggggccagcggcatgggaggcatcaccgcagttacggtcaaccagagcctgctgagcccccttgtcctggaggtggaccccaacatccaggccgtgcgcacccaggagaaggagcagatcaagaccctcaacaacaagtttgcctccttcatagacaaggtacggttcctggagcagcagaacaagatgctggagaccaagtggagcctcctgcagcagcagaagacggctcgaagcaacatggacaacatgttcgagagctacatcaacaaccttaggcggcagctggagactctgggccaggagaagctgaagctggaggcggagcttggcaacatgcaggggctggtggaggacttcaagaacaagtatgaggatgagatcaataagcgtacagagatggagaacgaatttgtcctcatcaagaaggatgtggatgaagcttacatgaacaaggtagagctggagtctcgcctggaagggctgaccgacgagatcaacttcctcaggcagctatatgaagaggagatccgggagctgcagtcccagatctcggacacatctgtggtgctgtccatggacaacagccgcctcctccagggccgtggttgtgaagaagatcgagacacgtgatgggaagctggtgtctgagtcctctgacgtcctgcccaagtgaacagctgcggcagcccctcccagcctacccctcctgcgctgccccagagcctgggaaggaggccgctatgcagggtagcactgggaacaggagacccacctgaggctcagccctagccctcagcccacctggggagtttactacctggggaccccccttgcccatgcctccagctacaaaacaattcaattgctttttttttttggtccaaaataaaacctcagctagctctgccaaaaaaaaaaacaaaaaaaaaaaaanaaaaaaaaaaaaanaaaaaaaaaaaaaaaaaaaaaaaagaggggggcgcgcgcgcgcccaagaaggttccccccgagggggcgcccagatacccgcgcggcccccgggttttggggaacaagggggggccccccaataggaggaggagccgcgccaattataatagcgacagcgggccggtgggcgccggcggcttatcacacaacggcgcaggcgaccgggggggaaaacagcgcggccaccgccgcggcgaaacccctcggggagagagggacaccctataaacccgcgaggcgggagggaacaaatatggtgggagaccaaaacattgcgctctccagaggggaatttataaacgcctctctatcgaggggagagacacattgtatcgcagtttgtttaaacgcgtctgtgtaaattacgggtgggggtcaaaacataagctgtgagagatatgttagctgagtgaggtgcgaaggaaaaaactgttgagaggtatacaataggggatatattagattatgtaagaaaaaaattattttatcaccccaggggacccgctttggaggagtaagn

SEQ ID NO: 734890 - DNA, 2083 bp, Homo sapiens
  misc_feature (2051)..(2051): n is a, c, g, or t
ggcattgtcaatctgcagaacgatgcgggcattgtccacagtatttgcgaagatctggagggattgtagagagaggttgttccatgaatagaaagccagggatgggtggggtgagtgtgtaaaaagtgttatgtatcctagtgaaaacttcctggtcccaggaatagccagaggctctccctggacacctatcccttttcatctagccccaccccattccctcctttcctggattcccagatcccagcactctgcccctcttgggaagcctcagcaggctggctagctggctggcctgcctgcccagaagtgagtcgctactaacaagtcctcttcctggccctctcctggcattttttccctagtgcacctggtcactctgggccccctacaccctggattggctcctcccaaaggaaggcctcttgtttactcctagatgactcagccttagccacatccgcttaaccctccaatagtccccattccgccagagccggtgtctcctcctctttacaggcctttccttacctccctccatgctgtccacttcctctgtaaagctctcaaccctgtccccttccccctctctcctgggaaagagccctcccatgcctagctgctgctcttagggaccctgtggctaggtgcgcggatggaaatccaggtatgcccaaccccctcccggtggagtaggggttgggtggttatggaatgacggaaagaggcaaaggagtgtataattggagggtcagacaaggctgggagttgaggtccctcctaccccttacctgagccctcaggtcctcgatgatcttgaagtaatggctccagtctctgacctggggtcccttcttctccaagtgctcccggattttgctctccagcctccggttctcggtctccaggctcctcactctttctaggatctccgcctggttcggcccgcctgcctccactcctgcctctaccatgtccatcagggtgacccagaagtcctacaaggtgtccacctctggcccccgggccttcagcagccgctcctacacgagtgggcccggttcccgcatcagctcctcgagcttctcccgagtgggcagcagcaactttcgcggtggcctgggcggcggctatggtggggccagcggcatgggaggcatcaccgcagttacggtcaaccagagcctgctgagcccccttgtcctggaggtggaccccaacatccaggccgtgcgcacccaggagaaggagcagatcaagaccctcaacaacaagtttgcctccttcatagacaaggtacggttcctggagcagcagaacaagatgctggagaccaagtggagcctcctgcagcagcagaagacggctcgaagcaacatggacaacatgttcgagagctacatcaacaaccttaggcggcagctggagactctgggccaggagaagctgaagctggaggcggagcttggcaacatgcaggggctggtggaggacttcaagaacaagtatgaggatgagatcaataagcgtacagagatggagaacgaatttgtcctcatcaagaaggatgtggatgaagcttacatgaacaaggtagagctggagtctcgcctggaagggctgaccgacgagatcaacttcctcaggcagctatatgaagaggagatccgggagctgcagtcccagatctcggacacatctgtggtgctgtccatggacaacagccgcctcctccagggccgtggttgtgaagaagatcgagacacgtgatgggaagctggtgtctgagtcctctgacgtcctgcccaagtgaacagctgcggcagcccctcccagcctacccctcctgcgctgccccagagcctgggaaggaggccgctatgcagggtagcactgggaacaggagacccacctgaggctcagccctagccctcagcccacctggggagtttactacctggggaccccccttgcccatgcctccagctacaaaacaattcaattgctttttttttttggtccaaaataaaacctcagctagctctgccaanggaaaaggcagcagacagaagaaaaagttttg

SEQ ID NO: 734891 - DNA, 2722 bp, Homo sapiens
  misc_feature (2061)..(2061): n is a, c, g, or t
ggcattgtcaatctgcagaacgatgcgggcattgtccacagtatttgcgaagatctggagggattgtagagagaggttgttccatgaatagaaagccagggatgggtggggtgagtgtgtaaaaagtgttatgtatcctagtgaaaacttcctggtcccaggaatagccagaggctctccctggacacctatcccttttcatctagccccaccccattccctcctttcctggattcccagatcccagcactctgcccctcttgggaagcctcagcaggctggctagctggctggcctgcctgcccagaagtgagtcgctactaacaagtcctcttcctggccctctcctggcattttttccctagtgcacctggtcactctgggccccctacaccctggattggctcctcccaaaggaaggcctcttgtttactcctagatgactcagccttagccacatccgcttaaccctccaatagtccccattccgccagagccggtgtctcctcctctttacaggcctttccttacctccctccatgctgtccacttcctctgtaaagctctcaaccctgtccccttccccctctctcctgggaaagagccctcccatgcctagctgctgctcttagggaccctgtggctaggtgcgcggatggaaatccaggtatgcccaaccccctcccggtggagtaggggttgggtggttatggaatgacggaaagaggcaaaggagtgtataattggagggtcagacaaggctgggagttgaggtccctcctaccccttacctgagccctcaggtcctcgatgatcttgaagtaatggctccagtctctgacctggggtcccttcttctccaagtgctcccggattttgctctccagcctccggttctcggtctccaggctcctcactctttctaggatctccgcctggttcggcccgcctgcctccactcctgcctctaccatgtccatcagggtgacccagaagtcctacaaggtgtccacctctggcccccgggccttcagcagccgctcctacacgagtgggcccggttcccgcatcagctcctcgagcttctcccgagtgggcagcagcaactttcgcggtggcctgggcggcggctatggtggggccagcggcatgggaggcatcaccgcagttacggtcaaccagagcctgctgagcccccttgtcctggaggtggaccccaacatccaggccgtgcgcacccaggagaaggagcagatcaagaccctcaacaacaagtttgcctccttcatagacaaggtacggttcctggagcagcagaacaagatgctggagaccaagtggagcctcctgcagcagcagaagacggctcgaagcaacatggacaacatgttcgagagctacatcaacaaccttaggcggcagctggagactctgggccaggagaagctgaagctggaggcggagcttggcaacatgcaggggctggtggaggacttcaagaacaagtatgaggatgagatcaataagcgtacagagatggagaacgaatttgtcctcatcaagaaggatgtggatgaagcttacatgaacaaggtagagctggagtctcgcctggaagggctgaccgacgagatcaacttcctcaggcagctatatgaagaggagatccgggagctgcagtcccagatctcggacacatctgtggtgctgtccatggacaacagccgcctcctccagggccgtggttgtgaagaagatcgagacacgtgatgggaagctggtgtctgagtcctctgacgtcctgcccaagtgaacagctgcggcagcccctcccagcctacccctcctgcgctgccccagagcctgggaaggaggccgctatgcagggtagcactgggaacaggagacccacctgaggctcagccctagccctcagcccacctggggagtttactacctggggaccccccttgcccatgcctccagctacaaaacaattcaattgctttttttttttggtccaaaataaaacctcagctagctctgccaaaaaaaaaaaanaaaaaaaaaaaaaaaaaaaaaaaaaaaacaacaagcagccacaagaaaacccaaccaacgagacaaaacaaaaacagcaacaaaaaaaaaagaacagagccgcggcgccggctgcacacatacacatcgcagggcggcgccccagcaccacagcaccccccacgcctatacaggagcggcggcccaccaacccggcccagctcctactaacacggacgcccgggccggccacaccccaccggcacggccgaacaccaaccacccagcaggcaatgtggcggcacccccacccgtggcgcgagtacagatcaggccagcacgaacccacccaatcagcagtaatggcgctacggagtactaaaatataagaggagcgctgcaagaaccacccacaccatctcgtcgggcagccagaacgccccgcgacgaccgcagactacatccatccacgggcggacggccaacagagtccgaggctggcgacgacgtcggacggcccgcggcaccgaggcgtcgacgaaacgacgccggaagacacactgcgagcaggcgaccagactgcagccccacgcccatcatggacacaagcgactcggacgacgcacgccatagatcaggtcccagaccaccttaacccagacggacagcgcggagacaagca

SEQ ID NO: 734892 - DNA, 3801 bp, Homo sapiens
taaatgaaaaatgaataaatcattgcagaacagtgtatatatatctaaaatatctatggaagaaaccagcaacagccactgctcctggagaattatggtcccacaccactgatcattctttcagtagggtgaccatcatccaaatttgcttgggactgagggggttccttttggtttgaaaaccaggacagtcctaggaaaagtgagacaagttggtcacatgtccccaagatgatcttctttcacttatgaacttgctactttcccagtcagaatataaactctgaagggggagacttcctgttttcttcatgactatatctcttgcgcactgtggggtggaggctgtagaagaggagagaagtagagaaacagatcacattgtgtcttgaagtgtttcagcaaatatgggcaacacccttcttttactagcttggaaccctacctctgagtgcatttccctttttattatttatttcctgtcagttataagagaggcctacccctttgtgagcagtctaggactttgtacacctgttaagtagggagaaggcaggggaggtggctggtttaaggggaacttgagggaagtagggaagactcctcttgggacctttggagtaggtgacacatgagcccagccccagctcacctgccaatccagctgaggagctcacctgccaatccagctgaggctgggcagaggtgggtgagaagagggaaaattgcagggacctccagttgggccaggccagaagctgctgtagctttaaccagacagctcagacctgtctggaggctgccagtgacaggttaggtttagggcagagaagaagcaagaccatggtggggaagatgtggcctgtgttgtggacactctgtgcagtcagggtgaccgtcgatgccatctctgtggaaactccgcaggacgttcttcgggcttcgcagggaaagagtgtcaccctgccctgcacctaccacacttccacctccagtcgagagggacttattcaatgggataagctcctcctcactcatacggaaagggtggtcatctggccgttttcaaacaaaaactacatccatggtgagctttataagaatcgcgtcagcatatccaacaatgctgagcagtccgatgcctccatcaccattgatcagctgaccatggctgacaacggcacctacgagtgttctgtctcgctgatgtcagacctggagggcaacaccaagtcacgtgtccgcctgttggtcctcgtgccaccctccaaaccagaatgcggcatcgagggagagaccataattgggaacaacatccagctgacctgccaatcaaaggagggctcaccaacccctcagtacagctggaagaggtacaacatcctgaatcaggagcagcccctggcccagccagcctcaggtcagcctgtctccctgaagaatatctccacagacacatcgggttactacatctgtacctccagcaatgaggaggggacgcagttctgcaacatcacggtggccgtcagatctccctccatgaacgtggccctgtatgtgggcatcgcggtgggcgtggttgcagccctcattatcattggcatcatcatctactgctgctgctgccgagggaaggacgacaacactgaagacaaggaggatgcaaggccgaaccgggaagcctatgaggagccaccagagcagctaagagaactttccagagagagggaggaggaggatgactacaggcaagaagagcagaggagcactgggcgtgaatccccggaccacctcgaccagtgacaggccagcagcagagggcggcggaggaagggttaggggttcattctcccgcttcctggcctcccttctcctttctaagccctgttctcctgtccctccatcccagacattgatggggacatttcttccccagtgtcagctgtggggaacatggctggcctggtaagggggtccctgtgctgatcctgctgacctcactgtcctgtgaagtaacccctcctggctgtgacacctggtgcgggcctggccctcactcaagaccaggctgcagcctccacttccctcgtagttggcaggagctcctggaagcacagcgctgagcatggggcgctcccactcagaactctccagggaggcgatgccagccttggggggtgggggctgtcctgctcacctgtgtgcccagcacctggaggggcaccaggtggagggtttgcactccacacatctttcttgaatgaatgaaagaataagtgagtatgcttgggccctgcattggcctggcctccagctcccactccctttccaacctcacttcccgtagctgccagtatgttccaaaccctcctgggaaggccacctcccactcctgctgcacaggccctggggagcttttgcccacacactttccatctctgcctgtcaatatcgtacctgtccctccaggcccatctcaaatcacaaggatttctctaaccctatcctaattgtccacatacgtggaaacaatcctgttactctgtcccacgtccaatcatgggccacaaggcacagtcttctgagcgagtgctctcactgtattagagcgccagctccttggggcagggcctgggcctcatggcttttgctttccctgaagccctagtagctggcgcccatcctagtgggcacttaagcttaattggggaaactgctttgattggttgtgccttcccttctctggtctccttgagatgatcgtagacacagggatgattcccacccaaacccacgtattcattcagtgagttaaacacgaattgatttaaagtgaacacacacaagggagcttgcttgcagatggtctgagttcttgtgtcctggtaattcctctccaggccagaataattggcatgtctcctcaacccacatggggttcctggttgttcctgcatcccgatacctcagccctggccctgcccagcccatttgggctctggttttctggtggggctgtcctgctgccctcccacagcctccttctgtttgtcgagcatttcttctactcttgagagctcaggcagcgttagggctgcttaggtctcatggaccagtggctggtctcacccaactgcagtttactattgctatcttttctggatgatcagaaaaataattccataaatctattgtctacttgcgattttttaaaaaatgtatatttttatatatattgttaaatcctttgcttcattccaaatgctttcagtaataataaaattgtgggtggaaattcttaaaacttttttaatgtggattttgtttgcagtaagataaagcttgggtctcatggatcatctctactcaccatagcactcttctgcttcctaggggaggtgagacaaggtaacagatttgagaatcctggggtccctctgcttgtggccgcagtagggtcaggcagtgcctctagtggttgctgggaataggacagattcctgcctgctggtggaggtatattccaggagtctgcagtgtcaggacaccaggaggcctgggtgtcggtccacgtgcttgaaggaagatggtggagatgctctagccagttctgcttcctatgatgccccttctgagaaaggggcggggcagtcctcttgttctgtcacagagaactgtgacgcttcctcctccaaggcaacttcgctccgctgtgggctcttggctttgacatggactctcctgcgagatattcaaggtctgttcttcagtgtcctttcctgtgctccctcctgtccgagc

SEQ ID NO: 734893 - DNA, 3439 bp, Homo sapiens
taaatgaaaaatgaataaatcattgcagaacagtgtatatatatctaaaatatctatggaagaaaccagcaacagccactgctcctggagaattatggtcccacaccactgatcattctttcagtagggtgaccatcatccaaatttgcttgggactgagggggttccttttggtttgaaaaccaggacagtcctaggaaaagtgagacaagttggtcacatgtccccaagatgatcttctttcacttatgaacttgctactttcccagtcagaatataaactctgaagggggagacttcctgttttcttcatgactatatctcttgcgcactgtggggtggaggctgtagaagaggagagaagtagagaaacagatcacattgtgtcttgaagtgtttcagcaaatatgggcaacacccttcttttactagcttggaaccctacctctgagtgcatttccctttttattatttatttcctgtcagttataagagaggcctacccctttgtgagcagtctaggactttgtacacctgttaagtagggagaaggcaggggaggtggctggtttaaggggaacttgagggaagtagggaagactcctcttgggacctttggagtaggtgacacatgagcccagccccagctcacctgccaatccagctgaggagctcacctgccaatccagctgaggctgggcagaggtgggtgagaagagggaaaattgcagggacctccagttgggccaggccagaagctgctgtagctttaaccagacagctcagacctgtctggaggctgccagtgacaggttaggtttagggcagagaagaagcaagaccatggtggggaagatgtggcctgtgttgtggacactctgtgcagtcagggtgaccgtcgatgccatctctgtggaaactccgcaggacgttcttcgggcttcgcagggaaagagtgtcaccctgccctgcacctaccacacttccacctccagtcgagagggacttattcaatgggataagctcctcctcactcatacggaaagggtggtcatctggccgttttcaaacaaaaactacatccatggtgagctttataagaatcgcgtcagcatatccaacaatgctgagcagtccgatgcctccatcaccattgatcagctgaccatggctgacaacggcacctacgagtgttctgtctcgctgatgtcagacctggagggcaacaccaagtcacgtgtccgcctgttggtcctcgtgccaccctccaaaccagaatgcggcatcgagggagagaccataattgggaacaacatccagctgacctgccaatcaaaggagggctcaccaacccctcagtacagctggaagaggtacaacatcctgaatcaggagcagcccctggcccagccagcctcaggtcagcctgtctccctgaagaatatctccacagacacatcgggttactacatctgtacctccagcaatgaggaggggacgcagttctgcaacatcacggtggccgtcagatctccctccatgaacgtggccctgtatgtgggcatcgcggtgggcgtggttgcagccctcattatcattggcatcatcatctactgctgctgctgccgagggaaggacgacaacactgaagacaaggaggatgcaaggccgaaccgggaagcctatgaggagccaccagagcagctaagagaactttccagagagagggaggaggaggatgactacaggcaagaagagcagaggagcactgggcgtgaatccccggaccacctcgaccagtgacaggccagcagcagagggcggcggaggaagggttaggggttcattctcccgcttcctggcctcccttctcctttctaagccctgttctcctgtccctccatcccagacattgatggggacatttcttccccagtgtcagctgtggggaacatggctggcctggtaagggggtccctgtgctgatcctgctgacctcactgtcctgtgaagtaacccctcctggctgtgacacctggtgcgggcctggccctcactcaagaccaggctgcagcctccacttccctcgtagttggcaggagctcctggaagcacagcgctgagcatggggcgctcccactcagaactctccagggaggcgatgccagccttggggggtgggggctgtcctgctcacctgtgtgcccagcacctggaggggcaccaggtggagggtttgcactccacacatctttcttgaatgaatgaaagaataagtgagtatgcttgggccctgcattggcctggcctccagctcccactccctttccaacctcacttcccgtagctgccagtatgttccaaaccctcctgggaaggccacctcccactcctgctgcacaggccctggggagcttttgcccacacactttccatctctgcctgtcaatatcgtacctgtccctccaggcccatctcaaatcacaaggatttctctaaccctatcctaattgtccacatacgtggaaacaatcctgttactctgtcccacgtccaatcatgggccacaaggcacagtcttctgagcgagtgctctcactgtattagagcgccagctccttggggcagggcctgggcctcatggcttttgctttccctgaagccctagtagctggcgcccatcctagtgggcacttaagcttaattggggaaactgctttgattggttgtgccttcccttctctggtctccttgagatgatcgtagacacagggatgattcccacccaaacccacgtattcattcagtgagttaaacacgaattgatttaaagtgaacacacacaagggagcttgcttgcagatggtctgagttcttgtgtcctggtaattcctctccaggccagaataattggcatgtctcctcaacccacatggggttcctggttgttcctgcatcccgatacctcagccctggccctgcccagcccatttgggctctggttttctggtggggctgtcctgctgccctcccacagcctccttctgtttgtcgagcatttcttctactcttgagagctcaggcagcgttagggctgcttaggtctcatggaccagtggctggtctcacccaactgcagtttactattgctatcttttctggatgatcagtcagattttcttatcctacactcgcttgtcctgttcgcgacaagcaaaatcagtaattattttaaaatgaacatatgtatttttattaacttttagttaaatacagattatacaacgaggtcagcataagcctaaatcaatatagagggctaactcaggcattgtcttgttaatttgtagactggattaaaaacaacctgtcctgttttgtcagttcccagttacttcgtttagaataaattagaccaaaagaagaaactgctgtcctg

SEQ ID NO: 734894 - DNA, 250 bp, Homo sapiens
gcccaacaccttaaaccccccgagcacacaaagcagtgagaagtagttatcttcctggttctttctagttgcctaataacatagttggcttgctctggtctcaagtcaatttggaaacagagagagaatcaagagaatcaaatcaggggacgaagcaaaacaaaagtgaatagcaaacaataagcacatgaaaaatgtgcaacattagccatgggggaaaattcaaatcaaaaccgcaattagataccac

SEQ ID NO: 734895 - DNA, 250 bp, Homo sapiens
ttgtgggtgtggggtcggggctcacctcctcccacatccctgcccagaggtgggcagagtgggggcagtgccttgctccccctgctcgctctctgctgacctccggctccctgtgctgccccaggaccatgaatggcacctacaacacctgtggctccagcgacctcacctggcccccagcgatcaagctgggcttctacgcctacttgggcgtcctgctggtgctaggcctgctgctcaacagcctggc

SEQ ID NO: 734896 - DNA, 250 bp, Homo sapiens
ctcagagatgaagtaggctcagttatctgcatgaaaggtagctgtctctggaaaagctaaagatgtgatttctgcatttcctcacttaatatgcaccaagaagtggacattgaccttcagagagtagagctttcatttattgggtaatgaaccaatttgctgtcaaattgtttcatcagatgctattagtcacctgggatacagtggataaggattttaattttattattttcaagggacaagacttttg

SEQ ID NO: 734897 - DNA, 250 bp, Homo sapiens
acctcccttcaaaattagaaccaagatgagaatgaagttgaaggatgaagatgttttatataatatctttacttacaaaaattaaaagaccaaagatgtgctgtaattctgaacttcactggatctacaaacatcaatagtggtcggcagggcgtgggggctcatgccagtgatcccagcactttgggaggccaaggtgggtggatcagttggggtcaggatttcgagaccagtctggccaacatggtga

SEQ ID NO: 734898 - DNA, 250 bp, Homo sapiens
cgtgggccgctggggctctccctttctaagggaggcacctgaaagtgtgaggatcaagagcagtaggaggtgtcagtaataaacctaataagcactgtccagggcatgacacgtcacctcagccccagagcctgctgaatccccaactcctgcttttctgtacctccccttcctcccactggcttctctgcttctgagctgcctgcctctggactttctcttttagtctgtgactttcccctaccctcac

SEQ ID NO: 734899 - DNA, 250 bp, Homo sapiens
cgtgtcagctgtggctgcaactcctttggaaaatgcctgctcctgtttagaaggctgtgcctgtgttcattaaagagtcactggggtcctgttgtgttggacacagtcaaggcacaaaatcaaatcctatccagtatctgacggcctgggtggggcggagaacggacttcacacactagtttgttgaggtctcttggaaagcacagcaaagagcagcagtaggtgctaaaccccttgtttcttttcttag

SEQ ID NO: 734900 - DNA, 250 bp, Homo sapiens
ttatttcaagccaagataattttagaacattacttcttacaccagcagttgcctgactgtactgatctcacaaaataagcaggaaaggatgttgagaaatgaagtgaacgcctgtgaccaaatcatcaaagaactagaagagggaaactgtgagtagagtattcctatagaaccttctttccaatatcatggttgtgactggggagggtgcctgagagaaatatgatggaaggaccgggtaaacacacct

SEQ ID NO: 734901 - DNA, 250 bp, Homo sapiens
gttatccccaacacccaccccaaatatttcccaggtctcgctgagctctgccagtctgttttcactgccctttgaaactcataactaagacaccaaagcttccagatgcctccagatgcttccagatctgaccaagactgctgaggcagacaaagcatggaccacagcgatggggcatgagagagtggggctgccttccctctgccggggcagcagaggctgaggctgtgactgtgttgggcgataacat

SEQ ID NO: 734902 - DNA, 250 bp, Homo sapiens
atatggaacttaaggagcctttaaagcttcacattttgataacttcgtctttggtacgttttctcccatatacatcatgccttacttttcataccatgaatttctacaatatagaacttaactaattctgtccaatattataaaaacatcccacagtttccacctaagaaagagacaaagagtgagcaaaaagtaaaagaaataagaaaaccaatacctctcagggtagattttgtatttcattgtatgg

SEQ ID NO: 734903 - DNA, 250 bp, Homo sapiens
gaaagatatgagcccacagataaagaaggcacattatatattaaacaggataaacagctctacacaagattacaaaagcctactcaaatacatcaaaaatcacactaaacagaaacagaacaaactttacagctgaaagattgaggttgtcaaaaaggatgaagaaataaacctcctagtgatttgctatttaatagaggcatgcctatgataaataatagaaaagggttagaagtaaaaggatagaaaa

SEQ ID NO: 734904 - DNA, 250 bp, Homo sapiens
ttctcagaaaaataactgtaaatctttctggacagccatgactgtagcaaggcttgatagcagaggtttggtggttcagagttatacaactaatcccaggtgattttatcaattccagtgttaccatctcctgagttttggtttgtaatcttttgtccctcccacccccacagaagatttctaagtagggtgactttttaaataaaaatttattgaataattaatgataaaacataataataaacataaa

SEQ ID NO: 734905 - DNA, 250 bp, Homo sapiens
atataaagaaaaccaggaagattaagacagtcgtgcaagaagtagtggatggcaaggtcgtgtcatctgaagtcaaagaggtggaagaaaatatctaaatagctaccagaaggagatgctgctgaggttttgaaagaaatttggctataatcttatctttgctccctgcaagaaatcagccataagaaagcactattaatactctgcagtgattagaaggggtggggtggcgggaatcctatttatcaga

SEQ ID NO: 734906 - DNA, 250 bp, Homo sapiens
ctcttcccacctggccaaatcaccgacctgaaggcggaaattcacgggggcagtctcattaatctgacttggacagctcctggggatgattatgaccatggaacagctcacaagtatatcattcgaataagtacaagtattcttgatctcagagacaagttcaatgaatctcttcaagtgaatactactgctctcatcccaaaggaagccaactctgaggaagtctttttgtttaaaccagaaaacatta

SEQ ID NO: 734907 - DNA, 250 bp, Homo sapiens
taaatgaggtataaggactcacacaaattaaaatacagctgcactgaggcagcgacctcaagtgtcctgaaagcttacattttcctgagacctcaatgaagcagaaatgtacttaggcttggctgccctgtctggaacatggactttcttgcatgaatcagatgtgtgttctcagtgaaataactaccttccactctggaaccttattccagcagttgttccagggagcttctacctggaaaagaaaaga

SEQ ID NO: 734908 - DNA, 250 bp, Homo sapiens
gtcaaccggcacacccggaagtactggtgccggcagggagctagaggtggctgcataaccctcatctcctcggagggctacgtctccagcaaatatgcaggcagggctaacctcaccaacttcccggagaacggcacatttgtggtgaacattgcccagctgagccaggatgactccgggcgctacaagtgtggcctgggcatcaatagccgaggcctgtcctttgatgtcagcctggaggtcagccagg

SEQ ID NO: 734909 - DNA, 250 bp, Homo sapiens
gtgcggtggaatgatcccggtgcacaatattccttagttgacaaagagaagctgccaagattcccattttcaattgaccaggaaggagatatttacgtgactcagcccttggaccgagaagaaaaggatgcatatgttttttatgcagttgcaaaggatgagtacggaaaaccactttcatatccgctggaaattcatgtaaaagttaaagatattaatgataatccacctacatgtccgtcaccagtaa

SEQ ID NO: 734910 - DNA, 250 bp, Homo sapiens
gttctggaccacagcaagcggtggtggctggtgaagaatgaggcgggacggagcggctacattccaagcaacatcctggagcccctacagccggggacccctgggacccagggccagtcaccctctcgggttccaatgcttcgacttagctcgaggcctgaagaggtcacagactggctgcaggcagagaacttctccactgccacggtgaggacacttgggtccctgacggggagccagctacttcgca

SEQ ID NO: 734911 - DNA, 250 bp, Homo sapiens
agctttgtgcagcctgggaaacccatctctgagtcccatccaatcctgtacttcaccaatggccatctgtatccaactggttctaagtcaaagcgggtcagcctgcttcagaacccccccacagtgggggtggccacactgaaactgactgacgtccacccctcagatactggaacctacctctgccaagtcaacaacccaccagatttctacaccaatgggttggggctaatcaaccttactgtgctgg

SEQ ID NO: 734912 - DNA, 250 bp, Homo sapiens
ctgctgaacgagaggagcctcttccggcaagccatcagcccctccgacagggtgaagctctttccccaccggaactcaagcaagtgcaagtctaagccccagattgctgctctgaaagaggagacagaagaagaggtgcaagatacaaggctttagagagcagcataaatgttgacatgggacatttgctcatggaattggagctcgtgggacagtcacctcatggaattggagctcgtggaacagttac

SEQ ID NO: 734913 - DNA, 250 bp, Homo sapiens
acagccaaccaagcattccctaccctcctgggtgagatctgagaatgagaaacaccatgcttcacaaggatgctctccatggaattctccccaggccctaaaatgaatgaaaaaaaatgtgatctgagccacatggggacgtttccatctttccttatggtggatttttaagcatcaagtatccaagggtttgctcccatctgtaatgaaactagctgcgctctgggatacagatggggtttcacttctc

SEQ ID NO: 734914 - DNA, 250 bp, Homo sapiens
gtgggtgtgcagtgcacgtgagagcacgtggcggcttctgggggccatgtttggggagggaggtgtgccagcagcctggagagcctcagtccctgtagccccctgccctggcacagctgcatgcacttcaagggcagcctttgggggttggggtttctgccacttccgggtctaggccctgccccaaatccagccagtcctgccccagcccacccccacattggagccctcctgctgctttggtgcctca

SEQ ID NO: 734915 - DNA, 250 bp, Homo sapiens
aacaactccaaacccgtggaggacaaggatgctgtggccttcacctgtgaacctgagactcaggacgcaacctacctgtggtgggtaaacaatcagagcctcccggtcagtcccaggctgcagctgtccaatggcaacaggaccctcactctattcaatgtcacaagaaatgacacagcaagctacaaatgtgaaatccagaacccagtgagtgccagccgcagtgacccagtcatcctgaatgtcctct

SEQ ID NO: 734916 - DNA, 250 bp, Homo sapiens
gcttttttaggcttagagacagaaactttagcattggcccagtagtggcttctagctctaaatgtttgccccgccatccctttccacagtatccttcttccctcctcccctgtctctggctgtctcgagcagtctagaagagtgcatctccagcctatgaaacagctgggtctttggccataagaagtaaagatttgaagacagaaggaagaaactcaggagtaagcttctagaccccttcagcttctac

SEQ ID NO: 734917 - DNA, 250 bp, Homo sapiens
caacgaatccagctcacttgctaaataagaatctatgacattaaatgtagtagatgctattagcgcttgtcagagaggtggttttcttcaatcagtacaaagtactgagacaatggttagggttgttttcttaattcttttcctggtagggcaacaagaaccatttccaatctagaggaaagctccccagcattgcttgctcctgggcaaacattgctcttgagttaagtgacctaattcccctgggaga

SEQ ID NO: 734918 - DNA, 250 bp, Homo sapiens
cagtctcaagtatgtccgtcctgggggtggataccagcccaccttcacccttgtccaaaaatgtgaggtgaatgggcagaacgagcatcctgtcttcgcctacctgaaggacaagctcccctacccttatgatgacccattttccctcatgaccgatcccaagctcatcatttggagccctgtgcgccgctcagatgtggcctggaactttgagaagttcctcatagggccggagggagagcccttccga

SEQ ID NO: 734919 - DNA, 250 bp, Homo sapiens
caggattatgtttgttgacccatctctgacagttagagccgatatcactggaagatattcaaatcgtctctatgcttacgaacctgcagatacagctctgttgcttgacaacatgaagaaagctctcaagttgctgaagactgaattgtaaagaaaaaaaatctccaagcccttctgtctgtcaggccttgagacttgaaaccagaagaagtgtgagaagactggctagtgtggaagcatagtgaacaca

SEQ ID NO: 734920 - DNA, 250 bp, Homo sapiens
ctgacttaggagtcagagcccggcaggggctgaggaggaggagcagggggtgctgcgtggaaggtgctgcaggtccttgcacgctgtgtcgcgcctctcctcctcggaaacagaaccctcccacagcacatcctacccggaagaccagcctcagagggtccttctggaaccagctgtctgtggagagaatggggtgctttcgtcagggactgctgacggctggtcctgaggaaggacaaactgcccagac

SEQ ID NO: 734921 - DNA, 250 bp, Homo sapiens
aagatcgagacacgtgatgggaagctggtgtctgagtcctctgacgtcctgcccaagtgaacagctgcggcagcccctcccagcctacccctcctgcgctgccccagagcctgggaaggaggccgctatgcagggtagcactgggaacaggagacccacctgaggctcagccctagccctcagcccacctggggagtttactacctggggaccccccttgcccatgcctccagctacaaaacaattcaat

SEQ ID NO: 734922 - DNA, 250 bp, Homo sapiens
tttccaaccctgggaaaccatccagtctgagggaggaggccaaactcccagtgctgggggtccctgtgcagccctcaaacccttcaccttggtgcacccagccacacctggtggacacaaagctctcacatcgataggatcccatgaggatggtccccttcacctgggagaaaagtgacccagtttaggagctggaggggggtctttgtcccccacccccaaactgccctgaaataaacctggagtgagc

SEQ ID NO: 734923 - DNA, 250 bp, Homo sapiens
tcctcaacccacatggggttcctggttgttcctgcatcccgatacctcagccctggccctgcccagcccatttgggctctggttttctggtggggctgtcctgctgccctcccacagcctccttctgtttgtcgagcatttcttctactcttgagagctcaggcagcgttagggctgcttaggtctcatggaccagtggctggtctcacccaactgcagtttactattgctatcttttctggatgatcag

SEQ ID NO: 734924 - DNA, 250 bp, Homo sapiens
cacattctaacacattagaagctgcaggatgctgaaattgcaaggctgatggaagacttggaccggaacaaggaccaggaggtgaacttccaggagtatgtcaccttcctgggggccttggctttgatctacaatgaagccctcaagggctgaaaataaatagggaagatggagacaccctctgggggtcctctctgagtcaaatccagtggtgggtaattgtacaataaattttttttggtcaaattta

SEQ ID NO: 734925 - DNA, 250 bp, Homo sapiens
caaggagtatgtgtgacctgggatctccttgccccagcctgacaggctatgggagtgtctagatgcctgaaagggcctggggctgagctcagcctgtgggcagggtgccggacaaaggcctcctggtcactctgtccctgcactccatgtatagtcctcttgggttgggggtgggggggtgccgttggtgggagagacaaaaagagggagagtgtgctttttgtacagtaataaaaaataagtattggga

SEQ ID NO: 734926 - DNA, 250 bp, Homo sapiens
ctcaggggttgcaggcggggacatggaaacttttgaaaacatcagggctgctgggggcaagatgtgctgggcaccaaagagcatagagtgccgggcggagaactaccccgaggtaagcatcgaccaggtcgggcaggtgctgacctgcagcctggagacggggctgacctgcaagaacgaagaccagacaggcaggttcaacatgtgcttcaactacaacgtgcgtgtgctttgctgtgacgactacagc

SEQ ID NO: 734927 - DNA, 250 bp, Homo sapiens
tccaggatccctggagtgccttggtgtttcaagcccctgcaggaagcagaatgcaccttctgaggcacctccagctgcccccggccgggggatgcgaggctcggagcacccttgcccggctgtgattgctgccaggcactgttcatctcagcttttctgtccctttgctcccggcaagcgcttctgctgaaagttcatatctggagcctgatgtcttaacgaataaaggtcccatgctccacccgaggac

SEQ ID NO: 734928 - DNA, 250 bp, Homo sapiens
ttgtgcaggtaatttgacagagtgttggatgtgtcatgtcatcatgtcaaacccaaatatttgacctaagggatcctttattctgcccagtggctaactttaacaacatccctaatacaactgtttattcaaatgcacggtggtccctgttagagttagacctctagactcacctgttctcacgccctgttttaatttaacccagctatgggatgccagataacagaattgctgcctactagctgaacag

SEQ ID NO: 734929 - DNA, 250 bp, Homo sapiens
ccggtgggctagaaagtacaagaaaaggcagcacgtggttttatgaaggtatcttaggtggagctactccccacctcccaccaacatatacattttgttgcaggaaatgtttaattccgcatgatgtttccctctccttccaacaaaagaaggtcaaactgtgggtcgtagagccttgacaatgttgtcctcctgttcatctgtgcaccacttgacagactgtagcttctcttgctctcgaccggccctg

SEQ ID NO: 734930 - DNA, 250 bp, Homo sapiens
gctggcgcagatcgacggcacattatcaaccatcgagttccagcgggaggccctggagaatgccaacaccaacaccgaggtgctcaagaacatgggctatgccgccaaggccatgaaggcggcccatgacaacatggacatcgataaagttgatgagttaatgcaggacattgctgaccagcaagaacttgcagaggagatttcaacagcaatttcgaaacctgtagggtttggagaagagtttgacgag

SEQ ID NO: 734931 - DNA, 250 bp, Homo sapiens
tgaagaggcaccctggcaagcagcagtgattgggggaggggacaggatctaacaatgtcacttgggccagaatggacctgccctttctgctccagacttggggctagatagggaccactccttttaggcgatgcctgactttccttccattggtgggtggatgggtggggggcattccagagcctctaaggtagccagttctgttgcccattcccccagtctattaaacccttgatatgccccctaggcc

SEQ ID NO: 734932 - DNA, 250 bp, Homo sapiens
atactgggtttggtgttttctatggtcctgtattgccagatcgggaacaaatgaatctgtggatgcatcaacctatcgtcagtcaaacccctttaaaatgttgctttggctttgtaaatttaaatatgtaagtgctatataagtcaggagcagctgtctttttaaaatgtctcggctagctagaccacagatatcttctagacatattgaacacatttaagatttgagggatataagggaaaatgatatg

SEQ ID NO: 734933 - DNA, 250 bp, Homo sapiens
aggttctgaagactgccctcatccacgatggcctagcacgtggaattcgcgaagctgccaaagccttagacaagcgccaagcccatctttgtgtgcttgcatccaactgtgatgagcctatgtatgtcaagttggtggaggccctttgtgctgaacaccaaatcaacctaattaaggttgatgacaacaagaaactaggagaatgggtaggcctttgtaaaattgacagagaggggaaaccccgtaaagt

SEQ ID NO: 734934 - DNA, 250 bp, Homo sapiens
gggcagattcaagagcagatccaagtcttgcagcaaaaggagaaggagacagtacaagtgaaggcacaaggtgtacacagggtcgatgtcttcacggaccaggtagaacatgagaagcaaaggatcctcacagaatttgaactcctgcatcaagtcctagaggaggagaagaatttcctgctatcacggatttactggctgggtcatgagggaacggaagcggggaaacactatgttgcctccactgagc

SEQ ID NO: 734935 - DNA, 250 bp, Homo sapiens
ggaaagttggtatgaagcattaccacttaaagaggaaccagagcttctgcccaactgtcaaccttgacaaattgtggactttggtcagtgaacagacacgggtgaatgctgctaaaaacaagactggggctgctcccatcattgatgtggtgcgatcgggctactacaaagttctgggaaagggaaagctcccaaagcagcctgtcatcgtgaaggccaaattcttcagcagaagagctgaggagaagat

SEQ ID NO: 734936 - DNA, 250 bp, Homo sapiens
gagcaaaacctgaaggggccctccagaacaatgatgggctttatgatcctgactgcgatgagagcgggctctttaaggccaagcagtgcaacggcacctccacgtgctggtgtgtgaacactgctggggtcagaagaacagacaaggacactgaaataacctgctctgagcgagtgagaacctactggatcatcattgaactaaaacacaaagcaagagaaaaaccttatgatagtaaaagtttgcggac

SEQ ID NO: 734937 - DNA, 250 bp, Homo sapiens
gccaccccctcctccagcccagggacggcactcacgcctccagtgtggatcagcacaaccaccacacccacaaccagaggctccacggtgaccccctcctccatcccggggaccacccacaccgccacagtgctgaccaccaccaccacaactgtggccactggttctatggcaacaccctcctctagcacacagaccagtggtactcccccatcactgaccaccacggccactacgatcacagccaccg

SEQ ID NO: 734938 - DNA, 250 bp, Homo sapiens
gatctttctgcaccctggggaatcagtgatccaggtttctgggaagtacaagtggtacctgaagaagctggtatttgtgacagacaagggccgctatctgtcttttgggaaagacagtggcacaagtttcaatgccgtccccttgcaccccaacaccgtgctccgcttcatcagtggccggtctggttctctcatcgatgccattggcctgcactgggatgtttaccccactagctgcagcagatgctga

SEQ ID NO: 734939 - DNA, 250 bp, Homo sapiens
taccagaccgccctcttgagtggctcagatgaggaatgagccgagatgcggagggcgcagatgtcccactgcacagctggaatgaatggagttcatcccctccacctgaatgcctgctgtggtctgatcttaagggtctatatatttgcacctcctcattcaacacagggctggaggttctacaacaggaaatcaggcctacagcatcctgtgtatcttgcagttgggatttttaaacatactataaagt

SEQ ID NO: 734940 - DNA, 250 bp, Homo sapiens
gtttcttctacctctgttatctaagcagagggaagtaaacttctcaccgccccccacccctcactgcccccgattacactagaattgctttcgccaaattgtagttgaagctaaggaaggggaatctggcccctgctgggagagggaactggaatgccacacaaggcaaggcctgcttccttccttcccctctgctgctgctgcctcggaacgctgcagcccaggcttcctcccacagtggcccttggaa

SEQ ID NO: 734941 - DNA, 250 bp, Homo sapiens
gactttggacatacgaggaccctcagaccggaggaacacctgcccaaccccaacacgtgcttatgtaaccacgtggaaagcggcccctgctgcccctccacacacacatacacactcactgatctacagcccctgttcggcgtcagagtccccactagacccagtggaaggggttagagaccaagtaggggccagtttccaattcaccctgtcagggagtgagccggatctgacgttccttgtgacttaa

SEQ ID NO: 734942 - DNA, 250 bp, Homo sapiens
agaggccacactacacacaccagatggcatccttgggacctgaatctatcacccaggaatctcaaactccctttggccctgaaccagggccagataaggaacagctcgggccactcttctgaaggccaatgtggaggaaagggagcagccagccgtttgggagaagatctcaaggatccagactctcattcctttcctctggcccagtgaatttggtctctcccagctctgggggactccttccttgaac

SEQ ID NO: 734943 - DNA, 250 bp, Homo sapiens
gttcttcgtgaactttgtggttgggcaggatccgggctcagacgtcgccttccacttcaatccgcggtttgacggctgggacaaggtggtcttcaacacgttgcagggcgggaagtggggcagcgaggagaggaagaggagcatgcccttcaaaaagggtgccgcctttgagctggtcttcatagtcctggctgagcactacaaggtggtggtaaatggaaatcccttctatgagtacgggcaccggctt

SEQ ID NO: 734944 - DNA, 250 bp, Homo sapiens
tatgccctatggctgcctcttagaccatgtccgggaaaaccgcggacgcctgggctcccaggacctgctgaactggtgtatgcagattgccaaggggatgagctacctggaggatgtgcggctcgtacacagggacttggccgctcggaacgtgctggtcaagagtcccaaccatgtcaaaattacagacttcgggctggctcggctgctggacattgacgagacagagtaccatgcagatgggggcaag

SEQ ID NO: 734945 - DNA, 250 bp, Homo sapiens
cattggtagcaactcctggtaagaagggtgctgccatcccagccaagggggcaaagaatggcaagaatgccaagaaggaagacagtgatgaagaggaggatgatgacagtgaggaggatgaggaggatgacgaggacgaggatgaggatgaagatgaaattgaaccagcagcgatgaaagcagcagctgctgcccctgcctcagaggatgaggacgatgaggatgacgaagatgatgaggatgacgatga

SEQ ID NO: 734946 - DNA, 250 bp, Homo sapiens
agcacctggtgaatggccggatggactttgccttcccgggcagcaccaactccctgcacaggatgaccacgaccagtgctgctgcctatggcacccacctgagcccacacgtgccccaccgcgtgctaagcacatcctccaccctcacacgggactacaactcactgacccgctcagaacactcacactcgaccacactgcccagggactactccaccctcacctccgtctcctcccacgactctcgcct

SEQ ID NO: 734947 - DNA, 250 bp, Homo sapiens
ctccggggtggcgctggggttggctccatgaccaagatctatgggggacgtcagagaaacggcgtcatgcccagccacttcagccgaggctccaagagtgtggcccgccgggtcctccaagccctggaggggctgaaaatggtggaaaaggaccaagatggcggccgcaaactgacacctcagggacaaagagatctggacagaatcgccggacaggtggcagctgccaacaagaagcattagaacaaac

SEQ ID NO: 734948 - DNA, 250 bp, Homo sapiens
aggaaggacaggaggaagacaggcaaatgtacttctcacccagtcttctacacagatggaatctctttggggctaagagaaaggttttattctatattgcttacctgatctcatgttaggcctaagaggctttctccaggaggattagcttggagttctctatactcaggtacctctttcagggttttctaaccctgacacggactgtgcatactttccctcatccatgctgtgctgtgttatttaattt

SEQ ID NO: 734949 - DNA, 250 bp, Homo sapiens
gcctcacctctacctgcccccatcataagggcactgagcccttcccaggctggatactaagcacaaagcccatagcactgggctctgatggctgctccactgggttacagaatcacagccctcatgatcattctcagtgagggctctggattgagagggaggccctgggaggagagaagggggcagagtcttccctaccaggtttctacacccccgccaggctgcccatcagggcccagggagcccccag

SEQ ID NO: 734950 - DNA, 250 bp, Homo sapiens
gttaccctggattaacgagttacctcgtccgagtggtgagcaccaactacaaccagcatgctatggtgttcttcaagaaagtttctcaaaacagggagtacttcaagatcaccctctacgggagaaccaaggagctgacttcggaactaaaggagaacttcatccgcttctccaaatctctgggcctccctgaaaaccacatcgtcttccctgtcccaatcgaccagtgtatcgacggctgagtgcacag

SEQ ID NO: 734951 - DNA, 250 bp, Homo sapiens
aaccagaaggaccctggtgtccttgaccgcatgatgaagaaactggacaccaacagtgatggtcagctagatttctcagaatttcttaatctgattggtggcctagctatggcttgccatgactccttcctcaaggctgtcccttcccagaagcggacctgaggaccccttggccctggccttcaaacccaccccctttccttccagcctttctgtcatcatctccacagcccacccatcccctgagcac

SEQ ID NO: 734952 - DNA, 250 bp, Homo sapiens
attgccagctctgggttgaccgtggaggtagatgcccccaaatctcaggacctcgccaagatcatggcagacatccgggcccaatatgacgagctggctcggaagaaccgagaggagctagacaagtactggtctcagcagattgaggagagcaccacagtggtcaccacacagtctgctgaggttggagctgctgagacgacgctcacagagctgagacgtacagtccagtccttggagatcgacctgg

SEQ ID NO: 734953 - DNA, 250 bp, Homo sapiens
ggtgcagctgggctccagggtccagcccacaagctgcatcagggtctctgggagaggaggggcctggagggccaggagtcccagactcacgcaccctgggccacagggagccgggaatcggggcctgctgctcctgctggcctggaagactctgtggggtcagcactgtactccgttgctgtttttttataaacacactcttggaagtggcaaaaacacaacaacaacaaaacaaaaaaagagggcggcg

SEQ ID NO: 734954 - DNA, 250 bp, Homo sapiens
gggagccaagagaatttcccctgcaagagagaccaggagtttcacaaaaacatctcccaacttcatggtgctgatcgccacctccgtggagacatcagccgccagtggcagccccgagggagctggaatgaccacagttcagaccatcacaggcagtgatcccgaggaagccatctttgacaccctttgcaccgatgacagctctgaagaggcaaagacactcacaatggacatattgacattggctcac

SEQ ID NO: 734955 - DNA, 250 bp, Homo sapiens
cacctcacagcaccctgctgcttgcccagtgcccctacgccgggccaggccccctgacagcagtggatctggagaaagctattgcacagaacgcagtgggtacctggcagatgggccagccagtgactccagctcagggccctgtcatggctcttccagtgactctgtggtcaactgcacggacatcagcctacagggggtccatggcagcagttctactttctgcagctccctaagcagtgactttgac

SEQ ID NO: 734956 - DNA, 250 bp, Homo sapiens
gaagtgaatgaagagggaacagaggcggcagctgccacagcaggcatcgcaactttctgcatgttgatgcccgaagaaaatttcactgccgaccatccattccttttctttattcggcataattcctcaggtagcatcctattcttggggagattttcttccccttagaagaaagagactgtagcaatacaaaaatcaagcttagtgctttattacctgagtttttaatagagccaatatgtcttatatc

SEQ ID NO: 734957 - DNA, 250 bp, Homo sapiens
tttatgattccctggattatgcaaagaaaaatgaacccaaacatagacttgcaagacatggcctgtatgagaagaaaaagacctcaagaaagcaacgaaaggaacgcaagaacagaatgaagaaagtcagggggactgcaaaggccaatgttggtgctggcaaaaagtgagctggagattggatcacagccgaaggagtaaaggtgctgcaatgatgttagctgtggccactgtggatttttcgcaagaa

SEQ ID NO: 734958 - DNA, 250 bp, Homo sapiens
ttcccaaatgtcttcatagccagtaagctggttcgggtggtttatgcctcctggtccagggtgcaagctgacctcaactgcatggaagacttgctccagagctcagtgccgtggaaatacttcctgaatacatgtgggacggactttcctataaagagcaatgcagagatggtccaggctctcaagatgttgaatgggaggaatagcatggagtcagaggtacctcctaagcacaaagaaacccgctgga

SEQ ID NO: 734959 - DNA, 250 bp, Homo sapiens
gaacacctgtccattgaagatttcactcaggcctttgggatgactccagctgccttctctgctctgcctcgatggaagcaacaaaacctcaagaaagaaaaaggactattttgagaagagtagctgtggttgtaaagcagtaccctaccctgattgtagggtctcattttctcaccgatattagtcctacaccaattgaagtgaaattttgcagatgtgcctatgagcacaaacttctgtggcaaatgcc

SEQ ID NO: 734960 - DNA, 250 bp, Homo sapiens
agctctgatagtgggaagaaagtgccaactcctgccccgcggcctttgctgctgaagaaatctgtttcctcagaaaaccccacctacccttcagctccactgaaacctgtcactgttcctccccgactcgcaggggcatcacaagccaaagcatacaagtcactgggagaagggcccccagccaaccccccagttccagttctgcagagcaagcccttggtggacatcgatctcatcagctttgatgatg

SEQ ID NO: 734961 - DNA, 250 bp, Homo sapiens
ctccttgctgagcgacatggcggctccccacaaccccttgcaaccacccccttaagccaggagccagtgaaccccccatctgaggcctctccaactcgggaccgttcaccacctaagtctcccgagaaacttccccagtcttcttcctcagagagcagcccaccatcccctcaacctaccaaagtttctcggcatgccagctcttccccagaaagtcctaaacctgctccagctccagggtcccaccgag

SEQ ID NO: 734962 - DNA, 250 bp, Homo sapiens
gtccttaccttctattcataaatgttctatacagtggacagccctccagaatggtacttcagtgcctagtgtagtaactgaaatcttcaatgacacattaacatcacaatggcgaatggtgacttttctttcacgatttcattaatttgaaagcacacaggaaagttgctccattgataacgtgtatggagacttcggttttagtcaattccatatctcaatcttaatggtgattcttctctgttgaact

SEQ ID NO: 734963 - DNA, 250 bp, Homo sapiens
cccacacttaaactaaaggctaagaatataggcttgatgggaaattgaaggtaggctgagtattgggaatccaaattgaattttgattctccttggcagtgaactactttgaagaagtggtcaatgggttgttgctgccatgagcatgtacaacctctggagctagaagctcctcaggaaagccagttctccaagttcttaacctgtggcactgaaaggaatgttgagttacctcttcatgttttagaca

SEQ ID NO: 734964 - DNA, 250 bp, Homo sapiens
tgagaatggagaaagatagagagatctgcagactgaggtcccaattaaaccagtaccataaagatgtttcaaagagagaaggaagttgtagtgacttccaatttaagcttcatgaactgacaagcttgctggaagagaaggattccctcataaagcgtcagtcagaggaactctccaagttgcggcaagaaatatattcctctcataaccaaccctccactggtggaaggactactattaccactaaaaa

SEQ ID NO: 734965 - DNA, 250 bp, Homo sapiens
ataagcagacctacagcactgagcccaataacttgaaggcccgcaattccttccgctacaacggactgattcaccgcaagactgtgggcgtggagccggcagccgacggcaaaggtgtcgtggtggtcattaagcggagatccggccagcggaagcctgccacctcctatgtgcggaccaccatcaacaagaatgctcgcgccacgctcagcagcatcagacacatgatccgcaagaacaagtaccgccc

SEQ ID NO: 734966 - DNA, 250 bp, Homo sapiens
tccctgtgttccccaagaattcagagaacagcactggggctggaatgatctttaatgggcccaaggccaacaggcatatgcctcactactgcctggagaagggagagattcaggtcctccagcagcctccctcacccagtatgttttacagattacggggggaccgggtgagccagtgaccccctgcagcccccagcttcaggcctcagtgtctgccagtcaagcttcacaggcattgtgatggggcagc

SEQ ID NO: 734967 - DNA, 250 bp, Homo sapiens
aagacggccgtggttgtggggaccataactgatgatgtgcgggttcaggaggtacccaaactgaaggtatgtgcactgcgcgtgaccagccgggcccgcagccgcatcctcagggcagggggcaagatcctcactttcgaccagctggccctggactcccctaagggctgtggcactgtcctgctctccggtcctcgcaagggccgagaggtgtaccggcatttcggcaaggccccaggaaccccgcaca

SEQ ID NO: 734968 - DNA, 250 bp, Homo sapiens
cttcacgtagctcactggaattctgcaaagtactccagccttgctgaagctgcctcaaaggctgatggtttggcagttattggtgttttgatgaaggttggtgaggccaacccaaagctgcagaaagtacttgatgccctccaagcaattaaaaccaagggcaaacgagccccattcacaaattttgacccctctactctccttccttcatccctggatttctggacctaccctggctctctgactcatc

SEQ ID NO: 734969 - DNA, 250 bp, Homo sapiens
caagggcgggccgcgcggccttgcagctgaagctgcgtcggcggctcacggagctcctgggggcgcaggacggggcgctgctggtgcggctgctgcaggcgctgcgcgtggccaggatgcccgggctggagcggagcgtccgtgagcgcttcctccctgtgcactgatcctggccccctcttatttattctacatccttggcaccccacttgcactgaaagaggcttttttttaaatagaagaaatgagg

SEQ ID NO: 734970 - DNA, 250 bp, Homo sapiens
gttaaaatctggtttcagaaccgcagagcaaaggagaggaaaatcaacaagaagaagttgcagcagcaacagcagcagcagccaccacagccgcctccgccgccaccacagcctccccagcctcagccaggtcctctgagaagtgtcccagagcccttgagtccggtgtcttccctgcaagcctcagtgtctggctctgtccctggggttctggggccaactgggggggtgctaaaccccaccgtcaccc

SEQ ID NO: 734971 - DNA, 250 bp, Homo sapiens
gacatgcagaaggtgaccctgggcctgcttgtgttcctggcaggctttcctgtcctggacgccaatgacctagaagataaaaacagtcctttctactatgactggcacagcctccaggttggcgggctcatctgcgctggggttctgtgcgccatgggcatcatcatcgtcatgagtgcaaaatgcaaatgcaagtttggccagaagtccggtcaccatccaggggagactccacctctcatcaccccag

SEQ ID NO: 734972 - DNA, 250 bp, Homo sapiens
catgaacgtgcagggtgattatgagccaactgatgccaccgggttcatcaacatcaattccctcaggctgaaggaatatcatcgtctccagagcaaggtcactgccaaatagacccgtgtacaatgaggagctggggcctcctcaatttgcagatcccccaagtacaggcgctaattgttgtgataatttgtaattgtgacttgttctccccggctggcagcgtagtggggctgccaggccccagctttg

SEQ ID NO: 734973 - DNA, 250 bp, Homo sapiens
agaaagacaagaagctgaaggaaatcttgctgcaggtggaggacgagcgcaagatggccgagcagtacaaggagcaggcagagaaaggcaatgccagggtcaagcagctcaagaggcagctggaggaggcagaggaggagtcccagcgcatcaacgccaaccgcaggaagctgcagcgggagctggatgaggccacggagagcaacgaggccatgggccgcgaggtgaacgcactcaagagcaagctcag

SEQ ID NO: 734974 - DNA, 250 bp, Homo sapiens
ttctgcagtgttgaaacagaatggaaatgacaagaaatatctgcagttatccaggagaaagtataatggcaaaattattggtttctttctttactttgtgcttgtttttatccccttgggttgtttttctctgatttttaaataaacttaagaaatttagattacagagtatgcatgactgtaagaaaaagaaattgagaggaagtgatcatagcaaattaaagaagtcttttcctcccagaacttaaag

SEQ ID NO: 734975 - DNA, 250 bp, Homo sapiens
atgaggagaaaaacaagaaatttggcctttctgtgggccatcacttgggcaagtccatcccaactgacaaccagatcaaagctagaaaatgagattccttagcctggatttccttctaacatgttatcaaatctgggtatctttccaggcttccctgacttgctttagtttttaagatttgtgtttttctttttccacaaggaataaatgagagggaatcgactgtattcgtgcatttttggatcatttt

SEQ ID NO: 734976 - DNA, 250 bp, Homo sapiens
cctctggggcatcgccctagtgctctgcgtggcggagaacgtgtttgctgtacgctgtgctcagctcacccaccagctgctggagctgaggccctggtgggggaaaagcagccaccacatgatgcgggagaacccagagctggtggagggccgtgacctgctgagctgcaccagctctgagcctctgaccctctgagagatgatgtcctgcccaggcccgatggccactaggaccctgcaagcaactctg

SEQ ID NO: 734977 - DNA, 250 bp, Homo sapiens
ccaactcagattgagccctacattgtgctgcacctggtcatacggagttgaatcagacctggttcccgcctcccccaaggctcatggtccttggaggacccgttgcagggcgaggtcaagagagttctgacctggatggcccatagacctgacgtcccagaatccatgcttctcatctgcaaaatgaaaatgtcaatacttacttcttagcactgttgagagggttacttacataaaggaattttggtga

SEQ ID NO: 734978 - DNA, 250 bp, Homo sapiens
gggattcttggctcggggtttgccctgaaggtgcagcagaagcagaggcagaagcacttcaaccggcagatcccggcggcagcctcactcattcagaccgcatggaggtgctatgctgccgagaaccccgactcctccacctggaagatctacatccggaaggccccccggagccacactctgctgtcacccagccccaaacccaagaagtctgtggtggtaaagaaaaaaaagttcaagctggacaaag

SEQ ID NO: 734979 - DNA, 250 bp, Homo sapiens
ctgctttcctttcctactgccctggaatgggtgttgctcttaggatgtatcccctcaaacctacctggtggttctgtgccttcccctactctcttctcatcttcgtatatgacgaagtcagaaaactcatcatcaggcgacgccctggcggctgggtggagaaggaaacctactattagccccccgtcctgcacgccgtggagcatcaggccacacactctgcatccgacacccaccccctctttgtgta

SEQ ID NO: 734980 - DNA, 250 bp, Homo sapiens
ggacaacggctccaggtccggggacctcccctatgatgggcggctactggaggaggctgtgaggaagaaggggtcggaggagaggaggagaccccacaaggaggaggaggaagaggcctactacccgcccgcgccgcccccgtactcggagaccgactcgcaggcgtcccgagagcgcaggctcaagaagaacttggccctgagtcgggaaagtttagtcgtctgatctgacgttttctacgtagctttt

SEQ ID NO: 734981 - DNA, 250 bp, Homo sapiens
gacatctgccccaagaaggacgtactcgaaaccttcaccgtgaagtcctgtcctgatgccatcaaagaggtcttcgacaataaattccacatcatcggcgcagtgggcatcggcattgccgtggtcatgatatttggcatgatcttcagtatgatcttgtgctgtgctatccgcaggaaccgcgagatggtctagagtcagcttacatccctgagcaggaaagtttacccatgaagattggtgggatttt

SEQ ID NO: 734982 - DNA, 250 bp, Homo sapiens
ccatgtaacataccaattggaaccccagtgagcggctatgctctctaccagcgacacattaaagcaatgcatgagtcagcactcctggaggagcagcggcagagacaagaacagatagatttggaatgtagaagttctacaagtccatgtggcacatccaagagtccaaacagagagtgggaagtccttcagcctgctccacatcaagtgataactaatctccctgaaggcgttcggcttccgacaactc

SEQ ID NO: 734983 - DNA, 250 bp, Homo sapiens
ctgagcagctccaaagcactggcttggggtccgagaccttcaaagtaaagcaggcggaatggggggacaggacaatttctccccctccaggggctccaggactctccctggggggcccacctcttgccccctaacctctttcccccttttctgcccccgtggggaggagccccttgtacctgctccgtgcccaacacatgccctctctgtacatcttttgtaaatgatgagaaataaaggaagtggacgc

SEQ ID NO: 734984 - DNA, 250 bp, Homo sapiens
aggggctccagcaccttctttctggactggcgttcacctccctgctcagtgcttgggctccacgggcaggggtcagagcactccctaatttatgtgctatataaatatgtcagatgtacatagagatctattttttctaaaacattcccctccccactcctctcccacagagtgctggactgttccaggccctccagtgggctgatgctgggacccttaggatggggctcccagctcctttctcctgtga

SEQ ID NO: 734985 - DNA, 250 bp, Homo sapiens
tgcccagcagaggagcacgcagctgaacaagaagagagccatccccaatcaggtgatccgcaggggctggctgaccatcaacaacatcagcctgatgaaaggcggctccaaggagtactggtttgtgctgactgccgagtcactgtcctggtacaaggatgaggaggagaaagagaagaagtacatgctgcctctggacaacctcaagatccgtgatgtggagaagggcttcatgtccaacaagcacgtc

SEQ ID NO: 734986 - DNA, 250 bp, Homo sapiens
gggttgtgtggcctccactgggcacttgccgacctgagtctggggccaggggagcccaggctgccctgcactcctgcctcccagcccacagccaggtgctttcatcacagctaaacctggttccctccaaacctcccagccactcgggcttgtaactgtctgagccccggatccggtggggtgaaagcagccagctcatcccagtgactcacaggacacagccatccagcggcatctttccttgtcgaat

SEQ ID NO: 734987 - DNA, 250 bp, Homo sapiens
tttgacggggaccagaccaatgattggcatgactcccaggagaagccagcgatggagaaatggagagcgcaggacttctccccatgttatggctgatcagtcatccaccaggaacgaagatttcctgaagaagacctggtccctctggaggttgcagtggctgaaggatgcatcatgtgctcctaccctgctctaccgcttttctgggtcacagaggccaaatgtgagagcattgaataaatatcttaag

SEQ ID NO: 734988 - DNA, 250 bp, Homo sapiens
ctgaggtgggagaatcacttgagcccaggagttcgaggctgcagtgagccaggatcatgccactgcactccagcctggtccacagagagacactgtcaccccctttcccccacaagactggcagaggctgggcagcctggggctgatgaagcagagatgttcgctggatcccaggccctggcacccctcaggaaatacaagaaaaagaatattcacatctgtttaatgtgcataaagccaaggaaaggac

SEQ ID NO: 734989 - DNA, 250 bp, Homo sapiens
tgcagcggggacatgctcactatcaacgggaaggcgatcatctccaataaagacatcctagccaccaacggggtgatccactacattgatgagctactcatcccagactcagccaagacactatttgaattggctgcagagtctgatgtgtccacagccattgaccttttcagacaagccggcctcggcaatcatctctctggaagtgagcggttgaccctcctggctcccctgaattctgtattcaaag

SEQ ID NO: 734990 - DNA, 250 bp, Homo sapiens
cttttcttcccctgatttctcctctggtcatctcctctcccttctgcgtgtaagccatgggaaagggatgagggaggacagcttctggttaaacacaggtccctcttccacatcaaatgaacattggcttcctgggacagaaggccttcaaaggagggattgcaaagcaaggcaaagcgttctgtcttcattttccccatccccatgagacaagactgatggaaagggtggtggggcaacactgcttaat

SEQ ID NO: 734991 - DNA, 250 bp, Homo sapiens
tgccaggtttgttctgcacacaccaccagcccttcactcttttgtgttctatttattgagtaaatattatgtacaaggcactgtattgcatgctagagagcatacgaaatgaagatggagtgttcccactccagggtgcacactgggcagtggtaaaaggaaaatggggccgggcgcagtggttcacgcgtgtaatcctagcactttgggaggccgaggcaggtggatcatctgaggtcaggagtttgag

SEQ ID NO: 734992 - DNA, 250 bp, Homo sapiens
cagctatcttttttatttttaaaataaatacattcacatgcttttaagaaactataaaaatatataaagtaaaaagatctttctctcacactgtctccacctctcctggtctcaccgttgtgcttaggggaaaccattgtgattagtttctcctgtgtccttccagagtgtctttatgcaaatgaaaattattgtgataatatattcctattttcccccttactacacaaaagatagactaccataatcc

SEQ ID NO: 734993 - DNA, 250 bp, Homo sapiens
attcccccaaggagacagacagagggcggtggaccgaaccacagacagattcgtagggatctggctccagaaaggagtcggtctctggcctgccctgcccgcctgctctttttcccaaacaaacggatcagacgaataaacgctcataaatacctctgggcttagataagagcgatgaggcgctattttctttcatgcccgactccaggcgcccaggcccgcctgtagtggctccatctccagacaagca

SEQ ID NO: 734994 - DNA, 250 bp, Homo sapiens
cacacccacaccaggcctcaggattttgtgttgatcaagttccaaggaaaaggaacatctcagccgggcgtggtggttcacgcctggaatcccagcacttgaggccaggagttccagagcagcctgggcaacgcagtgagagaccccatctctacaaaaaaaaaaaagaaagaaagaaaatgagagatccaggtttaaaaattcataaacaccacaaggaaacaatacactatgagacccagcagaagca

SEQ ID NO: 734995 - DNA, 250 bp, Homo sapiens
ccccctggctctaggacactctaacaagctctgtccacgggtctccccattcccaccaggccctgcacacacccactccgtaacctctcccctgtacctgtgccaagcctagcacttgtgatgcctccatgccccgagggccctctctcagttctgggaggatgactccagtccctgcacgccctggcacacccttcacggttgctacccaggcggccaagctccagaccgtgccagacccaggtgcccc

SEQ ID NO: 734996 - DNA, 250 bp, Homo sapiens
gagcaactggactctccggattgaccaagttcatcctgggctccattgggtctgccattgcggctgtcattgcgaggttctactagctccctgcccctcgccctgcagagaagagaaccatgccaggggagaaggcacccagccatcctgacccagcgaggagccaactatcccaaatatacctggggtgaaatataccaaattctgcatctccagaggaaaataagaaataaagatgaattgttgcaac

SEQ ID NO: 734997 - DNA, 250 bp, Homo sapiens
tggagagggagatcatgctggctgcaaagaagggactggacccatacaatgtactggccccaaagggagcttcaggcaccagggaagaccctaatttagtcccctccatctccaacaagagaatagtaggctgcatctgtgaagaggacaataccagcgtcgtctggttttggctgcacaaaggcgaggcccagcgatgcccccgctgtggagcccattacaagctggtgccccagcagctggcacactg

SEQ ID NO: 734998 - DNA, 250 bp, Homo sapiens
gccatcaactttcagagctatcatgagccaacctcaccccacagggcctcagtcgccaccatgtgggcctctccagtgcaaaccaccgagcattccaccatgaccggtcacagctacaaatccagagaccatcaatcctgctagagtgcagggtggcaagcacccaagggtggctgaccaagactgcagagtctcctccatcttcaggtccattcagcctcctggcatttaactaccagcatccagtggt

SEQ ID NO: 734999 - DNA, 250 bp, Homo sapiens
gctcccctgccctaagtccccaaccctcaacttgaaaccccattcccttaagccaggactcagaggatccctttgccctctggtttacctgggactccatccccaaacccactaatcacatcccactgactgaccctctgtgatcaaagaccctctctctggctgaggttggctcttagctcattgctggggatgggaaggagaagcagtggcttttgtgggcattgctctaacctacttctcaagcttc

SEQ ID NO: 735000 - DNA, 250 bp, Homo sapiens
gctgggatgaagtctggtggtgggtcgtaagtttaggaggtgactgcatcctccagcatctcaactccgtctgtctactgtgtgagacttcggcggaccattaggaatgagatccgtgagatccttccatcttcttgaagtcgcctttagggtggctgcgaggtagagggttgggggttggtgggctgtcacggagcgactgtcgagatcgcctagtatgttctgtgaacacaaataaaattgatttact

SEQ ID NO: 735001 - DNA, 250 bp, Homo sapiens
gggacagaagcacatgaccgccgtggtgaagctgttcgggccctttaccaggaattactatgttcgggccgtcctgcatctcctgctctcggtgcccgccggcttcctgctggccaccatccttgggaccgcctgcctggccattgcgagcggcatctacctactggcggctgtgcgtggcgagcagtggacgcccatcgagcccaagccccgggagcggccgcagatcggaggcaccatcaagcagccg

SEQ ID NO: 735002 - DNA, 250 bp, Homo sapiens
atctttcttctcagtgccttggccctgttgagtctatctggtaacactggagctgactccctgggaagagaggccaaatgttacaatgaacttaatggatgcaccaagatatatgaccctgtctgtgggactgatggaaatacttatcccaatgaatgcgtgttatgttttgaaaatcggaaacgccagacttctatcctcattcaaaaatctgggccttgctgagaaccaaggttttgaaatcccatca

SEQ ID NO: 735003 - DNA, 250 bp, Homo sapiens
ttcctggtgtgggtcaacgaggaggaccacctgcgggtcatctccatgcagaaggggggcaacatgaaggaggtgttcacccgcttctgcaccggcctcacccagattgaaactctcttcaagtctaaggactatgagttcatgtggaaccctcacctgggctacatcctcacctgcccatccaacctgggcaccgggctgcgggcaggtgtgcatatcaagctgcccaacctgggcaagcatgagaagt

SEQ ID NO: 735004 - DNA, 250 bp, Homo sapiens
aggctttggcacgcaagcctgaggaccctcccctaccaaggaccaggaaaagcagcagctgcctgctctccagcctctggcaggaactcagggccctggagctgctggggccaagccaaggcctcccctacctcaaaccccagctgggcccgcttagcccaccaggcatgaggccaagggctccactgaccaggaggccgaggtctctaactcttatcttccacagggtccaagagttcatcaggacccc

SEQ ID NO: 735005 - DNA, 250 bp, Homo sapiens
aggatgccttctccgggacagattggatgttggagaaaatggatttgaaggagttcgacttggatgccctgttgggtatagatgacctggaaaccatgccagatgaccttctgaccacgttggatgacacttgtgatctctttgcccccctagtccaggagactaataagcagcccccccagacggtgaacccaattggccatctcccagaaagtttaacaaaacccgaccaggttgcccccttcacctt

SEQ ID NO: 735006 - DNA, 250 bp, Homo sapiens
aatgaggaaggatcagagaagaggctactgggggagaattcagtgcccccttcgccctctagggagcagacctccactgccattgtcctgtgagccgccaaagaccccacggggtgcccgcatgtccctgtctagggcagcccagggcccccactcctggctcctcacacttgcctcccctatggccgctctccagaccctcctcctttcttctccccacatccgcacctgctgttcccactctggggtt

SEQ ID NO: 735007 - DNA, 250 bp, Homo sapiens
aacaatccagaaattgatcggtttttttaggccaatcccatcccttctggataaccagatgttaaatcatgagatcagagatgctgttcatcagtcccaacaagatggcctagaaatcgcattctcacctcgccttgctgctgctttaattccaagttctatttcttcccttatagttttctatgggaatgaggcggatacaggaaacaccctatctcctctgtatttttgtagtggaatttctatttaa

SEQ ID NO: 735008 - DNA, 250 bp, Homo sapiens
accgagacatgggtgcccggcaccgcgcccgagcccactccattcagatcatgaaggtggaggagatcgcggccagcaagtgccgccggccggctgtcaagcagttccacgactccaagatcaagttcccgctgccccaccgggtcctgcgccgtcagcacaagccacgcttcaccaccaagaggcccaacaccttcttctaggtgcagggccctcgtccgggtgtgccccaaataaactcaggaacgcc

SEQ ID NO: 735009 - DNA, 250 bp, Homo sapiens
taggctgaggctcaggcagggcccacaggcagccgattctcttgtgctgatttaaatgctggacacggaggcaggctgtttaaacgctgcttaaagtcgcaactgggcccctttcaagaaattttgctctaccaggaaaacagttacacattttaagagaacagagctacgttctttgtgagagctttttccttggcttgacttgctctttgtcacagactgcataagttgtcagccttgactatctttt

SEQ ID NO: 735010 - DNA, 250 bp, Homo sapiens
actcctatgcatcccttagaaccctgctcagacaccattacttttgtgaacgcttctgccacatcttgtcttccccaaaattgatcactccgccttctcctgggctcccgtagcacactataacatctgctggagtgttgctgttgcaccatactttcttgtacatttgtgtctcccttcccaactagactgtaagtgccttgcggtcagggactgaatcttgcccgtttatgtatgctccatgtctagc

SEQ ID NO: 735011 - DNA, 250 bp, Homo sapiens
ggcagcaacagaggggcctcccaggccggcatgacaggctacggacgacctcggcagatcatcagttagagcggagagggctagccctgagcccggccctcccccagctccttggctgcagccatcccgcttagcctgcctcacccacacccgtgtggtaccttcagccctggccaagctttgaggctctgtcactgagcaatggtaactgcacctgggcagctcctccctgtgcccccagcctcagccc

SEQ ID NO: 735012 - DNA, 250 bp, Homo sapiens
cagctgtcactgcaggagctgcagaccatcagccccctgttctcgggcgacgtgatctgcgtgtgggactacgggcacagtgtggagcagtatggtgccctgggcggcactgcgcgctccagcgtcgactggcagatccgccaggtgcgggcgctactgcaggcacagcaggcctaggtcctcccacacctgccccctaataaagtgggcgcgagaggaaaaaaaacccaaaaaaaaaaaaacaaaaacg

SEQ ID NO: 735013 - DNA, 250 bp, Homo sapiens
tgtacatatgtttcacagtacaggatctgtacataaaagtttctttcctaaaccattcaccaagagccaatatctaggcattttcttggtagcacaaattttcttattgcttagaaaattgtcctccttgttatttctgtttgtaagacttaagtgagttaggtctttaaggaaagcaacgctcctctgaaatgcttgtcttttttctgttgccgaaatagctggtcctttttcgggagttagatgtata

SEQ ID NO: 735014 - DNA, 250 bp, Homo sapiens
gtcacctactacttggactggatccaccactatgtccccaaaaagccgtgagtcaggcctgggttggccacctgggtcactggaggaccaacccctgctgtccaaaacaccactgcttcctacccaggtggcgactgccccccacaccttccctgccccgtcctgagtgccccttcctgtcctaagccccctgctctcttctgagccccttcccctgtcctgaggacccttccccatcctgagccccctt

SEQ ID NO: 735015 - DNA, 250 bp, Homo sapiens
gactttgtgttttatgccccacgtctgagaatcaacaagcggatcctgcagctctgcatgggcaaccatgagttgtatatgcgccgcaggaagcctgacaccatcgaggtgcagcagatgaaggcccaggcccgggaggagaagcatcagaagcagctggagcggcaacagctggaaacagagaagaaaaggagagaaaccgtggagagagagaaagagcagatgatgcgcgagaaggaggagttgatgc

SEQ ID NO: 735016 - DNA, 250 bp, Homo sapiens
aatgcccgaatgccagagaaggtcacatggatgaggagaatgaggattttgcgccggctgctcagaagataccgtgaatctaagaagatcgatcgccacatgtatcacagcctgtacctgaaggtgaaggggaatgtgttcaaaaacaagcggattctcatggaacacatccacaagctgaaggcagacaaggcccgcaagaagctcctggctgaccaggctgaggcccgcaggtctaagaccaaggaag

SEQ ID NO: 735017 - DNA, 250 bp, Homo sapiens
tgggaaaaactttggaaccagactcttgcctgtttcccaggcccactgtgcctcagagaccagggctccagcccctcttggagaagtctcagctaagctcacgtcctgagaaagctcaaaggtttggaaggagcagaaaacccttgggccagaagtaccagactagatggacctgcctgcataggagtttggaggaagttggagttttgtttcctctgttcaaagctgcctgtccctaccccatggtgct

SEQ ID NO: 735018 - DNA, 250 bp, Homo sapiens
cactggcctgaatctacactggaagccaacttgctggcacccccgctccccaacccttcttgcctgggtaggagaggctaaagatcaccctaaatttactcatctctctagtgctgcctcacattgggcctcagcagctccccagcaccaattcacaggtcacccctctcttcttgcactgtccccaaacttgctgtcaattccgagatctaatctccccctacgctctgccaggaattctttcagacct

SEQ ID NO: 735019 - DNA, 250 bp, Homo sapiens
tatccagacctgatcgctgagctgctcaggaggaactggacggaggcggaggtcaagggcgcactggctgacaacctgctgagggtcttcgaggctgtggaacaggccagcaacctcacacaggctcccgaggaggagcccatcccgctggaccagctgggtggctcctgcaggacccattacggctactcctctggggcttccagcctccatcgccactgggggctcctgctggcctccctcgctcccc

SEQ ID NO: 735020 - DNA, 250 bp, Homo sapiens
gactatccctgtcatactgttgccactgatattctgaaagcaccaccagaggatgacaatcgagaaattgccacatggaagagcttggatttgattgaatctctgctgaggcttgcagaggttgggcagtatgagcaagtcaaacagctcttcagcttccctatcaaacactgtccagacatgctggtattggccttactacaaattaacacctcttggcataccttgcgccatgaacttatctccactc

SEQ ID NO: 735021 - DNA, 250 bp, Homo sapiens
ctctttcatatatgggaaaatttaaaaagttactctcatagaagtagagagtaaaatagaggctactagaggctgggaagggtagaggggcaagggtcatagggaaaagagagttaacggatacaaattacagctagaaagatgggaagagtgaattccagtgttctaaagcagggtaggtgactacagttaatgattatttattgtctacttattgtatattattgtatattttcaaatattgtatatt

SEQ ID NO: 735022 - DNA, 250 bp, Homo sapiens
agaagtgacagctaggggttgagaggggccagaaaaacatgaatgcaggcagatttcgtgaaatctgccaccactttataaccagatggttcctttcacaaccctgggtcaaaaagagaataatttggcctataatgttaaaagaaagcaggaaggtgggtaaataaaaatcttggtgcctggaaaaaaaaaaaacaaaacaaccaaaagggggcgggcgaaaaaatcccgggggcccacatccgacccc

SEQ ID NO: 735023 - DNA, 250 bp, Homo sapiens
tttatcctgccgccgctttcagactccctggccaccctgtccactcccatggcctccacattgaagcttctaagcccagccctgcgacctacggccgaacctctccctggacgtcccagggtgctccctggtcagcaagtccaaaacagaactctcgcttcccaccttctctcctaagtgatcctctttatcccccttccgtgtctcactttcccaagtccttgtattactgggtctgggtgtgcaagga

SEQ ID NO: 735024 - DNA, 250 bp, Homo sapiens
catggggtttttattatttttacctaaagacgtctctttttggtaataacaaacgtgttttttaaaaaagcctggtttttctcaatacgcctttaaaggtttttaaattgtttcatatctggtcaagttgagatttttaagaacttcatttttaatttgtaataaaagtttacaacttgattttttcaaaaaagtcaacaaactgcaagcacctgttaataaaggtcttaaataattgtcaacacaaaca

SEQ ID NO: 735025 - DNA, 250 bp, Homo sapiens
gtcctttagcaatcaatgcatttaatctttcctggatggctgccatgtggactgcatgcaaaatggaccattatgtggctactactgaatttctttggtctgtaccctgtagccctcaaagtctggacatttctttcgcaatacatccagaggatgcaaaagctctatgggacagtgtccacaaaacacctggggaggttacccaggaagaagttgacctattcatggattgcctttattcacatttcca

SEQ ID NO: 735026 - DNA, 250 bp, Homo sapiens
ttgccatcactgccattaagggtgtgggccgaagatatgctcatgtggtgttgaggaaagcagacattgacctcaccaagagggcgggagaactcactgaggatgaggtggaacgtgtgatcaccattatgcagaatccacgccagtacaagatcccagactggttcttgaacagacagaaggatgtaaaggatggaaaatacagccaggtcctagccaatggtctggacaacaagctccgtgaagacct

SEQ ID NO: 735027 - DNA, 250 bp, Homo sapiens
tgaatgctctcaaaaacctgcaagttaaatgtgcacagatagaagccaaattctatgaggaagttcatgatcttgaaaggaagtatgctgttctctatcagcctctatttgataagcgatttgaaattattaatgcaatttatgaacctacggaagaagaatgtgaatggaaaccagatgaagaagatgagatttcggaggaattgaaagaaaaggccaagattgaagatgagaaaaaggatgaagaaaa

SEQ ID NO: 735028 - DNA, 250 bp, Homo sapiens
cgcaacagccatgtcaccgctgttcgctctcgccgaggaacaagtcggtcaggaagcccgcgcgcaacagccatgccgcaacgtaaaatccttggaaaaggtgtgtgctgacttgataagaggcgcaaaagaaaagaatctcaaagtgaaaggaccagttcgaatgcctaccaagactttgagaatcactacaagaaaaactccttgtggtgaaggttctaagacgtgggatcgtttccagatgagaatt

SEQ ID NO: 735029 - DNA, 250 bp, Homo sapiens
ctcactaactccatgatgatgcacggccgcaacaacggcaagaagctcatgactgtgcgcatcgtcaagcatgccttcgagatcatacacctgctcacaggcgagaaccctctgcaggtcctggtgaacgccatcatcaacagtggtccccgggaggactccacacgcattgggcgcgccgggactgtgagacgacaggctgtggatgtgtcccccctgcgccgtgtgaaccaggccatctggctgctgt

SEQ ID NO: 735030 - DNA, 250 bp, Homo sapiens
ggggaggcgggatgggacacccaacactttttccatttcttcagagggaaactcagatgtccaaactaattttaacaaacgcattaagaggtttatttgggtacatggcccgcagtggcttttgccccagaaaggggaaaggaacacgcgggtagatgatttctagcaggcaggaagtcctgtgcggtgtcaccatgagcacctccagctgtactagtgccattggaataataaatttgataaggtggtg

SEQ ID NO: 735031 - DNA, 250 bp, Homo sapiens
ctcctttcatcctgtgctctgccctccccgggagcctcagagtttgcttctggctggcggcaagggaaagggacgatggagaaggcacggctgcttcttacctgccttgctcttaactgacacacatcactcctgctcacgtcctcttggccactggtagtcatgtggccccacctggatgcagaggaggccaggatgtgcagtctccacatagtggcttcccagcaacaacttttgacttagatggggg

SEQ ID NO: 735032 - DNA, 250 bp, Homo sapiens
gacatgatccacatcgcggacaccaaggtcgccaggcgttatggggatttcttcatccgtcagatccacaaatttgaggagcttaatcgaaccctgaagaagatgggacagagaccttgatgatattcacacacattcaggaacctgttttgatgtattataggcaggaagtgtttttgctaccgtgaaacctttacctagatcagccatcagcctgtcaactcagttaacaagttaaggaccgaagtgt

SEQ ID NO: 735033 - DNA, 250 bp, Homo sapiens
caaaaattccaccttctcggagatcttcaaaaaggagcacccggaccgcttcatcgagtgctacattgctgagcagaacatggtgagcatcgcggtgggctgtgccacccgcaacaggacggtgcccttctgcagcacttttgcagccttcttcacgcgggcctttgaccagattcgcatggccgccatctccgagagcaacatcaacctctgcggctcccactgcggcgtttccatcggggaagacggg

SEQ ID NO: 735034 - DNA, 250 bp, Homo sapiens
tgttttccaaaaacttgtagaaggttgtgaaaaaactactaggatcacgcggcatgtattgagcatataggttgctgtagatgaatgttcttagctgtcatgtttaaaaatacttctgcttcgttacctcaagtgtggcatgcagcattttggaaggaaaattgaagacgtgttcaagaaaacatgaacagaagcaaatgatgaaaatgagcattttacttgatgttgataacatcacaataaattatgg

SEQ ID NO: 735035 - DNA, 250 bp, Homo sapiens
acagtgcacgcaggtgcgcgtggaattcatggacgacacgagccgatccatcatccgcaatgtaaaaggccccgtgcgcgagggcgacgtgctcacccttttggagtcagagcgagaagcccggaggttgcgctgagcttggctgctcgctgggtcttggatgtcgggttcgaccacttggccgatgggaatggtctgtcacaatctgctccttttttttgtccgccacacgtaactgagatgctccttt

SEQ ID NO: 735036 - DNA, 250 bp, Homo sapiens
tgaactggcaggaaatgcatcaaaagacttaaaggtaaagcgtattacccctcgtcacttgcaacttgctattcgtggagatgaagaattggattctctcatcaaggctacaattgctggtggtggtgtcattccacacatccacaaatctctgattgggaagaaaggacaacagaagactgtctaaaggatgcctggattccttgttatctcaggactctaaatactctaacagctgtccagtgttggt

SEQ ID NO: 735037 - DNA, 250 bp, Homo sapiens
gtccccagacagtcccggtgtgcacacttccctgcttctgttcatgatgttctctgaacctgggatcacctttccccttcctcttacctgcccgatcctacttgtcctcccagattcagttttctgaagctcagagggacaccttgtattgctggatgataaaaacaggagcaaagtgatgaagtgctgacaaggcaacaatagaacatgagagattcactgctgtgtaggaagagatcttcggtgacca

SEQ ID NO: 735038 - DNA, 250 bp, Homo sapiens
acaacagtgagctgggacggagacaagctccagtgtgtgcagaagggtgagaaggaggggcgtggctggacccagtggatcgagggtgatgagctgcacctggagatgagagtggaaggtgtggtctgcaagcaagtattcaagaaggtgcagtgaggcccaggcagacaaccttgtcccaaggaatcagcaggatgtgtgggccaggatccccctctttgcacagcatgaggcaaaaatgtccagccac

SEQ ID NO: 735039 - DNA, 250 bp, Homo sapiens
gtgagtgtctctagggtgatacgtgggtgagaaaggtcctggtccgcgccagagcccagcgcgcctcgtcgccattcctggtccgcgccagagcccagcgcgcctcgtcgccatctgtcaagatcaagaaaaataaggacaacgtgaagtttaaagttcgatgcagcagatacctttacaccctggtcatcactgacaaagagaaggcagagaaactgaagcagtccctgccccccgtttggcagtgaag

SEQ ID NO: 735040 - DNA, 250 bp, Homo sapiens
aagtggtccaaaggcaaagttcgggacaagctcaataacttagtcttgtttgacaaagctacctatgataaactctgtaaggaagttcccaactataaacttataaccccagctgtggtctctgagagactgaagattcgaggctccctggccagggcagcccttcaggagctccttagtaaaggacttatcaaactggtttcaaagcacagagctcaagtaatttacaccagaaataccaagggtggag

SEQ ID NO: 735041 - DNA, 250 bp, Homo sapiens
gttcatggatcaacatccggagatggatttttccaaggctaaattcaactagcccctgttttttcctccctgaactcttggggctgagctgcaaccacccaactttctttcccactcttctctgggacttgtgggcctcagggcttggggcaggcatgggactggcccaggcacacaggtcccggggcatcaggagaaaggctgggtcttgggaccttgtcctccccagttggcctactgttacacatta

SEQ ID NO: 735042 - DNA, 250 bp, Homo sapiens
ccaattattttttgtctcttctactagaatgttagaattacaagaaagagatcctgtctgttttattcactattgtatcttcagtactggaacagtacgtggcacttagatattcaattattttttactgaatgtttacaccactcctgagaagaataagcgtaagcgaaagaaggtgaagctggctgtcctgaaatactgtaaggtggatgagaatggcaaaataagtcgccttcatctagagtgctct

SEQ ID NO: 735043 - DNA, 250 bp, Homo sapiens
gcctcctggcagaggcaggcgtgcggctgctgtcctaccagacttcactggtgtcagatggggagacctggcacgtcatgggcatctcctccttgctgcccagcctggaagcgtggaagcagcatgtgactgaagccttccagttccacttctaaccttggagctcactggtccctgcctctggggcttttctgaagaaacccacccactgtgatcaatagggagagaaaatccacattcttgggctgaa

SEQ ID NO: 735044 - DNA, 250 bp, Homo sapiens
ttaaaatttaaataaggaatacattttcaaaatgcagtaatcaaaatgtgatctagtgtaatgaaataaaatgtgatctagtgtaatggaagacctttgagaacctgggtgtattaactttgtgtatatagtgtaaatatccccactgtactgttagaggccaacaattctagtatggcttgttggcaaagagtgctacaccgtttcaatgaaacaatgtatgtttgttttaactgaactaaaataaata

SEQ ID NO: 735045 - DNA, 250 bp, Homo sapiens
gaagatgaaaaagaagatcataaaaatgtgcgccaacaacggcaggcggcatctaaagcagcttctaaacagagagagatgctcatggaagatgtgggcagtgaggaagaacaagaagaggaggatgaggcaccattccaggagaaagattccggcagcgatgaagatttcctaatggaagatgatgacgatagtgactatggcagttcgaaaaagaaaaacaaaaagatggttaagaagtccaaacctg

SEQ ID NO: 735046 - DNA, 250 bp, Homo sapiens
tggcctggccatctccctccccagaaacagtgtgcatgggttattttggagtgtaggtgacttgtttactcattgaagcagatttctgcttccttttatttttataggaatagaggaagaaatgtcagatgcgtgcccagctcttcaccccccaatctcttggtggggaggggtgtacctaaatatttatcatatccttgcccttgagtgcttgttagagagaaagagaactactaaggaaaataatatt

SEQ ID NO: 735047 - DNA, 250 bp, Homo sapiens
ttgtgaagaccctcactggcaaaaccatcacccttgaggtcgagcccagtgacaccattgagaatgtcaaagccaaaattcaagacaaggagggtatcccacctgaccagcagcgtctgatatttgccggcaaacagctggaggatggccgcactctctcagactacaacatccagaaagagtccaccctgcacctggtgttgcgcctgcgaggtggcattattgagccttctctccgccagcttgccca

SEQ ID NO: 735048 - DNA, 250 bp, Homo sapiens
cattaggaagtgtgtaagggtccagctgatcaagaatggcaagaaaatcacagcctttgtacccaatgacggttgcttgaactttattgaggaaaatgatgaagttctggttgctggatttggtcgcaaaggtcatgctgttggtgatattcctggagtccgctttaaggttgtcaaagtagccaatgtttctcttttggccctatacaaaggcaagaaggaaagaccaagatcataaatattaatggtg

SEQ ID NO: 735049 - DNA, 250 bp, Homo sapiens
tcgcacaccggggccctgcatgtcagatggcgtggtctgcagggggagctctgtgccttagtggctcttggcaggacactgagggcctgcctgtggtgtgcccggctctgccactcccgggaggggaagggctgctcagctcaaggtgtcctgttcggtagagcaagtgtcctctgacagccgtgtccccggacagttcagacacccttggggatggcactccacacacgacagagatgcaggggccagg

SEQ ID NO: 735050 - DNA, 250 bp, Homo sapiens
ccctcatccccattatgggagctacagcttagaatcaatttcagctctaatcccttagccttacaatcaccagtatctgcctttgacgtcctctgagacctgctctccttcgtgcagggagtgccatgccctcgtgggtgacagcgtgctgacagagtggactgtgaatattcttcaagtacttgtggtcctgggtcatcaggggttgcattctacccagttacagagggtttcccatcgaggaggccag

SEQ ID NO: 735051 - DNA, 250 bp, Homo sapiens
aagatgattaagaccccagatgacctgcagaaacagaactgttcagtattggttggactgctcatggattttgtagctgtttaaaaaaaaaaaaaaggtagctgtgatacaaaccccaggacacccacccacccaaagagccaaagaatagttcctgtgacattccgccttccttccatgtagtccctcttggtaatctaccaccaagcttgtggacttcaccccaacaaaattgtaagcgttgttaggt

SEQ ID NO: 735052 - DNA, 250 bp, Homo sapiens
aatgaagtttaatccctttgtgacttccgaccgaagcaagaatcgcaaaaggcatttcaatgcaccttcccacattcgaaggaagattatgtcttcccctctttccaaagagctgagacagaagtacaacgtgcgatccatgcccatccgaaaggatgatgaagttcaggttgtacgtggacactataaaggtcagcaaattggcaaagtagtccaggtttacaggaagaaatatgttatctacattgaa

SEQ ID NO: 735053 - DNA, 250 bp, Homo sapiens
taacccgaccgccgctggtcttcgctggacaccatgaatcacactgtccaaaccttcttctctcctgtcaacagtggccagccccccaactatgagatgctcaaggaggagcacgaggtggctgtgctgggggcgccccacaaccctgctcccccgacgtccaccgtgatccacatccgcagcgagacctccgtgcccgaccatgtcgtctggtccctgttcaacaccctcttcatgaacccctgctgcc

SEQ ID NO: 735054 - DNA, 250 bp, Homo sapiens
ccaatgactttgtcatgctgaaaggctgtgtggtgggaaccaagaagcgggtgctcaccctccgcaagtccttgctggtgcagacgaagcggcgggctctggagaagattgaccttaagttcattgacaccacctccaagtttggccatggccgcttccagaccatggaggagaagaaagcattcatgtccttgctggtgcagacgaagcggcgggctctggagaagattgaccttaagttcattgacac

SEQ ID NO: 735055 - DNA, 250 bp, Homo sapiens
acaagtactaccgagtcaatcttcgcacacggcgagtggacactgtggaccctccctacccacgctccatcgctcagtactggctgggctgcccagctcctggccatctgtaggagtcagagcccacatggccgggccctacaagtactaccgagtcaatcttcgcacacggcgagtggacactgtggaccctccctacccacgctccatcgctcagtactggctgggctgcccagctcctggccatctg

SEQ ID NO: 735056 - DNA, 250 bp, Homo sapiens
cgaattgatgacatcgtttcaggccacaaaaagaaaggcgatgaccagagccggcaaggcggggctcctgatgctggccaggagtgagtgctaggcaaggctacttcaatgcacagaaccagcagagtctccccttttcctgagccagagtgccaggaacactgtggacgtctttgttcagaagggatcaggttggggggcagcccccagtccctttctgtcccagctcagttttccaaaagacactgac

SEQ ID NO: 735057 - DNA, 250 bp, Homo sapiens
gtggctcctgccacctgctaatagcagttcaaactaaattttttgtatcaagtccctgaatggaagtatgacgttgggtccctctgaagtttaattctgagttctcattaaaagaaatttgctttcattgttttatttcttaattgctatgcttcagaatcaatttgtgttttatgccctttcccccagtattgtagagcaagtcttgtgttaaaagcccagtgtgacagtgtcatgatgtagtagtgtc

SEQ ID NO: 735058 - DNA, 250 bp, Homo sapiens
tgcctgggcttcatagcattcgcctactccgtgaagtctagggacaggaagatggttggcgacgtgaccggggcccaggcctatgcctccaccgccaagtgcctgaacatctgggccctgattctgggcatcctcatgaccattctagggacaggaagatggttggcgacgtgaccggggcccaggcctatgcctccaccgccaagtgcctgaacatctgggccctgattctgggcatcctcatgaccat

SEQ ID NO: 735059 - DNA, 250 bp, Homo sapiens
cgagggggccggggtggtggggacagaggtggctttggccctggcaagatggattccaggggtgagcacagacaggatcgcagggagaggccgtattaattagcctggctccccaggttctggaacagctttttgtcctgtacccagtgttaccctcgttattttgtaaccttccaattcctgatcacccaagggtttttttgtgtcggactatgtaattgtaactatacctctggttcccattaaaagt

SEQ ID NO: 735060 - DNA, 250 bp, Homo sapiens
ggagagcacggggtagccggagaagggcctctggagcaggtctggaggggccatggggcagtcctgggtgtggggacacagtcgggttgacccagggctgtctccctccagagcctccctccggacaatgagtcccccctcttgtctcccaccctgagattgggcatggggtgcggtgtggggggcatgtgctgcctgttgttatgggttttttttgcggggggggttgcttttttctggggtctttgag

SEQ ID NO: 735061 - DNA, 250 bp, Homo sapiens
gatggccaggccatgttatgggatctcaacgaaggcaaacacctttacacgctagatggtggggacatcatcaacgccctgtgcttcagccctaaccgctactggctgtgtgctgccacaggccccagcatcaagatctgggatttagagggaaagatcattgtagatgaactgaagcaagaagttatcagtaccagcagcaaggcagaaccaccccagtgcacctccctggcctggtctgctgatggcc

SEQ ID NO: 735062 - DNA, 250 bp, Homo sapiens
gtgaattttgaagtcttcatcagtatatccatattaaaacgagatgacagaagccaaagtaattatgggctgacaggacaactggatcagtttcattaaaaagggcaaacttgaagataaatcttttgactccagctctttagaggatctaaagtgaccttgatggacagtggaagaaatcacaacatggaattcctcgaataacaatttattgactttaaataattttgtctaatgctacatatacaca

SEQ ID NO: 735063 - DNA, 250 bp, Homo sapiens
ggaaaaaagagcatgatcctgtaggtcaaatggtgaataaccccaaaattcacctggcacagtcacttcacaagttgtctaccgcctgtccaggaagggttccatcaatggtgagcaccagcctgaatgcagaagcgctccagtatctccaagggtaccttcaggcagccagtgtgacactgctttaaactgcatttttctaatgggctaaacccagatggtttcctaggaaatcacaggcttctgagca

SEQ ID NO: 735064 - DNA, 250 bp, Homo sapiens
ctctccttttagaggctttgcattctgcacccagcttcactaacagtgggctgaaaacatccttgggttgagtgtttcatttgggagttatttggccagggccttttgaacagtagtgtccccatgaagtgctagataatatatgtgtaagagtcagctttttttttttttttaactctaacacccttcagaaatttctaactactttgtaactgcatggcttaacctggtgataaaagcagttattaaa

SEQ ID NO: 735065 - DNA, 250 bp, Homo sapiens
atggtgaatgacggcgtggaggacctccgctgcaaatacatctccctcatctacaccaactatgaggcgggcaaggatgactatgtgaaggcactgcccgggcaactgaagccttttgagaccctgctgtcccagaaccagggaggcaagaccttcattgtgggagaccagatctccttcgctgactacaacctgctggacttgctgctgatccatgaggtcctagcccctggctgcctggatgcgttcc

SEQ ID NO: 735066 - DNA, 250 bp, Homo sapiens
gcacgcgctcatcaagaagctgaatcagctgcgcgcaagcgagcctggcctggctcagctgctggtggatcagatatacgagaacgccatgattgctgctggacttgttgacgaccctagggccatggtgggccgcttgaatgagctgcttgtcaaggccctggagcgacactgacagccagggggccagaaggactgacaccacagatgacagccccacctccttgagctttatttacctaaatttaaa

SEQ ID NO: 735067 - DNA, 250 bp, Homo sapiens
aagatatggcaaaaagtgacaaagctcgctatgacagggagatgaaaaattacgttcctcccaaaggtgataagaaggggaagaaaaaggaccccaatgctcctaaaaggccaccatctgccttcttcctgttttgctctgaacatcgcccaaagatcaaaagtgaacaccctggcctatccattggggatactgcaaagaaattgggtgaaatgtggtctgagcagtcagccaaagataaacaaccata

SEQ ID NO: 735068 - DNA, 250 bp, Homo sapiens
cgcagagcgaacggtggaggatgttttccttcgcaagttcatgtggggtaccttcccaggctgcctggctgaccagctggttttaaagcgccggggtaaccagttggagatctgtgccgtggtcctgaggcagttgtctccacacaagtactacttcctcgtgggctacagtgaaactttgctgtcctacttttacaaatgtcctgtgcgactccacctccaaactgtgccctcaaaggttgtgtataag

SEQ ID NO: 735069 - DNA, 250 bp, Homo sapiens
atggcgggtgaaaaagttgagaagccagatactaaagagaagaaacccgaagccaagaaggttgatgctggtggcaaggtgaaaaagggtaacctcaaagctaaaaagcccaagaaggggaagccccattgcagccgcaaccctgtccttgtcagaggaattggcaggtattcccgatctgccatgtattccagaaaggccatgtacaagaggaagtactcagccgctaaatccaaggttgaaaagaaaa

SEQ ID NO: 735070 - DNA, 250 bp, Homo sapiens
ggccgccctcctgaccggccggctcccggttcggatgggcatgtaccctggcgtcctggtgcccagctcccgggggggcctgcccctggaggaggtgaccgtggccgaagtcctggctgcccgaggctacctcacaggaatggccggcaagtggcaccttggggtggggcctgagggggccttcctgcccccccatcagggcttccatcgatttctaggcatcccgtactcccacgaccagggcccctgc

SEQ ID NO: 735071 - DNA, 250 bp, Homo sapiens
ggtctgggaggggctgaatgtggtgaagacgggccgagtcatgctcggggagaccaaccctgcagactccaagcctgggaccatccgtggagacttctgcatacaagttggcaggaacattatacatggcagtgattctgtggagagtgcagagaaggagatcggcttgtggtttcaccctgaggaactggtagattacacgagctgtgctcagaactggatctatgaatgacaggagggcagaccacat

SEQ ID NO: 735072 - DNA, 250 bp, Homo sapiens
agggatggttcctgagcggctgcccccatggctccagcgctacgtggacaaagtgtcaaacctcagcctctttggaggcctcccagctaaccatgtcctcgtgaaccagtatctgcctggggagggcatcatgccccacgaggacggaccactgtactacccgactgtcagcaccatcagcctgggctcccacaccgtgctggacttctacgagccgcggcggccagaggacgatgaccctacagaacag

SEQ ID NO: 735073 - DNA, 250 bp, Homo sapiens
acatgttaatgggcgctggagcatgcctgaactggctgaggtggaggaaaacaagaagatgtcccagccagggtcaccctccccaaaaactcctacaccctccactccaggggacacgcagcccaacactcctgcacctgtcccacctgctgaagatgggataaaaatagaggaaaatagcctcaaagaagaagagagcatagaaggagaaaaggaggttaaatctacagcccctgagactgccattgag

SEQ ID NO: 735074 - DNA, 250 bp, Homo sapiens
aggctggcatgggggcagccgctgcccctgcctgggtgttgctgtgtattcctgccggccaggggccactgccaggaccacgcctcccttttcatatcccgattcttaagttctgctattgtggtattctggtggagaaaaaagaaccgcgtggctgtttttgaactgcctggaacctaagaccctgaattcttttcccccccaaggggaaaatctatatggaaaacatttattttaaaatacaggatga

SEQ ID NO: 735075 - DNA, 250 bp, Homo sapiens
gtgatcacagaatacctgaatgcccaagagtcagccaagagcgccaggctgaacctgtggcgctatggagactttcgagctgatgatgcagacgaatttggctacagccgctaaggaggggatcgggtttggcccccagccccgctcacgccagtccctcttcctctgccgggagggtgttttcaactccaaaccccagagaggggttgtagattgggtccagctttgcttcagtgtgtggaaatgtctc

SEQ ID NO: 735076 - DNA, 250 bp, Homo sapiens
gcactgcaacatggtgctggagaacgtgaaggagatgtggactgaggtacccaagagtggcaagggcaagaagaagtccaagccagtcaacaaagaccgctacatctccaagatgttcctgcgcggggactcagtcatcgtggtcctgcggaacccgctcatcgccggcaagtaggggccgcctgtctgttgacagaactcactcctctgtcctatgaagaccgctgccattggtgttgagaataataaa

SEQ ID NO: 735077 - DNA, 250 bp, Homo sapiens
gcgccacccccaaggacggcccaagcgcaggctgcaccatcgtcacggccctgctgtccctggccatgggcaggcctgtccggcagaatctggccatgactggcgaagtctccctcacgggcaagatcctgcctgttggtggcatcaaggagaagaccattgcggccaagcgcgcaggggtgacgtgcatcgtcctgccagccgagaacaagaaggacttctacgacctggcagccttcatcaccgaggg

SEQ ID NO: 735078 - DNA, 250 bp, Homo sapiens
gcaacaacatgctgctggtgggggttcatggcccaaggaccccctgcgaggagatcctggtgaagcacgtgggcagccggctctacagcgtgtcctacctgctcaaggacaagggggagtacacactggtggtcaaatggggggacgagcacatcccaggcagcccctaccgcgttgtggtgccctgagtctggggcccgtgccagccggcagcccccaagcctgccccgctacccaagcagccccgccc

SEQ ID NO: 735079 - DNA, 250 bp, Homo sapiens
ggcagagaagataagaacttggagcccatttctcactggagaggaaaacttgtcatctggctttgcggagaaggttccaccttacgctcgtagtacattatctttactatgtgctaggatatcatatttaaaaggacaaaaaaatgtaaaatacttgaatgagcttgtattataacattaatattattgagagtatctgctttccaggctgaagtgattcattcattattctagtcctgctttagtcctt

SEQ ID NO: 735080 - DNA, 250 bp, Homo sapiens
cccagcggccagatcggcttcatgctgtgcagcaagaacccgagcacgaacttccaggagccggtgcagccgctgacacagcagcaggtggcgcagatgcagctgaagtactacaactccgacgtgcaccgcgccgcctttgtgctgcccgagtttgcccgcaaggccctgaatgatgtgagctgagcccaggcgccaccactgatgccacccaggacctcggaccttggagcctgcggggtgcctcggc

SEQ ID NO: 735081 - DNA, 250 bp, Homo sapiens
aacccaacattgatagtcccttgaacacacatgctgccgagctctggaaaaaccccacagcttttaagaagtacctgcaagaaacctactcaaagcaggtcaccagccaggagccctgacccaggctgcccagcctgtccttgtgtcgtctttttaatttttccttagatggtctgtcctttttgtgatttctgtataggactctttatcttgagctgtggtatttttgttttgtttttgtcttttaaat

SEQ ID NO: 735082 - DNA, 250 bp, Homo sapiens
tgccgctgacatccggttcgtctacacccccgccatggagccttaggggatgccgctgacatccggttcgtctacacccccgccatggaggtcccacaaccgcagcgaggagtttctcattgctggaaaactgcaggatggactcttgcacatcactacctgcagttttgtggctccctggaacagcctgagcttagctcagcgccggggcttcaccaagacctacactgttggctgtgaggaatgcaca

SEQ ID NO: 735083 - DNA, 250 bp, Homo sapiens
acgggcaagatcctgcctgttggtggcatcaaggagaagaccattgcggccaagcgcgcaggggtgacgtgcatcgtcctgccagccgagaacaagaaggacttctacgacctggcagccttcatcaccgagggcctggaggtgcacttcgtggaacactaccgggagatcttcgacatcgccttcccggacgagcaggcagaggcgctggccgtggaacggtgacggccaccccgggactgcaggcggc

SEQ ID NO: 735084 - DNA, 250 bp, Homo sapiens
tggcatatgaaaatttattactacagtgttttcaccattaatatttatgatcttggtctttccttcttgcctttgtatagggccaaaagagaaacattggctactttgacaaccttaaagcggactccaggaatatcaccaacagcatgacctttgcgaccaaatccagcaaccagaacttcatcattttcctggaataaaataagaagtttatttctggtgttggtggcgatcacaaaaatactttcat

SEQ ID NO: 735085 - DNA, 250 bp, Homo sapiens
caagcagaagtgagcgctgggctgttttagtgccaggctgcggtgggcagccatgagaacaaaacctcttctgtattttttttttccattagtaaaacacaagacttcagattcagccgaattgtggtgtcttacaaggcaggcctttcctacagggggtggagagaccagcctttcttcctttggtaggaatggcctgagttggcgttgtgggcaggctactggtttgtatgatgtattagtagagcaa

SEQ ID NO: 735086 - DNA, 250 bp, Homo sapiens
gctgcccagccgcctaggacacagccaaccccggcccctggtcaggcccctgcagctgcctcacaccgccccttgtgctcgcctcataggtgtctatttggactctaagctctacgggtgacagatcttgtttctgaagatggtttaagttatagcttcttaaacgaaagaataaaatactgcaaaatgtttttatatttggcccttccacccatttttaattgtgagagatttgtcaccaatcatcact

SEQ ID NO: 735087 - DNA, 250 bp, Homo sapiens
cttcgagaagtgcgaggtgaacggtgcgggggcgcaccctctcttcgccttcctgcgggaggccctgccagctcccagcgacgacgccaccgcgcttatgaccgaccccaagctcatcacctggtctccggtgtgtcgcaacgatgttgcctggaactttgagaagttcctggtgggccctgacggtgtgcccctacgcaggtacagccgccgcttccagaccattgacatcgagcctgacatcgaagcc

SEQ ID NO: 735088 - DNA, 250 bp, Homo sapiens
tgaacagcgttctgagtgtggacgagtagccagtgaagataatgaatgtcgaatgtgactgactagcagcttcattttgaatgagggtcgctgtctgcccattgatagaggccagattgtcttggaagttccaaagttgcaacgatttctggctagtgccacgaggtttacttgactgttgtgtgaaaagctgataagaaaaccatccagaaaaaagctcttcgttttacaaacatgaaaataaaacatg

SEQ ID NO: 735089 - DNA, 250 bp, Homo sapiens
ctacaacagacacatcagatgacactccgggcaaataaatgattttcactgaggacttactggttttaataataggtcctggtgtagagaagtccctcaacctattgtgcaacgagttttgagaagcgggtaagctgtatgttttgtggttttgtttcataaattcatctacaggaagaccaatattgactgaatgaagctttcatttaaagagctaaaatatgctttgtgtttttatatgtggatacta

SEQ ID NO: 735090 - DNA, 250 bp, Homo sapiens
gcggcatctaaagcagcttctaaacagagagagatgctcatggaagatgtgggcagtgaggaagaacaagaagaggaggatgaggcaccattccaggagaaagattccggcagcgatgaagatttcctaatggaagatgatgacgatagtgactatggcagttcgaaaaagaaaaacaaaaagatggttaagaagtccaaacctgaaagaaaagaaaagaaaatgcccaaacccagactaaaggctacag

SEQ ID NO: 735091 - DNA, 250 bp, Homo sapiens
tgcctggtaattttcccggaggaatgcctggaatgggagggggcatgcctggaatggctggaatgcctggactcaatgaaattcttagtgatccagaggttcttgcagccatgcaggtggctttcctgggggaatgcctggtaattttcccggaggaatgcctggaatgggagggggcatgcctggaatggctggaatgcctggactcaatgaaattcttagtgatccagaggttcttgcagccatgcag

SEQ ID NO: 735092 - DNA, 250 bp, Homo sapiens
gccagataaacacttactgccagaacatcaaggagttcactgcccaaaacttaggcaagctcttcatggcccaggctcttcaagaatacaacaactaagaaaaggaagtttccagaaaagaagttaacatgaactcttgaagtcacaccagggcaactcttggaagaaatatatttgcatattgaaaagcacagaggatttctttagtgtcattgccgattttggctataacagtgtctttctagccata

SEQ ID NO: 735093 - DNA, 250 bp, Homo sapiens
agagatggccagcaatcggaagtgagcaaaactgccgcaagtctgcagcccggcgccaccatcctgcagcctcctcctgaccacggacgtttccatcaggttccatcccgaaaatctctcggttccacgtccccctggggcttctcctgacccagtccccgtgccccgcctccccgaaacaggctactctcctcggccccctccatcgggctgaggaagcacagcagcatcttcaaacatgtacaaaatc

SEQ ID NO: 735094 - DNA, 250 bp, Homo sapiens
ggaagccctgaccaggcatggagtatctcacaaagtagacgattcctctgggtcaatcggaaggcgctatgccaggactgatgagattggcgtggcttttggtgtcaccattgactttgacacagtgaacaagaccccccacactgcaactctgagggaccgtgactcaatgcggcagataagagcagagatctctgagctgcccagcatagtccaagacctagccaatggcaacatcacatgggctgat

SEQ ID NO: 735095 - DNA, 250 bp, Homo sapiens
ctcccagttcgcctcgtcgccatgcctcggaaaattgaggaaatcaaggattttctgctcacagtccgatgaaaggatgccaaatccgtcaagatcaagaaaaataaggacaatgtgaagtttaaagtttgacacagcaaatacctttacaccctggtcatcactgacaaagagaaggcagataaactgtagtccctgccccctggtttggcagtgaaggaactaaaatgaaccagacacactgatttgt

SEQ ID NO: 735096 - DNA, 19015 bp, Homo sapiens
gtaagggtctttacatggtttccagatagttcattagttgttgctttctttttttgtctgttttctgttttttttttttaaataactgtggtatgatgtaataggaacttataatttctgagttgcttatttttcctttacagttatagtaaagttatactcatttattttctcctgctttctgcagagtaaaatactgatttttgtctagaaacaagacagtgcaagacaatgttgaaagtgaaattctatgttaaaatatgccagatttattttaagaatttaatatctgtagtcagttatcaatacaaccaaattacataattatgcatgataataggtaaatactgagaagttcacctcattttcttgttaaaggatttggctattaccgtatgtgtcagttagtactcttttgtatggtagtgaaagaaaactcaacccaaactgattcatgaagaagaaagtaaatctggttagatgtggtttgaattaggtaattcatgtcatgaggactcagatctcccatctctatttctacgttccacttttgcattggcttcattttcggttaggttctcccttggtggtggtaaggtggttgtagcaatgtcagcctcccatttttggaaccgagtccataggaggctattctttctagaccttaataggagtaacacaattattgctcatcaccctagctttggccatgtgtcaaatcctgaccagtcacaatttcacagtcatagattctaccctggagctgggatgttactggcctcactagaaacacattgctgatagggtagaaggtgtgttcatcctacccaacccgacccgcaccaaagtcagaatagggaaaaacagatgttgggtgacatgcaactaacgtctgccgtactacactgaagatatttttctatgtttattctccagtgaaagagcttatatttgtggtacataggggattttgttttaatttagaaaatttaattgtagaaaacatgttttataaccctttctctgtactttgttctatatcaggaattgacttgattagataaggtgacatagggtatcttaggccctacaagatagtaaaccccccatcacttgaaagtattcagtagaggcttaaaaaacattattaaaggatgtggttattaggggactttaagaaatgaatatgaaattgaagtaggaaatctttaagctactctgtgagttatgccttttaaaagcaatttgtaattcctgtagatttcttttaaatttaggcagtttcataaatgactatagcatcattttagcaaatttgtgatcctgtaagaggaggataagtgttttttgtttgtttgtttgttttttgtttttttgagacagagtctcactttgtaccccagaaagtaaatctagttagatgtggtttgtctcggctcactgcaacctccaccccgtgcgttctagcaattctcctgcctcagccaccacacctggcctaagaggggaggataagtgttttagtgatcatattagactgaatgtggcagatgagatttcccgcccccccattgttggttagactgacattcaacattcaacaagagccacctgcccttgtaggcatttctgccactatacccctacataaacctagagtgctattgcttacttgctttccttcaaatacattttttcatttgtggcctccacattcttgtgtgtgatgtcctttctctgtgaaatgtcttctaccctttttttcaaagcctagtttagaactgacctcttctatgaaccctctgccgactggcctttccttccccagtcccccaagttcaaaatgatctctttcctttgaatactatagtatttgcacaattcactatctccttatcatattcttcttgtttatttgttatcagctgatgttgacatcataagttcaggttcctaactagatccaatattggaatttttcagcttttgctaagaagagagcttgtatgtctttgggaataatgggcagaaaaagataactttgagaagtcttagacttctaatagctttgatatttaaaagtacatgtaatacaagaggtttttttcctacatttaatgcatggagaagataggacatttagaaatatggaattaatgttcatttgactggcaaaagattattttctcagatgtagtgaagtgtggtaaagaacttcactctagagccagaatgtctgtgtttgtatcccagagcccaccacttacatttaaccattaacattcaacttactgtctctgagtttcagtggcctcatctataaaatgaggataataagagtacctacttcatagagttgttttagtggttaaataaactaacgtaaacttgctagaacttgataaactaatattggatgagaactggttgaaataatgcctggctatagtaaaaacttggtaaatgttagttgccattacaatgcaactactgttcctaccattccctctgccagtgcctggtattcagtagcactcagtaaatgttagttaaatgaagaaataactgaaggaatgaatgaacaaatggttgatgtagagattgcttttccattgttgtttattgaatattttgagatgtataacatactgtctgttaggcactgtgggatgggcactcacggagctgtcttccaaaggggtataggagaggagacgcagtgatctcagcaacctacctttaaaacatatcctagtatctactgccatgttaggttctcttcttttgctttttttaaaaaaaaattctcacaaaactccccccacccacttcagtttatagatgaggaagctcctactacataatagtgcttcccagtctaattcttgacctcattgtatttatatgtcctttttttttttgacagagtctcactcattgcagtggcacaatcacagctcactgcaacctctgcctcccctgctcaagtgatcctcccacctcaacctcctgagtagctgggactacaggcatgcaccaccacgcctggctaatttttgtatttttttgtagagatgcggttttgccatgttggccaggctggtctcgaactcctgggctcaagccatctgcccactttggcctctgagagtgctgagattataggcatgagccaccattcccagccatgttttcctttttcattgaactttatctactttagccattaaactccactccattggtcttgtcattactaagagctgaaccacctgcaaaatattaagttaaaaagcgttttctttgacaacagttttcttttcttcatcttcctctatcactttacttctgaacttttattctctcattttgatctgacccctacttctctgtttttcctggccatttagtactttcttgttttgctcatcccatttcccagtggagaccttctggtctgctgctttatcactggttttgttagaagacatacaaatggcaaggaggtatatgaaaaggtgcctaacatcattgatcatcagagaaatgcagaccaaaactacaatgagatatcatttcaccccagttaaaatggctttttttttttttttccaaaagacaggcaataacaaagtactggtgaggatgtggagtaaagggaacccacatacactattagtaggaatgtaaattagtacagccactgtggagaacagtttgaaggttcctcaaaaaactaaaaatagagctaccatataatccagcaatcccactgctaggtatatatccaaaagaaaggcaatcaatatacggaagagatacctgcacacccaggtttattgcagcactattcacaatagccaagatttggaagcaacccaggtgtccaacagatgaatggataaagaaaacatggtatataaacacaatggaatactattcagctgtgaaaaagaatgaaatcctgtcatttgcaatcctgtcttgaatagaactggaggtcatgatgttaagtgaaataagacaggcacaaacttcacatgttctcacttatttgtgggagctaaaaattaaaacaatcgaactcatggagctagagaatagaattatggttaccagaggctggaagggtggttgggcgtataagtgtagggggagtggggatggttaatgggtacaaaaaaatgagaacgaataagatctacttgataacacaacagggtgactatagtcaacagtaattatacatttaaaaataactagaagagtataattagattgtaacacaaaagataaatgcttgaggtgatggatacctatttaccctgatgtgattattacttatttcatgcctatatcaaaatatttatactccaaaaatatatatacctactatgtacccacaaaaatttaaaaatttatatattgtttttgctatcacctttagaatttcttgtcattggatagttcgtctgtataccattctggtcttcattccccagggcccccgttgtctgatttttctgcttctagaactgttagaggtcacaaaagcaagatggttgtatctatcacaatttttgtctgactttaactgggtatctgttacgatttagtagtcatcttactgacttcttgttggtttccaattgaatcctcacagtagactgttttcattgtaatcagtatcgaattatagcctgttcccttcttcataaatgaaggctttcttcttcaacagttcttagtgacttcacctgtactttatttctctgctttgaatatttcgaagaaaacatattcttgctctttcccaaggttaacactacatacattaccttgaccacaggatgttttcttgcagattgtgacctaattccatcacccttcagcagcccccaccgttttcatggattcagctaaaccttctgtaagatgactctttttccccctaatctttatatctcttttgatatgtagctttagtctcactttttttccttttggattttgccagttagatgtctccctggaattccacttcagcatggctaagactaagcttgtcttctctttcctccccaaagcaaattgtaattaggatagactgaaggtgacagaagataactaagatcttcttcatcctttcggctcttatggaagctgaattccagtagtcattctaaatttgttgtatgtcagcttatggtatcttttcatgtctttacattcagccaaagaggaagttccttgaaggggagaccagagggcgtgctgtgcttcttaatcctctctttcttaaccagtaagaggcattcagtagatatctgatgatactgattaatagaggggaacttttcagattcttttttttttttaaccctagtaagctttagtacaaactaaatgctgagagattatcaagtaagggattgatcatcacaagaagactcaggatgttacatcctgtaggttttatagtttcctatattgtaaaaaatatgagttatagcagcttgtctggatgtcatacaggtataaaaatcagttttataaacttgagtaaattggggcccattttagaaaaaactcttgcaggctgtgaatgccaatatataagtaaagtattaagtataatgttatttaatgtgggcaaacataaagccaggtgtaaattttttaggtttaaaatcttatagaactatacatccaaaagaaaatttcaagttaaacataatacaaagcaatacaatctaaattaacattaatttaatgtgatgaatgatattgccttgctaaaagtgggtcactacttacaatgtgcaaatggtactcatcgttagggtatagattcttttaaactatgacatacgtacactaccatgtggaacgtgatgatgtgttctctgttctaactactgggaagacttccttggcatagcacatgccatggggtcagttggctttgacttcatatagatatgccatttacttggtcagtgtcacttctatgacaagtagtatgttgtgccagtttgattataagtacaaatatgggcaatgaagtaacttggttttaaggttgttactaagctgagtaacagtgtgtggctatacaaatttttataggctatcaggaatgaaaacacaggagattgttgtagattcaagtattttagattcaagtttgaagatgctcatgcagatgtttaactgagttgtatagacctttatgtttctttctttttctctttttttttttttgagacagagtcttgctctgtcacccaagctggagtgcaatggtgtgatctcggcttactgcaacctccgcctcccaggttcaagcaattctcctgcctcagcctcccaagtagctgggattacagatgtgcaccacgacgcccagctgattttttgtattttagtagaggcggggtctcaccatgttgtcaagatggtctcaatctcctgaccttgtgatccacccacctctgcctcccaaagtgctgtgattacaggcgtgagccaccgcgcctgactgacctttatgtttcttaactttatgctatacatcagttgatatttcaaaaatttaaatggtttctatgattattctttgggctaagaaattgggcattaattgtcctcatatgtatggtttttgtggctacttcatgtagattttatttttggtggttatcaaattggaatttttttttttttttttttttttgagacggagtctcattctgtttcccaggttggagtacagtggtgcaatctcagctcactgcagcctcgacctcccaggctcaagcagtcctctcacctcagccttctaagtagctgggactacaggcacgcaccaccacacctggctagttttttgtgtttttagtagagatggggttttaccctgttggccaggctggtcttgaactcctggcctcaagtgatccacctgcctcagcctcccaaagtgctgggattagaggcatgagccaccacacctggctgaaattggaatttcattggtactgcctgtaattttatgttaatttttttttttttttgtcgtcactagcttttatctaaagcccctagagagaaaggccatgataccttgtatacaaggttataagagtatacaagggaaagggagggctgaagggaacagggtgggctggtacaagcctcattagaaataccattgagtctgtgagtaaaacatcattatatgaaaaggagatgtggttttagggtggtccaattacttttgcaccagcctaataaaattacaagtcattatcaatagagacattgtaaaacctttttttttcccaaaagaagtatcaggtatgataattacatgtctgcccaactttcgttatagattaacataacttaattgtatttaaggtacaatttaggagagttgctgaaaaatgaatctttagtattgggatgccttgattctaccctcaatagctataatggattatgtgtctgagtagattaataaaaatcttttgagcatttttcttgaactacttcactgaagattagctttttgagcatccattttaatttctcagtatataaggatcggtttatcacaactgtattgttttccctggccttgttagattatattttcatatcatgtagaaaaataggtgtattcgttctcccttgaagtcctttgtctcccaaaggaaatggttgcaatacagatgtgtcacctcttccacaggtaaagtggaatggagaagtagccagttaaatagtgcatgctcaatttggaacatttagagcatacaggaaagttatttatttggtaaatattttttaagcatttactatgtttcatgcattgtactagttgtagaggatataattgaatacaactacatgtagcccttgactttatggaactagtctagtataaagatttaagattgcctggcatggtggctcacgccactaatcccagcactttgagaggccaaggcaggattgcttgaggccagaagtttaagagtagcttggtcaacataatgagactccatctctaaaataaatagatagatagatagatagatagatagatagatagatagatagaagtagttagacaacacaaagcagtttcactcatcttgtggcaaggagttatgtatttctaatcaaatttggcaactcaagcattttcaacaaaatctacatgttttttcagaataaagtgaccaacacagaatgttacctgtaaaaatcagagcaataattgctatctaaaataattttgaaaattaagtggtactgaaaggctcatatagcaaaaatatggcctcctgtcattgtactttcctacttcccagactcaccattttcaacattttttagtagtttattttgccattttatagcatagtacctgacattttatttattcaacagacatttcttaagtacctaatacatgccattccttgtttgaagggatgctaaggatacagtggtgaacaaggcgttgtggggttgtatagagggtattcattcctaaccttgaaccaaatatttctttctgttggataatgcattaaaaattgcaaacagtttacaaacttttggagcaatggtggccttgatcataaagtagggactgcttctaccgtatacatgcttggtggtgtatttgtgatatctggctaaagtttctacatggaaattgactgactttagttttgagacttctgggaaccagtcaggcaaaatagtgaaactgtgtatcctgtttccaagagttgtcttttaaggttatctgcttcattcatttggcctgacttgctaggcaaatgcctagggtaaatatgatttgattaactataacaacaacagcaacaacaacaactttattttttagagcagtttgaggttcacagcaaaattgagcagaatgtacagagattttccctatacccgcttcccctacgcatgtgcggcctcccctactatcaacatcccccaccagagtggtttgttacaattaatgaacctacattgacacatcattatcactcaaggtccgtagtttacattagagtccactcttggtgttgtgtatgggtttggtcgattttataatgacatttatccaccattatagtgtcatacatagtaattttgctaccctaaaaatccagtgtgctccacctgttcctccttccctcctccctcatccctggcaaccactgaactttttaacatctccatagttttgccttttccagaatgtcatatcattggaatcacacagtatgcagccttttcaaatgggcttctttccgttagtaataggcatttaagtttcatcctcatcttttcatggcttgatagctcatttctttccctccctcttttcttccctgtcttccttccttcctcttctttcctgtttcctctttcttcttccttttttaagagacaaggtgtctcactctgttgcccaggctggagtgcagtggcccaatcatagctcattgcagccttgaattcctgggctcaagtgatcctcctgcgttagcctcctgagtagctgggatcacaggctccagtcattttagtgctgaataatatttcattatctggatgtaccgcctattcattcacctactgaagaatatcttggttgcttctaagttttggcaattatgagtgaagttactataaacattgtatacaagttttatgtggatgtatgttgtcatctcccttgggcagataccaaggagtgccattgttggatcatatggtaaatatatctttagttttgtacagaattctaggttggtatttttttctctctcagtcctttattttatttggagacagtctcgctatgtcgcccaggctgccatacagtggtgccatctgggctcactgaaacctccacctcccaggttcaagcgattcttgtgccttggcctcccaagtagctgggattacaggagtgcgccaccacgcctgctaatttttgtatttttagtagagacagggttttgccatgttgcccaggctggtctcaaactcctgaccttaagtgattcacccacctcaatctcccaaaatcctgggattacaggcctgagctactgtgcctgatctctctcagtactttaaagaaatatttcattccacttttcttttttttcttctttttgagatggagtctcactctgtcgcctgggctggagtgcagtggcgcgatctcagctcactgccacctccgcctcctgggttcaagtgattctcctgcctcagcctcctgaatagctgagattacaggcgcccaccaccatgcccagctaattttttgcatttttagtagagacgggggttccaccatgttggccaggctggtctcgaactcctgacctcgtgattcgcacatctcggcctcccaaattgctgggattacaggtgtgagctaccacgcctggcccactcttcttgcttacatagtttctgaggagatgtcagatgtaatttttatttttgctcttctgtaggcaagttgagttttttccccctctagcttctctcaggatttttttctttatctttgattttcagtagtttgaaaattatatgcctagctgtcagggttttttgcttgtttgtttttgttttctcaggtgtgactccagaaaggttctaaagaggagctttacaatctcttctctggggtttatggagacttcctttacccttctgtgttagccccttaaagcactgcgtcaaccttaaaagggcacaggaaagggtgtctatgccatttttatgccatttatcctgcttggtgttttctgagctttcttcatctgcggtttaatgtctcacattaatttgtagaaattctctgtcattgtttcaaatttttcttcagttcttttctctgtttcttcttctggtgttcccattatgcttttgtggttgtcgtacagttattggatattttgttccaggcttttttttttccagtctttttttccttttgcttctcggttttgtaggtgtctgttgagatactctcaagtgcagatattctttcctcagctttgtctagtttactaataagcccattaaaggcagtcttcatttctgttacagtctttttgatcagtagcatttcttttttattctttcttaaaatttctgtctttctgcttacattgcccatctgttcttgcatggtttctactttgtccattagagttcttaggatatttatcataattatttcaaatttctggtgtaacaattccaacatccctgcaacatccaagtctagtttcgatgcttactgtgtctcttccagctgtgttttttcctatttaatatgtcttataattttttcttgatagccatacatgatgcattaggtaacagaaactgctgtgagtggacctttagtaatgtggtggtaaggtgtgcatggaggggaaacattttcagtctgttagtgaacttttgtcaacttcacatgtgcttctcaagtccatcctgtaagtgggagagtagggctagagaggactgaagttgggtatatattaaatactttctcctacaaagaagcctagaggggacgcattaggggattttttttcccccagtattcactgtgatgacccttattgagctcctggaggtaaaactcacaaaactgtggttctcccccctgcccatattactacatgtccctggagtttatatctttcagacttgtctgcactgagcttccaccaatttgtcaaatacagatcaggtttccctaccacccgtgcagttgaaaacccacatacaacttttgactcctccagagcttaactactcatagcctgctattgactggaagccttgccaataacataaacagttgattaatacatattttatatgttttctgtattatatattgtattcttacaataaagagaaaagaagatgttattaagaaaatcataaggaagataaaatatatttactgttcattaagtggttcccatgggtgctggttcccatggaggttgccccttgtgagtttttgctcagggaagttgtgattctctatatttgcctgttggtctcctaatttgggagtcatcagttttccctgtgacctcacttctcttacagagttaagaacagttgttggtttttcagtttgttcagtgttttacatgttgttagaacacagtggtacttctaagtttcttaacatgctagatcagaaacctgaagtctcacctaatttggctttttatattttttcttcttttttttcttccattgctaccaaagcatttttcatctgtgtctggggtgacattagagcagaatgtgatttctaggtaaacattattgggctccctagcagaaaaatttttgaaagtagtacatgaattctgtataattaaaattttcttttcatcttaataggtataggtaataggcacggcctattttttttttgctcaacagtctaaaatagtaatttaatcacctaatagccttagttatatagttgaaagaagagttggaaatctgattcatgggttggaaatcacctgtcacatatgagttttaggcactggtcactttattttgaaacagctttggggttttttcctttttcaactcataataggctttaacagcttttagttttgtttctgtttttttaacagcatgagttgccaaatttggttatagcttcttggtacaagatgggtaaatttgctttgtgttgtgtaattactttttattttaaatgctacctcttttatgaacactaactttacactaagattaggaaaatgagaattgcatgtctgcaacaaatagctatctgtagtattaaattgtgaaaatgtagactttggattggagctggcatctcttaatatgtaattgtaacatagagtaaataagtattttgtcccttgtagggtcaaacagtacagtgcatgggcagaattagagatgtaggcttttttttttttttttttttttactggcttagagaaccgtttgatcagctaatatggaattaagtccctagggctgcccaggcacaacattaactgctattaaaggaaaatttaaaagagtattagtgaaggttaaatactgaccatggacatctggcaaaattgatgttttttttcccctccaccattgtttatagtttattgttatttatcagagaattaatgtttattttcagaatctattaccataagaaatctgtttgaggacttcgtatgtgccaggaattctactaaataatgatataatgctgaacagaattagataggatcctcacttcgttaagcttacagtctagtggtatagatcaacattaatcaaagaataacacaaatagaaagcagagcagtggttcatgggattgactgtagagaagcatgagggaagttcccaggtgatggaaaatactttatttcttaatcgtggtggttacatgtgtgcatatgtttatgaaaatatattgtacatttaaagtggatacattttatcacatgtaaattatgactctataaagttaattaaaaagaataactcaggtaaggtggtgtgtgcgcctgtagtcccagctatttctgaggcaggaagatcacttgagcccaggagtttgagttcagcatgggcaacatgagacctgtgagactttgtctctaaaaaaatttaaataaataactaagataaatgtaaaattacagctgtagtaagttctacaaaggagagttacatgggctatgacgatgtaagatagcaagaactgacattggcagggaggaaatgatgatgagtagaagtaaataagtgaagtgtggggattgatgtcaaggggacagtataaaagaaataacagcatgcgccaaggccctaaaattggaaagtccttggcaaattaaaggagtttgaaaaaggccattgtgtgcaaagcagaaaataggtactacaaggtaaaagatggagctaagcggtaggtaaggctaaaccttgtcagccattgttaaatattgaattgtatcctaagcacaactcagtggaaagcagttaaagttctttaattgggggaggcaatgaaggggtaataaaattggttatagaaatactgctctggctctagtgttgagaatgaattggagtagccagagtagattcaagaagactttagtaagattattccaacaggccaggacctgttatagggtggtggcaatggagagagatggacagaatggagagtgtatttaggaggtaaaaatgacagaacttggtgatgcactgaatgtgaaatggggaaggtgtctaggaggactactaggtttatggtttgcgtattagggtggatgatagcagtttcatttactgagacagggagccctggcagagtacccagcttttagagtgggtagggggaaggggagagtgcatctggtgttgggcattttgaagtgatttacatacaacaaactgaaggtatctttaacactgagtccagcaggttagcatatttattcagcaagcattgcacctttttttgttgtttttggggtcttcaactcctggcctcgaatcctccctccttcccccgcctctcccagcctccgcctcccaaagtgctgggatttcaggagtgagccaccgcgcctggccagcatcgcgctgtttgtgcagtgtgccctgtgctaggtcttgcagtgggtaccagtagagacataaaagtacaaaagataattggacgtttagtagagtcctgaaagggggcgggataggaagatacctaaccataagaaaaaccagcaagagcggaaaaggagctagtcctccagatcaataagttaatcacttatgtttgtgattccctgcattttgggtgattctctgtcgaggtcctcttaagtccagacttttgatataatctgcagtttgcgccatttggattcctgaagcatctttacaagccacctacattccttatggagctgtggcacaacagcaagcccacgatgtctcaccggattaataaaaatataggcgctcacgcttttgtttaccgatatagtatctcctcctcccctcactccatcaacccccacgcgacacaactttccggaagtaagcaaaatccgttatcaaggtgaaactccggggaccaggctccacagctgccataaactggatggcacgttagaagccggtgggtgtaggtgaggcacgctggcgcccgcgggcccttctccagccgctacccagtgggaatccgcggggctgaagccccgaaaccaggctgagcgtcccagagcgcaacctccctttcccccagcagcgccggcgccgcagaagccgcgtgtccccaggcgcactcccccaaggtgaacccccgccccccacggaggcggctgggtcgcgggtctgggcggggcgctccggacgccctcccgccgctgcgcacccctcccgcgagctgccagctccctcggcctctccacccaaaactggcccaaccgccaatcgtctgcctctcacctcctacagcaggtgacccatggccaatcgccaggggtctctttgccaggagccgccagggccagccaatcggggcgacccctccgccggggaggggacgggaaaggggtggggggtgaagggggtgaagggggtgtcccgggggacgggctgaacctcagtcaggaccgcctgcaccgcagtccggggatcgggtcgaggggagaagaaaaaggggtgctcgggagcagcccccggctacctcccctggaggcacagagggcgggggccttggcgaatggctttcttgctggccacttgcggaggtttggattcaggatttgttcctagtgtccaagattttgataagaaacttacagaagctgatgcttacctacaaatcttgattgaacaattaaagctttttgatgacaagcttcaaaactgcaaagaagatgaacagagaaagaaaattgaaactctcaaagagacaacaaatagcatggtagaatcaattaaacactgcattgtgttgctgcagattgccaaaagtactattaatcccgtagatgcaatatatcaacctagtcctttggaacctgtgatcagcacaatgccttcccagactgtgttacctccagaacctgttcagttgtgtaagtcagagcagcgtccatcttccctaccagttggacctgtgttggctaccttgggacatcatcagactcctacaccaaatagtacaggcagtggccattcaccaccgagtagcagtctcacttctccaagccacgtgaacttgtctccaaatacagtcccagagttctcttactccagcagtgaagatgaattttatgatgctgatgaattccatcaaagtggctcatccccaaagcgcttaatagattcttctggatctgcctcagtcctgacacacagcagctcgggaaatagtctaaaacgcccagataccacagaatcacttaattcttccttgtccaatggaacaagtgatgctgacctgtttgattcacatgatgacagagatgatgatgcggaggcagggtctgtggaggagcacaagagcgttatcatgcatctcttgtcgcaggttagacttggaatggatcttactaaggtagttcttccaacgtttattcttgaaagaagatctcttttagaaatgtatgcagacttttttgcacatccggacctgtttgtgagcattagtgaccagaaggatcccaaggatcgaatggttcaggttgtgaaatggtacctctcagcctttcatgcgggaaggaaaggatcagttgccaaaaagccatacaatcccattttgggcgagatttttcagtgtcattggacattaccaaatgatactgaagagaacacagaactagtttcagaaggaccagttccctgggtttccaaaaacagtgtaacatttgtggctgagcaggtttcccatcatccacccatttcagccttttatgctgagtgttttaacaagaagatacaattcaatgctcatatctggaccaaatcaaaattccttgggatgtcaattggggtgcacaacatagggcagggctgtgtctcatgtctagactatgatgaacattacattctcacattccccaatggctatggaaggtctatcctcacagtgccctgggtggaattaggaggagaatgcaatattaattgttccaaaacaggctatagtgcaaatatcatcttccacactaaacccttctatgggggcaagaagcacagaattactgccgagattttttctccaaatgacaagaagtctttttgctcaattgaaggggaatggaatggtgtgatgtatgcaaaatatgcaacaggggaaaatacagtctttgtagataccaagaagttgcctataatcaagaagaaagtgaggaagttggaagatcagaacgagtatgaatcccgcagcctttggaaggatgtcactttcaacttaaaaatcagagacattgatgcagcaactgaagcaaagcacaggcttgaagaaagacaaagagcagaagcccgagaaaggaaggagaaggaaattcagtgggagacaaggttatttcatgaagatggagaatgctgggtttatgatgaaccattactgaaacgtcttggtgctgccaagcattaggttggaagatgcaaagtttatacctgatgatcagggcagtaggcataattcagcaacaaacaatcttcctttgggagaaacctgttcattccaatcttctaattacagtggttcctatctcagggatactggactttctgacgcagatgaacaattaaggggaaaagcttcccttttccctctgtggcagttacgattttgacttcagtcctgagaaaaacttcaggttttgaaaatcagatgatgtcttctccttttccaaacaccacacgttgaaagcatttataaatccaagtctgaaactctgcgctctagtactgctgttaagatacacaacttgtttcttagttcatataatctcgggatacacacacacacacacatatatatacacacacatacgtatacacacacatacatatatataaatatacctgatgccagatttttttcataaatattctgcctactgtaaatatgggttcctctgagttgttttagaaaattagcgcaatgtattaaaatcaagtgttaggaaatttcatggtcttacctacaataacttttattttggaattgaactattattaaattgtatctaatcctggattacagtttaattaattattcttagtgcttaaggcttcataaagtaatttttccaacctttttttaaaaagagcatcttttattatcttttatggttaaacttggaagccaattatttggcaaccttgaatacaagagctagcttttcaaagaaagacacttgaaataatggaggatccattcttttcctctgtcagattgtatgttctgtctttagcccctgccaggcaattccccagaatcttcacttaactcatattgcacatgtagggctgcctaccaacattttatccaaaaatgttttattgccttagagggtttgggaagagtgtgtatttatagatccccaccccacagtgaacaaaaatagatagatagatagaataaaatgaatgccacagcagcagatggctcattctgaagggaaatacagaactatatctatctatctatctatcatcttttttatttaaaaatacattaaaaaaacaggtattagtacctagcatttagttagttattcaatatactggttacgtaaggcctttcaagaagtagattctcagtctgagaggacacaggccagggcttctcaaagtgctgctgcaggctttctggtctcgcttggcc

SEQ ID NO: 735097 - DNA, 3418 bp, Homo sapiens
tcccaagatggcgtccatcatggaagggccgctgagcaaatggactaacgtgatgaagggctggcagtaccgttggttcgtgctggactacaatgcaggactgctctcctactacacgtccaaggacaaaatgatgagaggctctcgcagaggatgtgttagactcagaggagctgtgattggtatagacgatgaggacgacagcaccttcacaataactgttgatcagaaaaccttccatttccaggcccgtgatgctgatgagcgagagaagtggatccatgccttagaagaaacaattcttcgacatactctccagcttcaaggtttggattcaggatttgttcctagtgtccaagattttgataagaaacttacagaagctgatgcttacctacaaatcttgattgaacaattaaagctttttgatgacaagcttcaaaactgcaaagaagatgaacagagaaagaaaattgaaactctcaaagagacaacaaatagcatggtagaatcaattaaacactgcattgtgttgctgcagattgccaaaagtactattaatcccgtagatgcaatatatcaacctagtcctttggaacctgtgatcagcacaatgccttcccagactgtgttacctccagaacctgttcagttgtgtaagtcagagcagcgtccatcttccctaccagttggacctgtgttggctaccttgggacatcatcagactcctacaccaaatagtacaggcagtggccattcaccaccgagtagcagtctcacttctccaagccacgtgaacttgtctccaaatacagtcccagagttctcttactccagcagtgaagatgaattttatgatgctgatgaattccatcaaagtggctcatccccaaagcgcttaatagattcttctggatctgcctcagtcctgacacacagcagctcgggaaatagtctaaaacgcccagataccacagaatcacttaattcttccttgtccaatggaacaagtgatgctgacctgtttgattcacatgatgacagagatgatgatgcggaggcagggtctgtggaggagcacaagagcgttatcatgcatctcttgtcgcaggttagacttggaatggatcttactaaggtagttcttccaacgtttattcttgaaagaagatctcttttagaaatgtatgcagacttttttgcacatccggacctgtttgtgagcattagtgaccagaaggatcccaaggatcgaatggttcaggttgtgaaatggtacctctcagcctttcatgcgggaaggaaaggatcagttgccaaaaagccatacaatcccattttgggcgagatttttcagtgtcattggacattaccaaatgatactgaagagaacacagaactagtttcagaaggaccagttccctgggtttccaaaaacagtgtaacatttgtggctgagcaggtttcccatcatccacccatttcagccttttatgctgagtgttttaacaagaagatacaattcaatgctcatatctggaccaaatcaaaattccttgggatgtcaattggggtgcacaacatagggcagggctgtgtctcatgtctagactatgatgaacattacattctcacattccccaatggctatggaaggtctatcctcacagtgccctgggtggaattaggaggagaatgcaatattaattgttccaaaacaggctatagtgcaaatatcatcttccacactaaacccttctatgggggcaagaagcacagaattactgccgagattttttctccaaatgacaagaagtctttttgctcaattgaaggggaatggaatggtgtgatgtatgcaaaatatgcaacaggggaaaatacagtctttgtagataccaagaagttgcctataatcaagaagaaagtgaggaagttggaagatcagaacgagtatgaatcccgcagcctttggaaggatgtcactttcaacttaaaaatcagagacattgatgcagcaactgaagcaaagcacaggcttgaagaaagacaaagagcagaagcccgagaaaggaaggagaaggaaattcagtgggagacaaggttatttcatgaagatggagaatgctgggtttatgatgaaccattactgaaacgtcttggtgctgccaagcattaggttggaagatgcaaagtttatacctgatgatcagggcagtaggcataattcagcaacaaacaatcttcctttgggagaaacctgttcattccaatcttctaattacagtggttcctatctcagggatactggactttctgacgcagatgaacaattaaggggaaaagcttcccttttccctctgtggcagttacgattttgacttcagtcctgagaaaaacttcaggttttgaaaatcagatgatgtcttctccttttccaaacaccacacgttgaaagcatttataaatccaagtctgaaactctgcgctctagtactgctgttaagatacacaacttgtttcttagttcatataatctcgggatacacacacacacacacatatatatacacacacatacgtatacacacacatacatatatataaatatacctgatgccagatttttttcataaatattctgcctactgtaaatatgggttcctctgagttgttttagaaaattagcgcaatgtattaaaatcaagtgttaggaaatttcatggtcttacctacaataacttttattttggaattgaactattattaaattgtatctaatcctggattacagtttaattaattattcttagtgcttaaggcttcataaagtaatttttccaacctttttttaaaaagagcatcttttattatcttttatggttaaacttggaagccaattatttggcaaccttgaatacaagagctagcttttcaaagaaagacacttgaaataatggaggatccattcttttcctctgtcagattgtatgttctgtctttagcccctgccaggcaattccccagaatcttcacttaactcatattgcacatgtagggctgcctaccaacattttatccaaaaatgttttattgccttagagggtttgggaagagtgtgtatttatagatccccaccccacagtgaacaaaaatagatagatagatagaataaaatgaatgccacagcagcagatggctcattctgaagggaaatacagaactatatctatctatctatctatcatcttttttatttaaaaatacattaaaaaaacaggtattagtacctagcatttagttagttattcaatatactggttacgtaaggcctttcaagaagtagattctcagtctgagaggacacaggccagggcttctcaaagtgctgctgcaggctttctggtctcgcttggcc

SEQ ID NO: 735098 - DNA, 18895 bp, Homo sapiens
gtaagggtctttacatggtttccagatagttcattagttgttgctttctttttttgtctgttttctgttttttttttttaaataactgtggtatgatgtaataggaacttataatttctgagttgcttatttttcctttacagttatagtaaagttatactcatttattttctcctgctttctgcagagtaaaatactgatttttgtctagaaacaagacagtgcaagacaatgttgaaagtgaaattctatgttaaaatatgccagatttattttaagaatttaatatctgtagtcagttatcaatacaaccaaattacataattatgcatgataataggtaaatactgagaagttcacctcattttcttgttaaaggatttggctattaccgtatgtgtcagttagtactcttttgtatggtagtgaaagaaaactcaacccaaactgattcatgaagaagaaagtaaatctggttagatgtggtttgaattaggtaattcatgtcatgaggactcagatctcccatctctatttctacgttccacttttgcattggcttcattttcggttaggttctcccttggtggtggtaaggtggttgtagcaatgtcagcctcccatttttggaaccgagtccataggaggctattctttctagaccttaataggagtaacacaattattgctcatcaccctagctttggccatgtgtcaaatcctgaccagtcacaatttcacagtcatagattctaccctggagctgggatgttactggcctcactagaaacacattgctgatagggtagaaggtgtgttcatcctacccaacccgacccgcaccaaagtcagaatagggaaaaacagatgttgggtgacatgcaactaacgtctgccgtactacactgaagatatttttctatgtttattctccagtgaaagagcttatatttgtggtacataggggattttgttttaatttagaaaatttaattgtagaaaacatgttttataaccctttctctgtactttgttctatatcaggaattgacttgattagataaggtgacatagggtatcttaggccctacaagatagtaaaccccccatcacttgaaagtattcagtagaggcttaaaaaacattattaaaggatgtggttattaggggactttaagaaatgaatatgaaattgaagtaggaaatctttaagctactctgtgagttatgccttttaaaagcaatttgtaattcctgtagatttcttttaaatttaggcagtttcataaatgactatagcatcattttagcaaatttgtgatcctgtaagaggaggataagtgttttttgtttgtttgtttgttttttgtttttttgagacagagtctcactttgtaccccagaaagtaaatctagttagatgtggtttgtctcggctcactgcaacctccaccccgtgcgttctagcaattctcctgcctcagccaccacacctggcctaagaggggaggataagtgttttagtgatcatattagactgaatgtggcagatgagatttcccgcccccccattgttggttagactgacattcaacattcaacaagagccacctgcccttgtaggcatttctgccactatacccctacataaacctagagtgctattgcttacttgctttccttcaaatacattttttcatttgtggcctccacattcttgtgtgtgatgtcctttctctgtgaaatgtcttctaccctttttttcaaagcctagtttagaactgacctcttctatgaaccctctgccgactggcctttccttccccagtcccccaagttcaaaatgatctctttcctttgaatactatagtatttgcacaattcactatctccttatcatattcttcttgtttatttgttatcagctgatgttgacatcataagttcaggttcctaactagatccaatattggaatttttcagcttttgctaagaagagagcttgtatgtctttgggaataatgggcagaaaaagataactttgagaagtcttagacttctaatagctttgatatttaaaagtacatgtaatacaagaggtttttttcctacatttaatgcatggagaagataggacatttagaaatatggaattaatgttcatttgactggcaaaagattattttctcagatgtagtgaagtgtggtaaagaacttcactctagagccagaatgtctgtgtttgtatcccagagcccaccacttacatttaaccattaacattcaacttactgtctctgagtttcagtggcctcatctataaaatgaggataataagagtacctacttcatagagttgttttagtggttaaataaactaacgtaaacttgctagaacttgataaactaatattggatgagaactggttgaaataatgcctggctatagtaaaaacttggtaaatgttagttgccattacaatgcaactactgttcctaccattccctctgccagtgcctggtattcagtagcactcagtaaatgttagttaaatgaagaaataactgaaggaatgaatgaacaaatggttgatgtagagattgcttttccattgttgtttattgaatattttgagatgtataacatactgtctgttaggcactgtgggatgggcactcacggagctgtcttccaaaggggtataggagaggagacgcagtgatctcagcaacctacctttaaaacatatcctagtatctactgccatgttaggttctcttcttttgctttttttaaaaaaaaattctcacaaaactccccccacccacttcagtttatagatgaggaagctcctactacataatagtgcttcccagtctaattcttgacctcattgtatttatatgtcctttttttttttgacagagtctcactcattgcagtggcacaatcacagctcactgcaacctctgcctcccctgctcaagtgatcctcccacctcaacctcctgagtagctgggactacaggcatgcaccaccacgcctggctaatttttgtatttttttgtagagatgcggttttgccatgttggccaggctggtctcgaactcctgggctcaagccatctgcccactttggcctctgagagtgctgagattataggcatgagccaccattcccagccatgttttcctttttcattgaactttatctactttagccattaaactccactccattggtcttgtcattactaagagctgaaccacctgcaaaatattaagttaaaaagcgttttctttgacaacagttttcttttcttcatcttcctctatcactttacttctgaacttttattctctcattttgatctgacccctacttctctgtttttcctggccatttagtactttcttgttttgctcatcccatttcccagtggagaccttctggtctgctgctttatcactggttttgttagaagacatacaaatggcaaggaggtatatgaaaaggtgcctaacatcattgatcatcagagaaatgcagaccaaaactacaatgagatatcatttcaccccagttaaaatggctttttttttttttttccaaaagacaggcaataacaaagtactggtgaggatgtggagtaaagggaacccacatacactattagtaggaatgtaaattagtacagccactgtggagaacagtttgaaggttcctcaaaaaactaaaaatagagctaccatataatccagcaatcccactgctaggtatatatccaaaagaaaggcaatcaatatacggaagagatacctgcacacccaggtttattgcagcactattcacaatagccaagatttggaagcaacccaggtgtccaacagatgaatggataaagaaaacatggtatataaacacaatggaatactattcagctgtgaaaaagaatgaaatcctgtcatttgcaatcctgtcttgaatagaactggaggtcatgatgttaagtgaaataagacaggcacaaacttcacatgttctcacttatttgtgggagctaaaaattaaaacaatcgaactcatggagctagagaatagaattatggttaccagaggctggaagggtggttgggcgtataagtgtagggggagtggggatggttaatgggtacaaaaaaatgagaacgaataagatctacttgataacacaacagggtgactatagtcaacagtaattatacatttaaaaataactagaagagtataattagattgtaacacaaaagataaatgcttgaggtgatggatacctatttaccctgatgtgattattacttatttcatgcctatatcaaaatatttatactccaaaaatatatatacctactatgtacccacaaaaatttaaaaatttatatattgtttttgctatcacctttagaatttcttgtcattggatagttcgtctgtataccattctggtcttcattccccagggcccccgttgtctgatttttctgcttctagaactgttagaggtcacaaaagcaagatggttgtatctatcacaatttttgtctgactttaactgggtatctgttacgatttagtagtcatcttactgacttcttgttggtttccaattgaatcctcacagtagactgttttcattgtaatcagtatcgaattatagcctgttcccttcttcataaatgaaggctttcttcttcaacagttcttagtgacttcacctgtactttatttctctgctttgaatatttcgaagaaaacatattcttgctctttcccaaggttaacactacatacattaccttgaccacaggatgttttcttgcagattgtgacctaattccatcacccttcagcagcccccaccgttttcatggattcagctaaaccttctgtaagatgactctttttccccctaatctttatatctcttttgatatgtagctttagtctcactttttttccttttggattttgccagttagatgtctccctggaattccacttcagcatggctaagactaagcttgtcttctctttcctccccaaagcaaattgtaattaggatagactgaaggtgacagaagataactaagatcttcttcatcctttcggctcttatggaagctgaattccagtagtcattctaaatttgttgtatgtcagcttatggtatcttttcatgtctttacattcagccaaagaggaagttccttgaaggggagaccagagggcgtgctgtgcttcttaatcctctctttcttaaccagtaagaggcattcagtagatatctgatgatactgattaatagaggggaacttttcagattcttttttttttttaaccctagtaagctttagtacaaactaaatgctgagagattatcaagtaagggattgatcatcacaagaagactcaggatgttacatcctgtaggttttatagtttcctatattgtaaaaaatatgagttatagcagcttgtctggatgtcatacaggtataaaaatcagttttataaacttgagtaaattggggcccattttagaaaaaactcttgcaggctgtgaatgccaatatataagtaaagtattaagtataatgttatttaatgtgggcaaacataaagccaggtgtaaattttttaggtttaaaatcttatagaactatacatccaaaagaaaatttcaagttaaacataatacaaagcaatacaatctaaattaacattaatttaatgtgatgaatgatattgccttgctaaaagtgggtcactacttacaatgtgcaaatggtactcatcgttagggtatagattcttttaaactatgacatacgtacactaccatgtggaacgtgatgatgtgttctctgttctaactactgggaagacttccttggcatagcacatgccatggggtcagttggctttgacttcatatagatatgccatttacttggtcagtgtcacttctatgacaagtagtatgttgtgccagtttgattataagtacaaatatgggcaatgaagtaacttggttttaaggttgttactaagctgagtaacagtgtgtggctatacaaatttttataggctatcaggaatgaaaacacaggagattgttgtagattcaagtattttagattcaagtttgaagatgctcatgcagatgtttaactgagttgtatagacctttatgtttctttctttttctctttttttttttttgagacagagtcttgctctgtcacccaagctggagtgcaatggtgtgatctcggcttactgcaacctccgcctcccaggttcaagcaattctcctgcctcagcctcccaagtagctgggattacagatgtgcaccacgacgcccagctgattttttgtattttagtagaggcggggtctcaccatgttgtcaagatggtctcaatctcctgaccttgtgatccacccacctctgcctcccaaagtgctgtgattacaggcgtgagccaccgcgcctgactgacctttatgtttcttaactttatgctatacatcagttgatatttcaaaaatttaaatggtttctatgattattctttgggctaagaaattgggcattaattgtcctcatatgtatggtttttgtggctacttcatgtagattttatttttggtggttatcaaattggaatttttttttttttttttttttttgagacggagtctcattctgtttcccaggttggagtacagtggtgcaatctcagctcactgcagcctcgacctcccaggctcaagcagtcctctcacctcagccttctaagtagctgggactacaggcacgcaccaccacacctggctagttttttgtgtttttagtagagatggggttttaccctgttggccaggctggtcttgaactcctggcctcaagtgatccacctgcctcagcctcccaaagtgctgggattagaggcatgagccaccacacctggctgaaattggaatttcattggtactgcctgtaattttatgttaatttttttttttttttgtcgtcactagcttttatctaaagcccctagagagaaaggccatgataccttgtatacaaggttataagagtatacaagggaaagggagggctgaagggaacagggtgggctggtacaagcctcattagaaataccattgagtctgtgagtaaaacatcattatatgaaaaggagatgtggttttagggtggtccaattacttttgcaccagcctaataaaattacaagtcattatcaatagagacattgtaaaacctttttttttcccaaaagaagtatcaggtatgataattacatgtctgcccaactttcgttatagattaacataacttaattgtatttaaggtacaatttaggagagttgctgaaaaatgaatctttagtattgggatgccttgattctaccctcaatagctataatggattatgtgtctgagtagattaataaaaatcttttgagcatttttcttgaactacttcactgaagattagctttttgagcatccattttaatttctcagtatataaggatcggtttatcacaactgtattgttttccctggccttgttagattatattttcatatcatgtagaaaaataggtgtattcgttctcccttgaagtcctttgtctcccaaaggaaatggttgcaatacagatgtgtcacctcttccacaggtaaagtggaatggagaagtagccagttaaatagtgcatgctcaatttggaacatttagagcatacaggaaagttatttatttggtaaatattttttaagcatttactatgtttcatgcattgtactagttgtagaggatataattgaatacaactacatgtagcccttgactttatggaactagtctagtataaagatttaagattgcctggcatggtggctcacgccactaatcccagcactttgagaggccaaggcaggattgcttgaggccagaagtttaagagtagcttggtcaacataatgagactccatctctaaaataaatagatagatagatagatagatagatagatagatagatagatagaagtagttagacaacacaaagcagtttcactcatcttgtggcaaggagttatgtatttctaatcaaatttggcaactcaagcattttcaacaaaatctacatgttttttcagaataaagtgaccaacacagaatgttacctgtaaaaatcagagcaataattgctatctaaaataattttgaaaattaagtggtactgaaaggctcatatagcaaaaatatggcctcctgtcattgtactttcctacttcccagactcaccattttcaacattttttagtagtttattttgccattttatagcatagtacctgacattttatttattcaacagacatttcttaagtacctaatacatgccattccttgtttgaagggatgctaaggatacagtggtgaacaaggcgttgtggggttgtatagagggtattcattcctaaccttgaaccaaatatttctttctgttggataatgcattaaaaattgcaaacagtttacaaacttttggagcaatggtggccttgatcataaagtagggactgcttctaccgtatacatgcttggtggtgtatttgtgatatctggctaaagtttctacatggaaattgactgactttagttttgagacttctgggaaccagtcaggcaaaatagtgaaactgtgtatcctgtttccaagagttgtcttttaaggttatctgcttcattcatttggcctgacttgctaggcaaatgcctagggtaaatatgatttgattaactataacaacaacagcaacaacaacaactttattttttagagcagtttgaggttcacagcaaaattgagcagaatgtacagagattttccctatacccgcttcccctacgcatgtgcggcctcccctactatcaacatcccccaccagagtggtttgttacaattaatgaacctacattgacacatcattatcactcaaggtccgtagtttacattagagtccactcttggtgttgtgtatgggtttggtcgattttataatgacatttatccaccattatagtgtcatacatagtaattttgctaccctaaaaatccagtgtgctccacctgttcctccttccctcctccctcatccctggcaaccactgaactttttaacatctccatagttttgccttttccagaatgtcatatcattggaatcacacagtatgcagccttttcaaatgggcttctttccgttagtaataggcatttaagtttcatcctcatcttttcatggcttgatagctcatttctttccctccctcttttcttccctgtcttccttccttcctcttctttcctgtttcctctttcttcttccttttttaagagacaaggtgtctcactctgttgcccaggctggagtgcagtggcccaatcatagctcattgcagccttgaattcctgggctcaagtgatcctcctgcgttagcctcctgagtagctgggatcacaggctccagtcattttagtgctgaataatatttcattatctggatgtaccgcctattcattcacctactgaagaatatcttggttgcttctaagttttggcaattatgagtgaagttactataaacattgtatacaagttttatgtggatgtatgttgtcatctcccttgggcagataccaaggagtgccattgttggatcatatggtaaatatatctttagttttgtacagaattctaggttggtatttttttctctctcagtcctttattttatttggagacagtctcgctatgtcgcccaggctgccatacagtggtgccatctgggctcactgaaacctccacctcccaggttcaagcgattcttgtgccttggcctcccaagtagctgggattacaggagtgcgccaccacgcctgctaatttttgtatttttagtagagacagggttttgccatgttgcccaggctggtctcaaactcctgaccttaagtgattcacccacctcaatctcccaaaatcctgggattacaggcctgagctactgtgcctgatctctctcagtactttaaagaaatatttcattccacttttcttttttttcttctttttgagatggagtctcactctgtcgcctgggctggagtgcagtggcgcgatctcagctcactgccacctccgcctcctgggttcaagtgattctcctgcctcagcctcctgaatagctgagattacaggcgcccaccaccatgcccagctaattttttgcatttttagtagagacgggggttccaccatgttggccaggctggtctcgaactcctgacctcgtgattcgcacatctcggcctcccaaattgctgggattacaggtgtgagctaccacgcctggcccactcttcttgcttacatagtttctgaggagatgtcagatgtaatttttatttttgctcttctgtaggcaagttgagttttttccccctctagcttctctcaggatttttttctttatctttgattttcagtagtttgaaaattatatgcctagctgtcagggttttttgcttgtttgtttttgttttctcaggtgtgactccagaaaggttctaaagaggagctttacaatctcttctctggggtttatggagacttcctttacccttctgtgttagccccttaaagcactgcgtcaaccttaaaagggcacaggaaagggtgtctatgccatttttatgccatttatcctgcttggtgttttctgagctttcttcatctgcggtttaatgtctcacattaatttgtagaaattctctgtcattgtttcaaatttttcttcagttcttttctctgtttcttcttctggtgttcccattatgcttttgtggttgtcgtacagttattggatattttgttccaggcttttttttttccagtctttttttccttttgcttctcggttttgtaggtgtctgttgagatactctcaagtgcagatattctttcctcagctttgtctagtttactaataagcccattaaaggcagtcttcatttctgttacagtctttttgatcagtagcatttcttttttattctttcttaaaatttctgtctttctgcttacattgcccatctgttcttgcatggtttctactttgtccattagagttcttaggatatttatcataattatttcaaatttctggtgtaacaattccaacatccctgcaacatccaagtctagtttcgatgcttactgtgtctcttccagctgtgttttttcctatttaatatgtcttataattttttcttgatagccatacatgatgcattaggtaacagaaactgctgtgagtggacctttagtaatgtggtggtaaggtgtgcatggaggggaaacattttcagtctgttagtgaacttttgtcaacttcacatgtgcttctcaagtccatcctgtaagtgggagagtagggctagagaggactgaagttgggtatatattaaatactttctcctacaaagaagcctagaggggacgcattaggggattttttttcccccagtattcactgtgatgacccttattgagctcctggaggtaaaactcacaaaactgtggttctcccccctgcccatattactacatgtccctggagtttatatctttcagacttgtctgcactgagcttccaccaatttgtcaaatacagatcaggtttccctaccacccgtgcagttgaaaacccacatacaacttttgactcctccagagcttaactactcatagcctgctattgactggaagccttgccaataacataaacagttgattaatacatattttatatgttttctgtattatatattgtattcttacaataaagagaaaagaagatgttattaagaaaatcataaggaagataaaatatatttactgttcattaagtggttcccatgggtgctggttcccatggaggttgccccttgtgagtttttgctcagggaagttgtgattctctatatttgcctgttggtctcctaatttgggagtcatcagttttccctgtgacctcacttctcttacagagttaagaacagttgttggtttttcagtttgttcagtgttttacatgttgttagaacacagtggtacttctaagtttcttaacatgctagatcagaaacctgaagtctcacctaatttggctttttatattttttcttcttttttttcttccattgctaccaaagcatttttcatctgtgtctggggtgacattagagcagaatgtgatttctaggtaaacattattgggctccctagcagaaaaatttttgaaagtagtacatgaattctgtataattaaaattttcttttcatcttaataggtataggtaataggcacggcctattttttttttgctcaacagtctaaaatagtaatttaatcacctaatagccttagttatatagttgaaagaagagttggaaatctgattcatgggttggaaatcacctgtcacatatgagttttaggcactggtcactttattttgaaacagctttggggttttttcctttttcaactcataataggctttaacagcttttagttttgtttctgtttttttaacagcatgagttgccaaatttggttatagcttcttggtacaagatgggtaaatttgctttgtgttgtgtaattactttttattttaaatgctacctcttttatgaacactaactttacactaagattaggaaaatgagaattgcatgtctgcaacaaatagctatctgtagtattaaattgtgaaaatgtagactttggattggagctggcatctcttaatatgtaattgtaacatagagtaaataagtattttgtcccttgtagggtcaaacagtacagtgcatgggcagaattagagatgtaggcttttttttttttttttttttttactggcttagagaaccgtttgatcagctaatatggaattaagtccctagggctgcccaggcacaacattaactgctattaaaggaaaatttaaaagagtattagtgaaggttaaatactgaccatggacatctggcaaaattgatgttttttttcccctccaccattgtttatagtttattgttatttatcagagaattaatgtttattttcagaatctattaccataagaaatctgtttgaggacttcgtatgtgccaggaattctactaaataatgatataatgctgaacagaattagataggatcctcacttcgttaagcttacagtctagtggtatagatcaacattaatcaaagaataacacaaatagaaagcagagcagtggttcatgggattgactgtagagaagcatgagggaagttcccaggtgatggaaaatactttatttcttaatcgtggtggttacatgtgtgcatatgtttatgaaaatatattgtacatttaaagtggatacattttatcacatgtaaattatgactctataaagttaattaaaaagaataactcaggtaaggtggtgtgtgcgcctgtagtcccagctatttctgaggcaggaagatcacttgagcccaggagtttgagttcagcatgggcaacatgagacctgtgagactttgtctctaaaaaaatttaaataaataactaagataaatgtaaaattacagctgtagtaagttctacaaaggagagttacatgggctatgacgatgtaagatagcaagaactgacattggcagggaggaaatgatgatgagtagaagtaaataagtgaagtgtggggattgatgtcaaggggacagtataaaagaaataacagcatgcgccaaggccctaaaattggaaagtccttggcaaattaaaggagtttgaaaaaggccattgtgtgcaaagcagaaaataggtactacaaggtaaaagatggagctaagcggtaggtaaggctaaaccttgtcagccattgttaaatattgaattgtatcctaagcacaactcagtggaaagcagttaaagttctttaattgggggaggcaatgaaggggtaataaaattggttatagaaatactgctctggctctagtgttgagaatgaattggagtagccagagtagattcaagaagactttagtaagattattccaacaggccaggacctgttatagggtggtggcaatggagagagatggacagaatggagagtgtatttaggaggtaaaaatgacagaacttggtgatgcactgaatgtgaaatggggaaggtgtctaggaggactactaggtttatggtttgcgtattagggtggatgatagcagtttcatttactgagacagggagccctggcagagtacccagcttttagagtgggtagggggaaggggagagtgcatctggtgttgggcattttgaagtgatttacatacaacaaactgaaggtatctttaacactgagtccagcaggttagcatatttattcagcaagcattgcacctttttttgttgtttttggggtcttcaactcctggcctcgaatcctccctccttcccccgcctctcccagcctccgcctcccaaagtgctgggatttcaggagtgagccaccgcgcctggccagcatcgcgctgtttgtgcagtgtgccctgtgctaggtcttgcagtgggtaccagtagagacataaaagtacaaaagataattggacgtttagtagagtcctgaaagggggcgggataggaagatacctaaccataagaaaaaccagcaagagcggaaaaggagctagtcctccagatcaataagttaatcacttatgtttgtgattccctgcattttgggtgattctctgtcgaggtcctcttaagtccagacttttgatataatctgcagtttgcgccatttggattcctgaagcatctttacaagccacctacattccttatggagctgtggcacaacagcaagcccacgatgtctcaccggattaataaaaatataggcgctcacgcttttgtttaccgatatagtatctcctcctcccctcactccatcaacccccacgcgacacaactttccggaagtaagcaaaatccgttatcaaggtgaaactccggggaccaggctccacagctgccataaactggatggcacgttagaagccggtgggtgtaggtgaggcacgctggcgcccgcgggcccttctccagccgctacccagtgggaatccgcggggctgaagccccgaaaccaggctgagcgtcccagagcgcaacctccctttcccccagcagcgccggcgccgcagaagccgcgtgtccccaggcgcactcccccaaggtgaacccccgccccccacggaggcggctgggtcgcgggtctgggcggggcgctccggacgccctcccgccgctgcgcacccctcccgcgagctgccagctccctcggcctctccacccaaaactggcccaaccgccaatcgtctgcctctcacctcctacagcaggtgacccatggccaatcgccaggggtctctttgccaggagccgccagggccagccaatcggggcgacccctccgccggggaggggacgggaaaggggtggggggtgaagggggtgaagggggtgtcccgggggacgggctgaacctcagtcaggaccgcctgcaccgcagtccggggatcgggtcgaggggagaagaaaaaggggtgctcgggagcagcccccggctacctcccctggaggcacagagggcgggggccttggcgaatggctttcttgctggccacttgcggagtgagtagaccccgagggtctgggagaggggccggcccctacccctgagtccccggggtcccggccgccaggccggagcgcgaatgtcgtgctcaccctgcctccttcccgccgccccctgggggtttggattcaggatttgttcctagtgtccaagattttgataagaaacttacagaagctgatgcttacctacaaatcttgattgaacaattaaagctttttgatgacaagcttcaaaactgcaaagaagatgaacagagaaagaaaattgaaactctcaaagagacaacaaatagcatggtagaatcaattaaacactgcattgtgttgctgcagattgccaaagaccagagtaatgcggagaagcacgcagatggaatgataagtactattaatcccgtagatgcaatatatcaacctagtcctttggaacctgtgatcagcacaatgccttcccagactgtgttacctccagaacctgttcagttgtgtaagtcagagcagcgtccatcttccctaccagttggacctgtgttggctaccttgggacatcatcagactcctacaccaaatagtacaggcagtggccattcaccaccgagtagcagtctcacttctccaagccacgtgaacttgtctccaaatacagtcccagagttctcttactccagcagtgaagatgaattttatgatgctgatgaattccatcaaagtggctcatccccaaagcgcttaatagattcttctggatctgcctcagtcctgacacacagcagctcgggaaatagtctaaaacgcccagataccacagaatcacttaattcttccttgtccaatggaacaagtgatgctgacctgtttgattcacatgatgacagagatgatgatgcggaggcagggtctgtggaggagcacaagagcgttatcatgcatctcttgtcgcaggttagacttggaatggatcttactaaggtagttcttccaacgtttattcttgaaagaagatctcttttagaaatgtatgcagacttttttgcacatccggacctgtttgtgagcattagtgaccagaaggatcccaaggatcgaatggttcaggttgtgaaatggtacctctcagcctttcatgcgggaaggaaaggatcagttgccaaaaagccatacaatcccattttgggcgagatttttcagtgtcattggacattaccaaatgatactgaagagaacacagaactagtttcagaaggaccagttccctgggtttccaaaaacagtgtaacatttgtggctgagcaggtttcccatcatccacccatttcagccttttatgctgagtgttttaacaagaagatacaattcaatgctcatatctggaccaaatcaaaattccttgggatgtcaattggggtgcacaacatagggcagggctgtgtctcatgtctagactatgatgaacattacattctcacattccccaatggctatggaaggcaagtgtgtccatttcctctgatcagcagtagactctgctgttccttgagacatgccccttccccctcttcctcttaactgtcaaccttacctaaaaacttttgattttgcaggtctatcctcacagtgccctgggtggaattaggaggagaatgcaatattaattgttccaaaacaggctatagtgcaaatatcatcttccacactaaacccttctatgggggcaagaagcacagaattactgccgagattttgtaggtattttttctgccttagagctcttatgcttttctgaaataactgccttttgtcttgaactacagcttctggattaggagtgtgaaagaatggttctgtctttgtaagcgtgtttcacattttatgtgtcatgtcttttgctgaagtcccatatcagaagaagacctaaaacatatattcagagcagtcagaggtcattgataggtttccttcctaaaaacctgacttgcaatgttgaactaaaagaggccttcctaggttgcctagctaaaccagattatggatccctaatttattcttgccagattgaatgatgagctggtccttacagcagactttgtgacccctgcagcactgcctcctggtcctcacagctatccctttttctgtgcctttgctggggaaaaacagtaaccatcacattttgcacgcatctggcttgcttccacttgacactcttgggtcacgtgcagatgactgtgccagtcagtggaaagtctatagtgatggcaccatgactctctctgcctctggaacccttaactgggggggaaggggacagtgggaaagaaagtttcaggcgttgatagcagctctcctccctctgccctggtcatgtctcccttttctggcctctttcaatcctgtttatgccttgcccttcctaaccaggcctttgctgtgttgcttatcttctcacattccatagttgtgtgtccaagtagaggtctgttacggcttttgcagaatggatccttgctcagggaaagtattcacaccatctggcacagaggtccctttcaacctgaggatgaaagcctgcattatattcttaagcaaagccttccctgacccccagtgcccatgtaagctcaccacagcacttaccacctagaatttcaatggtggttacgtctctctccactacgctgtgaacagcttgaggatagggaatttgccaactctgttatggtccttgcacccagaataggacgttcttgcccaaacccaccattcttgggatctcaagttcataagcgtcctgttgaaggccctcattcttatagttagccctggggagtccagttctgttaagatgctttcatcaaaaacttcacagttgctcttctgtgctctactctgtagttgggccacactgagcagattctttggtagaattttcaacttgagactaacacaagtatttccttttctgttcag

SEQ ID NO: 735099 - DNA, 19291 bp, Homo sapiens
gtaagggtctttacatggtttccagatagttcattagttgttgctttctttttttgtctgttttctgttttttttttttaaataactgtggtatgatgtaataggaacttataatttctgagttgcttatttttcctttacagttatagtaaagttatactcatttattttctcctgctttctgcagagtaaaatactgatttttgtctagaaacaagacagtgcaagacaatgttgaaagtgaaattctatgttaaaatatgccagatttattttaagaatttaatatctgtagtcagttatcaatacaaccaaattacataattatgcatgataataggtaaatactgagaagttcacctcattttcttgttaaaggatttggctattaccgtatgtgtcagttagtactcttttgtatggtagtgaaagaaaactcaacccaaactgattcatgaagaagaaagtaaatctggttagatgtggtttgaattaggtaattcatgtcatgaggactcagatctcccatctctatttctacgttccacttttgcattggcttcattttcggttaggttctcccttggtggtggtaaggtggttgtagcaatgtcagcctcccatttttggaaccgagtccataggaggctattctttctagaccttaataggagtaacacaattattgctcatcaccctagctttggccatgtgtcaaatcctgaccagtcacaatttcacagtcatagattctaccctggagctgggatgttactggcctcactagaaacacattgctgatagggtagaaggtgtgttcatcctacccaacccgacccgcaccaaagtcagaatagggaaaaacagatgttgggtgacatgcaactaacgtctgccgtactacactgaagatatttttctatgtttattctccagtgaaagagcttatatttgtggtacataggggattttgttttaatttagaaaatttaattgtagaaaacatgttttataaccctttctctgtactttgttctatatcaggaattgacttgattagataaggtgacatagggtatcttaggccctacaagatagtaaaccccccatcacttgaaagtattcagtagaggcttaaaaaacattattaaaggatgtggttattaggggactttaagaaatgaatatgaaattgaagtaggaaatctttaagctactctgtgagttatgccttttaaaagcaatttgtaattcctgtagatttcttttaaatttaggcagtttcataaatgactatagcatcattttagcaaatttgtgatcctgtaagaggaggataagtgttttttgtttgtttgtttgttttttgtttttttgagacagagtctcactttgtaccccagaaagtaaatctagttagatgtggtttgtctcggctcactgcaacctccaccccgtgcgttctagcaattctcctgcctcagccaccacacctggcctaagaggggaggataagtgttttagtgatcatattagactgaatgtggcagatgagatttcccgcccccccattgttggttagactgacattcaacattcaacaagagccacctgcccttgtaggcatttctgccactatacccctacataaacctagagtgctattgcttacttgctttccttcaaatacattttttcatttgtggcctccacattcttgtgtgtgatgtcctttctctgtgaaatgtcttctaccctttttttcaaagcctagtttagaactgacctcttctatgaaccctctgccgactggcctttccttccccagtcccccaagttcaaaatgatctctttcctttgaatactatagtatttgcacaattcactatctccttatcatattcttcttgtttatttgttatcagctgatgttgacatcataagttcaggttcctaactagatccaatattggaatttttcagcttttgctaagaagagagcttgtatgtctttgggaataatgggcagaaaaagataactttgagaagtcttagacttctaatagctttgatatttaaaagtacatgtaatacaagaggtttttttcctacatttaatgcatggagaagataggacatttagaaatatggaattaatgttcatttgactggcaaaagattattttctcagatgtagtgaagtgtggtaaagaacttcactctagagccagaatgtctgtgtttgtatcccagagcccaccacttacatttaaccattaacattcaacttactgtctctgagtttcagtggcctcatctataaaatgaggataataagagtacctacttcatagagttgttttagtggttaaataaactaacgtaaacttgctagaacttgataaactaatattggatgagaactggttgaaataatgcctggctatagtaaaaacttggtaaatgttagttgccattacaatgcaactactgttcctaccattccctctgccagtgcctggtattcagtagcactcagtaaatgttagttaaatgaagaaataactgaaggaatgaatgaacaaatggttgatgtagagattgcttttccattgttgtttattgaatattttgagatgtataacatactgtctgttaggcactgtgggatgggcactcacggagctgtcttccaaaggggtataggagaggagacgcagtgatctcagcaacctacctttaaaacatatcctagtatctactgccatgttaggttctcttcttttgctttttttaaaaaaaaattctcacaaaactccccccacccacttcagtttatagatgaggaagctcctactacataatagtgcttcccagtctaattcttgacctcattgtatttatatgtcctttttttttttgacagagtctcactcattgcagtggcacaatcacagctcactgcaacctctgcctcccctgctcaagtgatcctcccacctcaacctcctgagtagctgggactacaggcatgcaccaccacgcctggctaatttttgtatttttttgtagagatgcggttttgccatgttggccaggctggtctcgaactcctgggctcaagccatctgcccactttggcctctgagagtgctgagattataggcatgagccaccattcccagccatgttttcctttttcattgaactttatctactttagccattaaactccactccattggtcttgtcattactaagagctgaaccacctgcaaaatattaagttaaaaagcgttttctttgacaacagttttcttttcttcatcttcctctatcactttacttctgaacttttattctctcattttgatctgacccctacttctctgtttttcctggccatttagtactttcttgttttgctcatcccatttcccagtggagaccttctggtctgctgctttatcactggttttgttagaagacatacaaatggcaaggaggtatatgaaaaggtgcctaacatcattgatcatcagagaaatgcagaccaaaactacaatgagatatcatttcaccccagttaaaatggctttttttttttttttccaaaagacaggcaataacaaagtactggtgaggatgtggagtaaagggaacccacatacactattagtaggaatgtaaattagtacagccactgtggagaacagtttgaaggttcctcaaaaaactaaaaatagagctaccatataatccagcaatcccactgctaggtatatatccaaaagaaaggcaatcaatatacggaagagatacctgcacacccaggtttattgcagcactattcacaatagccaagatttggaagcaacccaggtgtccaacagatgaatggataaagaaaacatggtatataaacacaatggaatactattcagctgtgaaaaagaatgaaatcctgtcatttgcaatcctgtcttgaatagaactggaggtcatgatgttaagtgaaataagacaggcacaaacttcacatgttctcacttatttgtgggagctaaaaattaaaacaatcgaactcatggagctagagaatagaattatggttaccagaggctggaagggtggttgggcgtataagtgtagggggagtggggatggttaatgggtacaaaaaaatgagaacgaataagatctacttgataacacaacagggtgactatagtcaacagtaattatacatttaaaaataactagaagagtataattagattgtaacacaaaagataaatgcttgaggtgatggatacctatttaccctgatgtgattattacttatttcatgcctatatcaaaatatttatactccaaaaatatatatacctactatgtacccacaaaaatttaaaaatttatatattgtttttgctatcacctttagaatttcttgtcattggatagttcgtctgtataccattctggtcttcattccccagggcccccgttgtctgatttttctgcttctagaactgttagaggtcacaaaagcaagatggttgtatctatcacaatttttgtctgactttaactgggtatctgttacgatttagtagtcatcttactgacttcttgttggtttccaattgaatcctcacagtagactgttttcattgtaatcagtatcgaattatagcctgttcccttcttcataaatgaaggctttcttcttcaacagttcttagtgacttcacctgtactttatttctctgctttgaatatttcgaagaaaacatattcttgctctttcccaaggttaacactacatacattaccttgaccacaggatgttttcttgcagattgtgacctaattccatcacccttcagcagcccccaccgttttcatggattcagctaaaccttctgtaagatgactctttttccccctaatctttatatctcttttgatatgtagctttagtctcactttttttccttttggattttgccagttagatgtctccctggaattccacttcagcatggctaagactaagcttgtcttctctttcctccccaaagcaaattgtaattaggatagactgaaggtgacagaagataactaagatcttcttcatcctttcggctcttatggaagctgaattccagtagtcattctaaatttgttgtatgtcagcttatggtatcttttcatgtctttacattcagccaaagaggaagttccttgaaggggagaccagagggcgtgctgtgcttcttaatcctctctttcttaaccagtaagaggcattcagtagatatctgatgatactgattaatagaggggaacttttcagattcttttttttttttaaccctagtaagctttagtacaaactaaatgctgagagattatcaagtaagggattgatcatcacaagaagactcaggatgttacatcctgtaggttttatagtttcctatattgtaaaaaatatgagttatagcagcttgtctggatgtcatacaggtataaaaatcagttttataaacttgagtaaattggggcccattttagaaaaaactcttgcaggctgtgaatgccaatatataagtaaagtattaagtataatgttatttaatgtgggcaaacataaagccaggtgtaaattttttaggtttaaaatcttatagaactatacatccaaaagaaaatttcaagttaaacataatacaaagcaatacaatctaaattaacattaatttaatgtgatgaatgatattgccttgctaaaagtgggtcactacttacaatgtgcaaatggtactcatcgttagggtatagattcttttaaactatgacatacgtacactaccatgtggaacgtgatgatgtgttctctgttctaactactgggaagacttccttggcatagcacatgccatggggtcagttggctttgacttcatatagatatgccatttacttggtcagtgtcacttctatgacaagtagtatgttgtgccagtttgattataagtacaaatatgggcaatgaagtaacttggttttaaggttgttactaagctgagtaacagtgtgtggctatacaaatttttataggctatcaggaatgaaaacacaggagattgttgtagattcaagtattttagattcaagtttgaagatgctcatgcagatgtttaactgagttgtatagacctttatgtttctttctttttctctttttttttttttgagacagagtcttgctctgtcacccaagctggagtgcaatggtgtgatctcggcttactgcaacctccgcctcccaggttcaagcaattctcctgcctcagcctcccaagtagctgggattacagatgtgcaccacgacgcccagctgattttttgtattttagtagaggcggggtctcaccatgttgtcaagatggtctcaatctcctgaccttgtgatccacccacctctgcctcccaaagtgctgtgattacaggcgtgagccaccgcgcctgactgacctttatgtttcttaactttatgctatacatcagttgatatttcaaaaatttaaatggtttctatgattattctttgggctaagaaattgggcattaattgtcctcatatgtatggtttttgtggctacttcatgtagattttatttttggtggttatcaaattggaatttttttttttttttttttttttgagacggagtctcattctgtttcccaggttggagtacagtggtgcaatctcagctcactgcagcctcgacctcccaggctcaagcagtcctctcacctcagccttctaagtagctgggactacaggcacgcaccaccacacctggctagttttttgtgtttttagtagagatggggttttaccctgttggccaggctggtcttgaactcctggcctcaagtgatccacctgcctcagcctcccaaagtgctgggattagaggcatgagccaccacacctggctgaaattggaatttcattggtactgcctgtaattttatgttaatttttttttttttttgtcgtcactagcttttatctaaagcccctagagagaaaggccatgataccttgtatacaaggttataagagtatacaagggaaagggagggctgaagggaacagggtgggctggtacaagcctcattagaaataccattgagtctgtgagtaaaacatcattatatgaaaaggagatgtggttttagggtggtccaattacttttgcaccagcctaataaaattacaagtcattatcaatagagacattgtaaaacctttttttttcccaaaagaagtatcaggtatgataattacatgtctgcccaactttcgttatagattaacataacttaattgtatttaaggtacaatttaggagagttgctgaaaaatgaatctttagtattgggatgccttgattctaccctcaatagctataatggattatgtgtctgagtagattaataaaaatcttttgagcatttttcttgaactacttcactgaagattagctttttgagcatccattttaatttctcagtatataaggatcggtttatcacaactgtattgttttccctggccttgttagattatattttcatatcatgtagaaaaataggtgtattcgttctcccttgaagtcctttgtctcccaaaggaaatggttgcaatacagatgtgtcacctcttccacaggtaaagtggaatggagaagtagccagttaaatagtgcatgctcaatttggaacatttagagcatacaggaaagttatttatttggtaaatattttttaagcatttactatgtttcatgcattgtactagttgtagaggatataattgaatacaactacatgtagcccttgactttatggaactagtctagtataaagatttaagattgcctggcatggtggctcacgccactaatcccagcactttgagaggccaaggcaggattgcttgaggccagaagtttaagagtagcttggtcaacataatgagactccatctctaaaataaatagatagatagatagatagatagatagatagatagatagatagaagtagttagacaacacaaagcagtttcactcatcttgtggcaaggagttatgtatttctaatcaaatttggcaactcaagcattttcaacaaaatctacatgttttttcagaataaagtgaccaacacagaatgttacctgtaaaaatcagagcaataattgctatctaaaataattttgaaaattaagtggtactgaaaggctcatatagcaaaaatatggcctcctgtcattgtactttcctacttcccagactcaccattttcaacattttttagtagtttattttgccattttatagcatagtacctgacattttatttattcaacagacatttcttaagtacctaatacatgccattccttgtttgaagggatgctaaggatacagtggtgaacaaggcgttgtggggttgtatagagggtattcattcctaaccttgaaccaaatatttctttctgttggataatgcattaaaaattgcaaacagtttacaaacttttggagcaatggtggccttgatcataaagtagggactgcttctaccgtatacatgcttggtggtgtatttgtgatatctggctaaagtttctacatggaaattgactgactttagttttgagacttctgggaaccagtcaggcaaaatagtgaaactgtgtatcctgtttccaagagttgtcttttaaggttatctgcttcattcatttggcctgacttgctaggcaaatgcctagggtaaatatgatttgattaactataacaacaacagcaacaacaacaactttattttttagagcagtttgaggttcacagcaaaattgagcagaatgtacagagattttccctatacccgcttcccctacgcatgtgcggcctcccctactatcaacatcccccaccagagtggtttgttacaattaatgaacctacattgacacatcattatcactcaaggtccgtagtttacattagagtccactcttggtgttgtgtatgggtttggtcgattttataatgacatttatccaccattatagtgtcatacatagtaattttgctaccctaaaaatccagtgtgctccacctgttcctccttccctcctccctcatccctggcaaccactgaactttttaacatctccatagttttgccttttccagaatgtcatatcattggaatcacacagtatgcagccttttcaaatgggcttctttccgttagtaataggcatttaagtttcatcctcatcttttcatggcttgatagctcatttctttccctccctcttttcttccctgtcttccttccttcctcttctttcctgtttcctctttcttcttccttttttaagagacaaggtgtctcactctgttgcccaggctggagtgcagtggcccaatcatagctcattgcagccttgaattcctgggctcaagtgatcctcctgcgttagcctcctgagtagctgggatcacaggctccagtcattttagtgctgaataatatttcattatctggatgtaccgcctattcattcacctactgaagaatatcttggttgcttctaagttttggcaattatgagtgaagttactataaacattgtatacaagttttatgtggatgtatgttgtcatctcccttgggcagataccaaggagtgccattgttggatcatatggtaaatatatctttagttttgtacagaattctaggttggtatttttttctctctcagtcctttattttatttggagacagtctcgctatgtcgcccaggctgccatacagtggtgccatctgggctcactgaaacctccacctcccaggttcaagcgattcttgtgccttggcctcccaagtagctgggattacaggagtgcgccaccacgcctgctaatttttgtatttttagtagagacagggttttgccatgttgcccaggctggtctcaaactcctgaccttaagtgattcacccacctcaatctcccaaaatcctgggattacaggcctgagctactgtgcctgatctctctcagtactttaaagaaatatttcattccacttttcttttttttcttctttttgagatggagtctcactctgtcgcctgggctggagtgcagtggcgcgatctcagctcactgccacctccgcctcctgggttcaagtgattctcctgcctcagcctcctgaatagctgagattacaggcgcccaccaccatgcccagctaattttttgcatttttagtagagacgggggttccaccatgttggccaggctggtctcgaactcctgacctcgtgattcgcacatctcggcctcccaaattgctgggattacaggtgtgagctaccacgcctggcccactcttcttgcttacatagtttctgaggagatgtcagatgtaatttttatttttgctcttctgtaggcaagttgagttttttccccctctagcttctctcaggatttttttctttatctttgattttcagtagtttgaaaattatatgcctagctgtcagggttttttgcttgtttgtttttgttttctcaggtgtgactccagaaaggttctaaagaggagctttacaatctcttctctggggtttatggagacttcctttacccttctgtgttagccccttaaagcactgcgtcaaccttaaaagggcacaggaaagggtgtctatgccatttttatgccatttatcctgcttggtgttttctgagctttcttcatctgcggtttaatgtctcacattaatttgtagaaattctctgtcattgtttcaaatttttcttcagttcttttctctgtttcttcttctggtgttcccattatgcttttgtggttgtcgtacagttattggatattttgttccaggcttttttttttccagtctttttttccttttgcttctcggttttgtaggtgtctgttgagatactctcaagtgcagatattctttcctcagctttgtctagtttactaataagcccattaaaggcagtcttcatttctgttacagtctttttgatcagtagcatttcttttttattctttcttaaaatttctgtctttctgcttacattgcccatctgttcttgcatggtttctactttgtccattagagttcttaggatatttatcataattatttcaaatttctggtgtaacaattccaacatccctgcaacatccaagtctagtttcgatgcttactgtgtctcttccagctgtgttttttcctatttaatatgtcttataattttttcttgatagccatacatgatgcattaggtaacagaaactgctgtgagtggacctttagtaatgtggtggtaaggtgtgcatggaggggaaacattttcagtctgttagtgaacttttgtcaacttcacatgtgcttctcaagtccatcctgtaagtgggagagtagggctagagaggactgaagttgggtatatattaaatactttctcctacaaagaagcctagaggggacgcattaggggattttttttcccccagtattcactgtgatgacccttattgagctcctggaggtaaaactcacaaaactgtggttctcccccctgcccatattactacatgtccctggagtttatatctttcagacttgtctgcactgagcttccaccaatttgtcaaatacagatcaggtttccctaccacccgtgcagttgaaaacccacatacaacttttgactcctccagagcttaactactcatagcctgctattgactggaagccttgccaataacataaacagttgattaatacatattttatatgttttctgtattatatattgtattcttacaataaagagaaaagaagatgttattaagaaaatcataaggaagataaaatatatttactgttcattaagtggttcccatgggtgctggttcccatggaggttgccccttgtgagtttttgctcagggaagttgtgattctctatatttgcctgttggtctcctaatttgggagtcatcagttttccctgtgacctcacttctcttacagagttaagaacagttgttggtttttcagtttgttcagtgttttacatgttgttagaacacagtggtacttctaagtttcttaacatgctagatcagaaacctgaagtctcacctaatttggctttttatattttttcttcttttttttcttccattgctaccaaagcatttttcatctgtgtctggggtgacattagagcagaatgtgatttctaggtaaacattattgggctccctagcagaaaaatttttgaaagtagtacatgaattctgtataattaaaattttcttttcatcttaataggtataggtaataggcacggcctattttttttttgctcaacagtctaaaatagtaatttaatcacctaatagccttagttatatagttgaaagaagagttggaaatctgattcatgggttggaaatcacctgtcacatatgagttttaggcactggtcactttattttgaaacagctttggggttttttcctttttcaactcataataggctttaacagcttttagttttgtttctgtttttttaacagcatgagttgccaaatttggttatagcttcttggtacaagatgggtaaatttgctttgtgttgtgtaattactttttattttaaatgctacctcttttatgaacactaactttacactaagattaggaaaatgagaattgcatgtctgcaacaaatagctatctgtagtattaaattgtgaaaatgtagactttggattggagctggcatctcttaatatgtaattgtaacatagagtaaataagtattttgtcccttgtagggtcaaacagtacagtgcatgggcagaattagagatgtaggcttttttttttttttttttttttactggcttagagaaccgtttgatcagctaatatggaattaagtccctagggctgcccaggcacaacattaactgctattaaaggaaaatttaaaagagtattagtgaaggttaaatactgaccatggacatctggcaaaattgatgttttttttcccctccaccattgtttatagtttattgttatttatcagagaattaatgtttattttcagaatctattaccataagaaatctgtttgaggacttcgtatgtgccaggaattctactaaataatgatataatgctgaacagaattagataggatcctcacttcgttaagcttacagtctagtggtatagatcaacattaatcaaagaataacacaaatagaaagcagagcagtggttcatgggattgactgtagagaagcatgagggaagttcccaggtgatggaaaatactttatttcttaatcgtggtggttacatgtgtgcatatgtttatgaaaatatattgtacatttaaagtggatacattttatcacatgtaaattatgactctataaagttaattaaaaagaataactcaggtaaggtggtgtgtgcgcctgtagtcccagctatttctgaggcaggaagatcacttgagcccaggagtttgagttcagcatgggcaacatgagacctgtgagactttgtctctaaaaaaatttaaataaataactaagataaatgtaaaattacagctgtagtaagttctacaaaggagagttacatgggctatgacgatgtaagatagcaagaactgacattggcagggaggaaatgatgatgagtagaagtaaataagtgaagtgtggggattgatgtcaaggggacagtataaaagaaataacagcatgcgccaaggccctaaaattggaaagtccttggcaaattaaaggagtttgaaaaaggccattgtgtgcaaagcagaaaataggtactacaaggtaaaagatggagctaagcggtaggtaaggctaaaccttgtcagccattgttaaatattgaattgtatcctaagcacaactcagtggaaagcagttaaagttctttaattgggggaggcaatgaaggggtaataaaattggttatagaaatactgctctggctctagtgttgagaatgaattggagtagccagagtagattcaagaagactttagtaagattattccaacaggccaggacctgttatagggtggtggcaatggagagagatggacagaatggagagtgtatttaggaggtaaaaatgacagaacttggtgatgcactgaatgtgaaatggggaaggtgtctaggaggactactaggtttatggtttgcgtattagggtggatgatagcagtttcatttactgagacagggagccctggcagagtacccagcttttagagtgggtagggggaaggggagagtgcatctggtgttgggcattttgaagtgatttacatacaacaaactgaaggtatctttaacactgagtccagcaggttagcatatttattcagcaagcattgcacctttttttgttgtttttggggtcttcaactcctggcctcgaatcctccctccttcccccgcctctcccagcctccgcctcccaaagtgctgggatttcaggagtgagccaccgcgcctggccagcatcgcgctgtttgtgcagtgtgccctgtgctaggtcttgcagtgggtaccagtagagacataaaagtacaaaagataattggacgtttagtagagtcctgaaagggggcgggataggaagatacctaaccataagaaaaaccagcaagagcggaaaaggagctagtcctccagatcaataagttaatcacttatgtttgtgattccctgcattttgggtgattctctgtcgaggtcctcttaagtccagacttttgatataatctgcagtttgcgccatttggattcctgaagcatctttacaagccacctacattccttatggagctgtggcacaacagcaagcccacgatgtctcaccggattaataaaaatataggcgctcacgcttttgtttaccgatatagtatctcctcctcccctcactccatcaacccccacgcgacacaactttccggaagtaagcaaaatccgttatcaaggtgaaactccggggaccaggctccacagctgccataaactggatggcacgttagaagccggtgggtgtaggtgaggcacgctggcgcccgcgggcccttctccagccgctacccagtgggaatccgcggggctgaagccccgaaaccaggctgagcgtcccagagcgcaacctccctttcccccagcagcgccggcgccgcagaagccgcgtgtccccaggcgcactcccccaaggtgaacccccgccccccacggaggcggctgggtcgcgggtctgggcggggcgctccggacgccctcccgccgctgcgcacccctcccgcgagctgccagctccctcggcctctccacccaaaactggcccaaccgccaatcgtctgcctctcacctcctacagcaggtgacccatggccaatcgccaggggtctctttgccaggagccgccagggccagccaatcggggcgacccctccgccggggaggggacgggaaaggggtggggggtgaagggggtgaagggggtgtcccgggggacgggctgaacctcagtcaggaccgcctgcaccgcagtccggggatcgggtcgaggggagaagaaaaaggggtgctcgggagcagcccccggctacctcccctggaggcacagagggcgggggccttggcgaatggctttcttgctggccacttgcggagtgagtagaccccgagggtctgggagaggggccggcccctacccctgagtccccggggtcccggccgccaggccggagcgcgaatgtcgtgctcaccctgcctccttcccgccgccccctgggggtttggattcaggatttgttcctagtgtccaagattttgataagaaacttacagaagctgatgcttacctacaaatcttgattgaacaattaaagctttttgatgacaagcttcaaaactgcaaagaagatgaacagagaaagaaaattgaaactctcaaagagacaacaaatagcatggtagaatcaattaaacactgcattgtgttgctgcagattgccaaagaccagagtaatgcggagaagcacgcagatggaatgataagtactattaatcccgtagatgcaatatatcaacctagtcctttggaacctgtgatcagcacaatgccttcccagactgtgttacctccagaacctgttcagttgtgtaagtcagagcagcgtccatcttccctaccagttggacctgtgttggctaccttgggacatcatcagactcctacaccaaatagtacaggcagtggccattcaccaccgagtagcagtctcacttctccaagccacgtgaacttgtctccaaatacagtcccagagttctcttactccagcagtgaagatgaattttatgatgctgatgaattccatcaaagtggctcatccccaaagcgcttaatagattcttctggatctgcctcagtcctgacacacagcagctcgggaaatagtctaaaacgcccagataccacagaatcacttaattcttccttgtccaatggaacaagtgatgctgacctgtttgattcacatgatgacagagatgatgatgcggaggcagggtctgtggaggagcacaagagcgttatcatgcatctcttgtcgcaggttagacttggaatggatcttactaaggtagttcttccaacgtttattcttgaaagaagatctcttttagaaatgtatgcagacttttttgcacatccggacctgtttgtgagcattagtgaccagaaggatcccaaggatcgaatggttcaggttgtgaaatggtacctctcagcctttcatgcgggaaggaaaggatcagttgccaaaaagccatacaatcccattttgggcgagatttttcagtgtcattggacattaccaaatgatactgaagagaacacagaactagtttcagaaggaccagttccctgggtttccaaaaacagtgtaacatttgtggctgagcaggtttcccatcatccacccatttcagccttttatgctgagtgttttaacaagaagatacaattcaatgctcatatctggaccaaatcaaaattccttgggatgtcaattggggtgcacaacatagggcagggctgtgtctcatgtctagactatgatgaacattacattctcacattccccaatggctatggaaggcaagtgtgtccatttcctctgatcagcagtagactctgctgttccttgagacatgccccttccccctcttcctcttaactgtcaaccttacctaaaaacttttgattttgcaggtctatcctcacagtgccctgggtggaattaggaggagaatgcaatattaattgttccaaaacaggctatagtgcaaatatcatcttccacactaaacccttctatgggggcaagaagcacagaattactgccgagattttttctccaaatgacaagaagtctttttgctcaattgaaggggaatggaatggtgtgatgtatgcaaaatatgcaacaggggaaaatacagtctttgtagataccaagaagttgcctataatcaagaagaaagtgaggaagttggaagatcagaacgagtatgaatcccgcagcctttggaaggatgtcactttcaacttaaaaatcagagacattgatgcagcaactgaagcaaagcacaggcttgaagaaagacaaagagcagaagcccgagaaaggaaggagaaggaaattcagtgggagacaaggttatttcatgaagatggagaatgctgggtttatgatgaaccattactgaaacgtcttggtgctgccaagcattaggttggaagatgcaaagtttatacctgatgatcagggcagtaggcataattcagcaacaaacaatcttcctttgggagaaacctgttcattccaatcttctaattacagtggttcctatctcagggatactggactttctgacgcagatgaacaattaaggggaaaagcttcccttttccctctgtggcagttacgattttgacttcagtcctgagaaaaacttcaggttttgaaaatcagatgatgtcttctccttttccaaacaccacacgttgaaagcatttataaatccaagtctgaaactctgcgctctagtactgctgttaagatacacaacttgtttcttagttcatataatctcgggatacacacacacacacacatatatatacacacacatacgtatacacacacatacatatatataaatatacctgatgccagatttttttcataaatattctgcctactgtaaatatgggttcctctgagttgttttagaaaattagcgcaatgtattaaaatcaagtgttaggaaatttcatggtcttacctacaataacttttattttggaattgaactattattaaattgtatctaatcctggattacagtttaattaattattcttagtgcttaaggcttcataaagtaatttttccaacctttttttaaaaagagcatcttttattatcttttatggttaaacttggaagccaattatttggcaaccttgaatacaagagctagcttttcaaagaaagacacttgaaataatggaggatccattcttttcctctgtcagattgtatgttctgtctttagcccctgccaggcaattccccagaatcttcacttaactcatattgcacatgtagggctgcctaccaacattttatccaaaaatgttttattgccttagagggtttgggaagagtgtgtatttatagatccccaccccacagtgaacaaaaatagatagatagatagaataaaatgaatgccacagcagcagatggctcattctgaagggaaatacagaactatatctatctatctatctatcatcttttttatttaaaaatacattaaaaaaacaggtattagtacctagcatttagttagttattcaatatactggttacgtaaggcctttcaagaagtagattctcagtctgagaggacacaggccagggcttctcaaagtgctgctgcaggctttctggtctcgcttggcc

SEQ ID NO: 735100 - DNA, 19333 bp, Homo sapiens
  misc_feature (19333)..(19333): n is a, c, g, or t
gtaagggtctttacatggtttccagatagttcattagttgttgctttctttttttgtctgttttctgttttttttttttaaataactgtggtatgatgtaataggaacttataatttctgagttgcttatttttcctttacagttatagtaaagttatactcatttattttctcctgctttctgcagagtaaaatactgatttttgtctagaaacaagacagtgcaagacaatgttgaaagtgaaattctatgttaaaatatgccagatttattttaagaatttaatatctgtagtcagttatcaatacaaccaaattacataattatgcatgataataggtaaatactgagaagttcacctcattttcttgttaaaggatttggctattaccgtatgtgtcagttagtactcttttgtatggtagtgaaagaaaactcaacccaaactgattcatgaagaagaaagtaaatctggttagatgtggtttgaattaggtaattcatgtcatgaggactcagatctcccatctctatttctacgttccacttttgcattggcttcattttcggttaggttctcccttggtggtggtaaggtggttgtagcaatgtcagcctcccatttttggaaccgagtccataggaggctattctttctagaccttaataggagtaacacaattattgctcatcaccctagctttggccatgtgtcaaatcctgaccagtcacaatttcacagtcatagattctaccctggagctgggatgttactggcctcactagaaacacattgctgatagggtagaaggtgtgttcatcctacccaacccgacccgcaccaaagtcagaatagggaaaaacagatgttgggtgacatgcaactaacgtctgccgtactacactgaagatatttttctatgtttattctccagtgaaagagcttatatttgtggtacataggggattttgttttaatttagaaaatttaattgtagaaaacatgttttataaccctttctctgtactttgttctatatcaggaattgacttgattagataaggtgacatagggtatcttaggccctacaagatagtaaaccccccatcacttgaaagtattcagtagaggcttaaaaaacattattaaaggatgtggttattaggggactttaagaaatgaatatgaaattgaagtaggaaatctttaagctactctgtgagttatgccttttaaaagcaatttgtaattcctgtagatttcttttaaatttaggcagtttcataaatgactatagcatcattttagcaaatttgtgatcctgtaagaggaggataagtgttttttgtttgtttgtttgttttttgtttttttgagacagagtctcactttgtaccccagaaagtaaatctagttagatgtggtttgtctcggctcactgcaacctccaccccgtgcgttctagcaattctcctgcctcagccaccacacctggcctaagaggggaggataagtgttttagtgatcatattagactgaatgtggcagatgagatttcccgcccccccattgttggttagactgacattcaacattcaacaagagccacctgcccttgtaggcatttctgccactatacccctacataaacctagagtgctattgcttacttgctttccttcaaatacattttttcatttgtggcctccacattcttgtgtgtgatgtcctttctctgtgaaatgtcttctaccctttttttcaaagcctagtttagaactgacctcttctatgaaccctctgccgactggcctttccttccccagtcccccaagttcaaaatgatctctttcctttgaatactatagtatttgcacaattcactatctccttatcatattcttcttgtttatttgttatcagctgatgttgacatcataagttcaggttcctaactagatccaatattggaatttttcagcttttgctaagaagagagcttgtatgtctttgggaataatgggcagaaaaagataactttgagaagtcttagacttctaatagctttgatatttaaaagtacatgtaatacaagaggtttttttcctacatttaatgcatggagaagataggacatttagaaatatggaattaatgttcatttgactggcaaaagattattttctcagatgtagtgaagtgtggtaaagaacttcactctagagccagaatgtctgtgtttgtatcccagagcccaccacttacatttaaccattaacattcaacttactgtctctgagtttcagtggcctcatctataaaatgaggataataagagtacctacttcatagagttgttttagtggttaaataaactaacgtaaacttgctagaacttgataaactaatattggatgagaactggttgaaataatgcctggctatagtaaaaacttggtaaatgttagttgccattacaatgcaactactgttcctaccattccctctgccagtgcctggtattcagtagcactcagtaaatgttagttaaatgaagaaataactgaaggaatgaatgaacaaatggttgatgtagagattgcttttccattgttgtttattgaatattttgagatgtataacatactgtctgttaggcactgtgggatgggcactcacggagctgtcttccaaaggggtataggagaggagacgcagtgatctcagcaacctacctttaaaacatatcctagtatctactgccatgttaggttctcttcttttgctttttttaaaaaaaaattctcacaaaactccccccacccacttcagtttatagatgaggaagctcctactacataatagtgcttcccagtctaattcttgacctcattgtatttatatgtcctttttttttttgacagagtctcactcattgcagtggcacaatcacagctcactgcaacctctgcctcccctgctcaagtgatcctcccacctcaacctcctgagtagctgggactacaggcatgcaccaccacgcctggctaatttttgtatttttttgtagagatgcggttttgccatgttggccaggctggtctcgaactcctgggctcaagccatctgcccactttggcctctgagagtgctgagattataggcatgagccaccattcccagccatgttttcctttttcattgaactttatctactttagccattaaactccactccattggtcttgtcattactaagagctgaaccacctgcaaaatattaagttaaaaagcgttttctttgacaacagttttcttttcttcatcttcctctatcactttacttctgaacttttattctctcattttgatctgacccctacttctctgtttttcctggccatttagtactttcttgttttgctcatcccatttcccagtggagaccttctggtctgctgctttatcactggttttgttagaagacatacaaatggcaaggaggtatatgaaaaggtgcctaacatcattgatcatcagagaaatgcagaccaaaactacaatgagatatcatttcaccccagttaaaatggctttttttttttttttccaaaagacaggcaataacaaagtactggtgaggatgtggagtaaagggaacccacatacactattagtaggaatgtaaattagtacagccactgtggagaacagtttgaaggttcctcaaaaaactaaaaatagagctaccatataatccagcaatcccactgctaggtatatatccaaaagaaaggcaatcaatatacggaagagatacctgcacacccaggtttattgcagcactattcacaatagccaagatttggaagcaacccaggtgtccaacagatgaatggataaagaaaacatggtatataaacacaatggaatactattcagctgtgaaaaagaatgaaatcctgtcatttgcaatcctgtcttgaatagaactggaggtcatgatgttaagtgaaataagacaggcacaaacttcacatgttctcacttatttgtgggagctaaaaattaaaacaatcgaactcatggagctagagaatagaattatggttaccagaggctggaagggtggttgggcgtataagtgtagggggagtggggatggttaatgggtacaaaaaaatgagaacgaataagatctacttgataacacaacagggtgactatagtcaacagtaattatacatttaaaaataactagaagagtataattagattgtaacacaaaagataaatgcttgaggtgatggatacctatttaccctgatgtgattattacttatttcatgcctatatcaaaatatttatactccaaaaatatatatacctactatgtacccacaaaaatttaaaaatttatatattgtttttgctatcacctttagaatttcttgtcattggatagttcgtctgtataccattctggtcttcattccccagggcccccgttgtctgatttttctgcttctagaactgttagaggtcacaaaagcaagatggttgtatctatcacaatttttgtctgactttaactgggtatctgttacgatttagtagtcatcttactgacttcttgttggtttccaattgaatcctcacagtagactgttttcattgtaatcagtatcgaattatagcctgttcccttcttcataaatgaaggctttcttcttcaacagttcttagtgacttcacctgtactttatttctctgctttgaatatttcgaagaaaacatattcttgctctttcccaaggttaacactacatacattaccttgaccacaggatgttttcttgcagattgtgacctaattccatcacccttcagcagcccccaccgttttcatggattcagctaaaccttctgtaagatgactctttttccccctaatctttatatctcttttgatatgtagctttagtctcactttttttccttttggattttgccagttagatgtctccctggaattccacttcagcatggctaagactaagcttgtcttctctttcctccccaaagcaaattgtaattaggatagactgaaggtgacagaagataactaagatcttcttcatcctttcggctcttatggaagctgaattccagtagtcattctaaatttgttgtatgtcagcttatggtatcttttcatgtctttacattcagccaaagaggaagttccttgaaggggagaccagagggcgtgctgtgcttcttaatcctctctttcttaaccagtaagaggcattcagtagatatctgatgatactgattaatagaggggaacttttcagattcttttttttttttaaccctagtaagctttagtacaaactaaatgctgagagattatcaagtaagggattgatcatcacaagaagactcaggatgttacatcctgtaggttttatagtttcctatattgtaaaaaatatgagttatagcagcttgtctggatgtcatacaggtataaaaatcagttttataaacttgagtaaattggggcccattttagaaaaaactcttgcaggctgtgaatgccaatatataagtaaagtattaagtataatgttatttaatgtgggcaaacataaagccaggtgtaaattttttaggtttaaaatcttatagaactatacatccaaaagaaaatttcaagttaaacataatacaaagcaatacaatctaaattaacattaatttaatgtgatgaatgatattgccttgctaaaagtgggtcactacttacaatgtgcaaatggtactcatcgttagggtatagattcttttaaactatgacatacgtacactaccatgtggaacgtgatgatgtgttctctgttctaactactgggaagacttccttggcatagcacatgccatggggtcagttggctttgacttcatatagatatgccatttacttggtcagtgtcacttctatgacaagtagtatgttgtgccagtttgattataagtacaaatatgggcaatgaagtaacttggttttaaggttgttactaagctgagtaacagtgtgtggctatacaaatttttataggctatcaggaatgaaaacacaggagattgttgtagattcaagtattttagattcaagtttgaagatgctcatgcagatgtttaactgagttgtatagacctttatgtttctttctttttctctttttttttttttgagacagagtcttgctctgtcacccaagctggagtgcaatggtgtgatctcggcttactgcaacctccgcctcccaggttcaagcaattctcctgcctcagcctcccaagtagctgggattacagatgtgcaccacgacgcccagctgattttttgtattttagtagaggcggggtctcaccatgttgtcaagatggtctcaatctcctgaccttgtgatccacccacctctgcctcccaaagtgctgtgattacaggcgtgagccaccgcgcctgactgacctttatgtttcttaactttatgctatacatcagttgatatttcaaaaatttaaatggtttctatgattattctttgggctaagaaattgggcattaattgtcctcatatgtatggtttttgtggctacttcatgtagattttatttttggtggttatcaaattggaatttttttttttttttttttttttgagacggagtctcattctgtttcccaggttggagtacagtggtgcaatctcagctcactgcagcctcgacctcccaggctcaagcagtcctctcacctcagccttctaagtagctgggactacaggcacgcaccaccacacctggctagttttttgtgtttttagtagagatggggttttaccctgttggccaggctggtcttgaactcctggcctcaagtgatccacctgcctcagcctcccaaagtgctgggattagaggcatgagccaccacacctggctgaaattggaatttcattggtactgcctgtaattttatgttaatttttttttttttttgtcgtcactagcttttatctaaagcccctagagagaaaggccatgataccttgtatacaaggttataagagtatacaagggaaagggagggctgaagggaacagggtgggctggtacaagcctcattagaaataccattgagtctgtgagtaaaacatcattatatgaaaaggagatgtggttttagggtggtccaattacttttgcaccagcctaataaaattacaagtcattatcaatagagacattgtaaaacctttttttttcccaaaagaagtatcaggtatgataattacatgtctgcccaactttcgttatagattaacataacttaattgtatttaaggtacaatttaggagagttgctgaaaaatgaatctttagtattgggatgccttgattctaccctcaatagctataatggattatgtgtctgagtagattaataaaaatcttttgagcatttttcttgaactacttcactgaagattagctttttgagcatccattttaatttctcagtatataaggatcggtttatcacaactgtattgttttccctggccttgttagattatattttcatatcatgtagaaaaataggtgtattcgttctcccttgaagtcctttgtctcccaaaggaaatggttgcaatacagatgtgtcacctcttccacaggtaaagtggaatggagaagtagccagttaaatagtgcatgctcaatttggaacatttagagcatacaggaaagttatttatttggtaaatattttttaagcatttactatgtttcatgcattgtactagttgtagaggatataattgaatacaactacatgtagcccttgactttatggaactagtctagtataaagatttaagattgcctggcatggtggctcacgccactaatcccagcactttgagaggccaaggcaggattgcttgaggccagaagtttaagagtagcttggtcaacataatgagactccatctctaaaataaatagatagatagatagatagatagatagatagatagatagatagaagtagttagacaacacaaagcagtttcactcatcttgtggcaaggagttatgtatttctaatcaaatttggcaactcaagcattttcaacaaaatctacatgttttttcagaataaagtgaccaacacagaatgttacctgtaaaaatcagagcaataattgctatctaaaataattttgaaaattaagtggtactgaaaggctcatatagcaaaaatatggcctcctgtcattgtactttcctacttcccagactcaccattttcaacattttttagtagtttattttgccattttatagcatagtacctgacattttatttattcaacagacatttcttaagtacctaatacatgccattccttgtttgaagggatgctaaggatacagtggtgaacaaggcgttgtggggttgtatagagggtattcattcctaaccttgaaccaaatatttctttctgttggataatgcattaaaaattgcaaacagtttacaaacttttggagcaatggtggccttgatcataaagtagggactgcttctaccgtatacatgcttggtggtgtatttgtgatatctggctaaagtttctacatggaaattgactgactttagttttgagacttctgggaaccagtcaggcaaaatagtgaaactgtgtatcctgtttccaagagttgtcttttaaggttatctgcttcattcatttggcctgacttgctaggcaaatgcctagggtaaatatgatttgattaactataacaacaacagcaacaacaacaactttattttttagagcagtttgaggttcacagcaaaattgagcagaatgtacagagattttccctatacccgcttcccctacgcatgtgcggcctcccctactatcaacatcccccaccagagtggtttgttacaattaatgaacctacattgacacatcattatcactcaaggtccgtagtttacattagagtccactcttggtgttgtgtatgggtttggtcgattttataatgacatttatccaccattatagtgtcatacatagtaattttgctaccctaaaaatccagtgtgctccacctgttcctccttccctcctccctcatccctggcaaccactgaactttttaacatctccatagttttgccttttccagaatgtcatatcattggaatcacacagtatgcagccttttcaaatgggcttctttccgttagtaataggcatttaagtttcatcctcatcttttcatggcttgatagctcatttctttccctccctcttttcttccctgtcttccttccttcctcttctttcctgtttcctctttcttcttccttttttaagagacaaggtgtctcactctgttgcccaggctggagtgcagtggcccaatcatagctcattgcagccttgaattcctgggctcaagtgatcctcctgcgttagcctcctgagtagctgggatcacaggctccagtcattttagtgctgaataatatttcattatctggatgtaccgcctattcattcacctactgaagaatatcttggttgcttctaagttttggcaattatgagtgaagttactataaacattgtatacaagttttatgtggatgtatgttgtcatctcccttgggcagataccaaggagtgccattgttggatcatatggtaaatatatctttagttttgtacagaattctaggttggtatttttttctctctcagtcctttattttatttggagacagtctcgctatgtcgcccaggctgccatacagtggtgccatctgggctcactgaaacctccacctcccaggttcaagcgattcttgtgccttggcctcccaagtagctgggattacaggagtgcgccaccacgcctgctaatttttgtatttttagtagagacagggttttgccatgttgcccaggctggtctcaaactcctgaccttaagtgattcacccacctcaatctcccaaaatcctgggattacaggcctgagctactgtgcctgatctctctcagtactttaaagaaatatttcattccacttttcttttttttcttctttttgagatggagtctcactctgtcgcctgggctggagtgcagtggcgcgatctcagctcactgccacctccgcctcctgggttcaagtgattctcctgcctcagcctcctgaatagctgagattacaggcgcccaccaccatgcccagctaattttttgcatttttagtagagacgggggttccaccatgttggccaggctggtctcgaactcctgacctcgtgattcgcacatctcggcctcccaaattgctgggattacaggtgtgagctaccacgcctggcccactcttcttgcttacatagtttctgaggagatgtcagatgtaatttttatttttgctcttctgtaggcaagttgagttttttccccctctagcttctctcaggatttttttctttatctttgattttcagtagtttgaaaattatatgcctagctgtcagggttttttgcttgtttgtttttgttttctcaggtgtgactccagaaaggttctaaagaggagctttacaatctcttctctggggtttatggagacttcctttacccttctgtgttagccccttaaagcactgcgtcaaccttaaaagggcacaggaaagggtgtctatgccatttttatgccatttatcctgcttggtgttttctgagctttcttcatctgcggtttaatgtctcacattaatttgtagaaattctctgtcattgtttcaaatttttcttcagttcttttctctgtttcttcttctggtgttcccattatgcttttgtggttgtcgtacagttattggatattttgttccaggcttttttttttccagtctttttttccttttgcttctcggttttgtaggtgtctgttgagatactctcaagtgcagatattctttcctcagctttgtctagtttactaataagcccattaaaggcagtcttcatttctgttacagtctttttgatcagtagcatttcttttttattctttcttaaaatttctgtctttctgcttacattgcccatctgttcttgcatggtttctactttgtccattagagttcttaggatatttatcataattatttcaaatttctggtgtaacaattccaacatccctgcaacatccaagtctagtttcgatgcttactgtgtctcttccagctgtgttttttcctatttaatatgtcttataattttttcttgatagccatacatgatgcattaggtaacagaaactgctgtgagtggacctttagtaatgtggtggtaaggtgtgcatggaggggaaacattttcagtctgttagtgaacttttgtcaacttcacatgtgcttctcaagtccatcctgtaagtgggagagtagggctagagaggactgaagttgggtatatattaaatactttctcctacaaagaagcctagaggggacgcattaggggattttttttcccccagtattcactgtgatgacccttattgagctcctggaggtaaaactcacaaaactgtggttctcccccctgcccatattactacatgtccctggagtttatatctttcagacttgtctgcactgagcttccaccaatttgtcaaatacagatcaggtttccctaccacccgtgcagttgaaaacccacatacaacttttgactcctccagagcttaactactcatagcctgctattgactggaagccttgccaataacataaacagttgattaatacatattttatatgttttctgtattatatattgtattcttacaataaagagaaaagaagatgttattaagaaaatcataaggaagataaaatatatttactgttcattaagtggttcccatgggtgctggttcccatggaggttgccccttgtgagtttttgctcagggaagttgtgattctctatatttgcctgttggtctcctaatttgggagtcatcagttttccctgtgacctcacttctcttacagagttaagaacagttgttggtttttcagtttgttcagtgttttacatgttgttagaacacagtggtacttctaagtttcttaacatgctagatcagaaacctgaagtctcacctaatttggctttttatattttttcttcttttttttcttccattgctaccaaagcatttttcatctgtgtctggggtgacattagagcagaatgtgatttctaggtaaacattattgggctccctagcagaaaaatttttgaaagtagtacatgaattctgtataattaaaattttcttttcatcttaataggtataggtaataggcacggcctattttttttttgctcaacagtctaaaatagtaatttaatcacctaatagccttagttatatagttgaaagaagagttggaaatctgattcatgggttggaaatcacctgtcacatatgagttttaggcactggtcactttattttgaaacagctttggggttttttcctttttcaactcataataggctttaacagcttttagttttgtttctgtttttttaacagcatgagttgccaaatttggttatagcttcttggtacaagatgggtaaatttgctttgtgttgtgtaattactttttattttaaatgctacctcttttatgaacactaactttacactaagattaggaaaatgagaattgcatgtctgcaacaaatagctatctgtagtattaaattgtgaaaatgtagactttggattggagctggcatctcttaatatgtaattgtaacatagagtaaataagtattttgtcccttgtagggtcaaacagtacagtgcatgggcagaattagagatgtaggcttttttttttttttttttttttactggcttagagaaccgtttgatcagctaatatggaattaagtccctagggctgcccaggcacaacattaactgctattaaaggaaaatttaaaagagtattagtgaaggttaaatactgaccatggacatctggcaaaattgatgttttttttcccctccaccattgtttatagtttattgttatttatcagagaattaatgtttattttcagaatctattaccataagaaatctgtttgaggacttcgtatgtgccaggaattctactaaataatgatataatgctgaacagaattagataggatcctcacttcgttaagcttacagtctagtggtatagatcaacattaatcaaagaataacacaaatagaaagcagagcagtggttcatgggattgactgtagagaagcatgagggaagttcccaggtgatggaaaatactttatttcttaatcgtggtggttacatgtgtgcatatgtttatgaaaatatattgtacatttaaagtggatacattttatcacatgtaaattatgactctataaagttaattaaaaagaataactcaggtaaggtggtgtgtgcgcctgtagtcccagctatttctgaggcaggaagatcacttgagcccaggagtttgagttcagcatgggcaacatgagacctgtgagactttgtctctaaaaaaatttaaataaataactaagataaatgtaaaattacagctgtagtaagttctacaaaggagagttacatgggctatgacgatgtaagatagcaagaactgacattggcagggaggaaatgatgatgagtagaagtaaataagtgaagtgtggggattgatgtcaaggggacagtataaaagaaataacagcatgcgccaaggccctaaaattggaaagtccttggcaaattaaaggagtttgaaaaaggccattgtgtgcaaagcagaaaataggtactacaaggtaaaagatggagctaagcggtaggtaaggctaaaccttgtcagccattgttaaatattgaattgtatcctaagcacaactcagtggaaagcagttaaagttctttaattgggggaggcaatgaaggggtaataaaattggttatagaaatactgctctggctctagtgttgagaatgaattggagtagccagagtagattcaagaagactttagtaagattattccaacaggccaggacctgttatagggtggtggcaatggagagagatggacagaatggagagtgtatttaggaggtaaaaatgacagaacttggtgatgcactgaatgtgaaatggggaaggtgtctaggaggactactaggtttatggtttgcgtattagggtggatgatagcagtttcatttactgagacagggagccctggcagagtacccagcttttagagtgggtagggggaaggggagagtgcatctggtgttgggcattttgaagtgatttacatacaacaaactgaaggtatctttaacactgagtccagcaggttagcatatttattcagcaagcattgcacctttttttgttgtttttggggtcttcaactcctggcctcgaatcctccctccttcccccgcctctcccagcctccgcctcccaaagtgctgggatttcaggagtgagccaccgcgcctggccagcatcgcgctgtttgtgcagtgtgccctgtgctaggtcttgcagtgggtaccagtagagacataaaagtacaaaagataattggacgtttagtagagtcctgaaagggggcgggataggaagatacctaaccataagaaaaaccagcaagagcggaaaaggagctagtcctccagatcaataagttaatcacttatgtttgtgattccctgcattttgggtgattctctgtcgaggtcctcttaagtccagacttttgatataatctgcagtttgcgccatttggattcctgaagcatctttacaagccacctacattccttatggagctgtggcacaacagcaagcccacgatgtctcaccggattaataaaaatataggcgctcacgcttttgtttaccgatatagtatctcctcctcccctcactccatcaacccccacgcgacacaactttccggaagtaagcaaaatccgttatcaaggtgaaactccggggaccaggctccacagctgccataaactggatggcacgttagaagccggtgggtgtaggtgaggcacgctggcgcccgcgggcccttctccagccgctacccagtgggaatccgcggggctgaagccccgaaaccaggctgagcgtcccagagcgcaacctccctttcccccagcagcgccggcgccgcagaagccgcgtgtccccaggcgcactcccccaaggtgaacccccgccccccacggaggcggctgggtcgcgggtctgggcggggcgctccggacgccctcccgccgctgcgcacccctcccgcgagctgccagctccctcggcctctccacccaaaactggcccaaccgccaatcgtctgcctctcacctcctacagcaggtgacccatggccaatcgccaggggtctctttgccaggagccgccagggccagccaatcggggcgacccctccgccggggaggggacgggaaaggggtggggggtgaagggggtgaagggggtgtcccgggggacgggctgaacctcagtcaggaccgcctgcaccgcagtccggggatcgggtcgaggggagaagaaaaaggggtgctcgggagcagcccccggctacctcccctggaggcacagagggcgggggccttggcgaatggctttcttgctggccacttgcggagtgagtagaccccgagggtctgggagaggggccggcccctacccctgagtccccggggtcccggccgccaggccggagcgcgaatgtcgtgctcaccctgcctccttcccgccgccccctgggggtttggattcaggatttgttcctagtgtccaagattttgataagaaacttacagaagctgatgcttacctacaaatcttgattgaacaattaaagctttttgatgacaagcttcaaaactgcaaagaagatgaacagagaaagaaaattgaaactctcaaagagacaacaaatagcatggtagaatcaattaaacactgcattgtgttgctgcagattgccaaagaccagagtaatgcggagaagcacgcagatggaatgataagtactattaatcccgtagatgcaatatatcaacctagtcctttggaacctgtgatcagcacaatgccttcccagactgtgttacctccagaacctgttcagttgtgtaagtcagagcagcgtccatcttccctaccagttggacctgtgttggctaccttgggacatcatcagactcctacaccaaatagtacaggcagtggccattcaccaccgagtagcagtctcacttctccaagccacgtgaacttgtctccaaatacagtcccagagttctcttactccagcagtgaagatgaattttatgatgctgatgaattccatcaaagtggctcatccccaaagcgcttaatagattcttctggatctgcctcagtcctgacacacagcagctcgggaaatagtctaaaacgcccagataccacagaatcacttaattcttccttgtccaatggaacaagtgatgctgacctgtttgattcacatgatgacagagatgatgatgcggaggcagggtctgtggaggagcacaagagcgttatcatgcatctcttgtcgcaggttagacttggaatggatcttactaaggtagttcttccaacgtttattcttgaaagaagatctcttttagaaatgtatgcagacttttttgcacatccggacctgtttgtgagcattagtgaccagaaggatcccaaggatcgaatggttcaggttgtgaaatggtacctctcagcctttcatgcgggaaggaaaggatcagttgccaaaaagccatacaatcccattttgggcgagatttttcagtgtcattggacattaccaaatgatactgaagagaacacagaactagtttcagaaggaccagttccctgggtttccaaaaacagtgtaacatttgtggctgagcaggtttcccatcatccacccatttcagccttttatgctgagtgttttaacaagaagatacaattcaatgctcatatctggaccaaatcaaaattccttgggatgtcaattggggtgcacaacatagggcagggctgtgtctcatgtctagactatgatgaacattacattctcacattccccaatggctatggaaggcaagtgtgtccatttcctctgatcagcagtagactctgctgttccttgagacatgccccttccccctcttcctcttaactgtcaaccttacctaaaaacttttgattttgcaggtctatcctcacagtgccctgggtggaattaggaggagaatgcaatattaattgttccaaaacaggctatagtgcaaatatcatcttccacactaaacccttctatgggggcaagaagcacagaattactgccgagattttttctccaaatgacaagaagtctttttgctcaattgaaggggaatggaatggtgtgatgtatgcaaaatatgcaacaggggaaaatacagtctttgtagataccaagaagttgcctataatcaagaagaaagtgaggaagttggaagatcagaacgagtatgaatcccgcagcctttggaaggatgtcactttcaacttaaaaatcagagacattgatgcagcaactgaagcaaagcacaggcttgaagaaagacaaagagcagaagcccgagaaaggaaggagaaggaaattcagtgggagacaaggttatttcatgaagatggagaatgctgggtttatgatgaaccattactgaaacgtcttggtgctgccaagcattaggttggaagatgcaaagtttatacctgatgatcagggcagtaggcataattcagcaacaaacaatcttcctttgggagaaacctgttcattccaatcttctaattacagtggttcctatctcagggatactggactttctgacgcagatgaacaattaaggggaaaagcttcccttttccctctgtggcagttacgattttgacttcagtcctgagaaaaacttcaggttttgaaaatcagatgatgtcttctccttttccaaacaccacacgttgaaagcatttataaatccaagtctgaaactctgcgctctagtactgctgttaagatacacaacttgtttcttagttcatataatctcgggatacacacacacacacacatatatatacacacacatacgtatacacacacatacatatatataaatatacctgatgccagatttttttcataaatattctgcctactgtaaatatgggttcctctgagttgttttagaaaattagcgcaatgtattaaaatcaagtgttaggaaatttcatggtcttacctacaataacttttattttggaattgaactattattaaattgtatctaatcctggaaaaaaaaaaaaaaaaaaaaaaaaaaaaaaaacaaaaaaaagaacaaaataaaaaaaaagaaaacaacaaaaaaaaaaacaacaaaaaacaaaagagagggaggaggcgcaacaagcacaacgaagcactaccccgggagggggcacgccgcacacagaacgccggagcggcacgcccggaccccactatctagaaacgacaaagcgtgtgcccacacaaaacaaaagtaaaaagagcgcagacttatcaatcagacacacgccaagcgacgagacgcggccgcagatcctcaacaaacacagcacactgaatagcaaggtggagagaaacacaacctggtggctgacgcagcgacacacatcctgcgaaggaaaagacgagacactcacactaccatgggagagtggaggagcaaaacaacacacaggcgagaagaacaacaaaaacccagccacaccagcaaacataaacacgccaccatgacaacggcgacaacacaacaacgaccacgtctcaagcccgagtcactaactgagcacagacaacaccgcacacacaactacaatcagccgcggaacaaaggacaactaactacgaacgacaaccgactgatcagagcagagacaaacactcaactccaaccgagggagcgatcaaagaacaaataaggan

SEQ ID NO: 735101 - DNA, 18822 bp, Homo sapiens
gtaagggtctttacatggtttccagatagttcattagttgttgctttctttttttgtctgttttctgttttttttttttaaataactgtggtatgatgtaataggaacttataatttctgagttgcttatttttcctttacagttatagtaaagttatactcatttattttctcctgctttctgcagagtaaaatactgatttttgtctagaaacaagacagtgcaagacaatgttgaaagtgaaattctatgttaaaatatgccagatttattttaagaatttaatatctgtagtcagttatcaatacaaccaaattacataattatgcatgataataggtaaatactgagaagttcacctcattttcttgttaaaggatttggctattaccgtatgtgtcagttagtactcttttgtatggtagtgaaagaaaactcaacccaaactgattcatgaagaagaaagtaaatctggttagatgtggtttgaattaggtaattcatgtcatgaggactcagatctcccatctctatttctacgttccacttttgcattggcttcattttcggttaggttctcccttggtggtggtaaggtggttgtagcaatgtcagcctcccatttttggaaccgagtccataggaggctattctttctagaccttaataggagtaacacaattattgctcatcaccctagctttggccatgtgtcaaatcctgaccagtcacaatttcacagtcatagattctaccctggagctgggatgttactggcctcactagaaacacattgctgatagggtagaaggtgtgttcatcctacccaacccgacccgcaccaaagtcagaatagggaaaaacagatgttgggtgacatgcaactaacgtctgccgtactacactgaagatatttttctatgtttattctccagtgaaagagcttatatttgtggtacataggggattttgttttaatttagaaaatttaattgtagaaaacatgttttataaccctttctctgtactttgttctatatcaggaattgacttgattagataaggtgacatagggtatcttaggccctacaagatagtaaaccccccatcacttgaaagtattcagtagaggcttaaaaaacattattaaaggatgtggttattaggggactttaagaaatgaatatgaaattgaagtaggaaatctttaagctactctgtgagttatgccttttaaaagcaatttgtaattcctgtagatttcttttaaatttaggcagtttcataaatgactatagcatcattttagcaaatttgtgatcctgtaagaggaggataagtgttttttgtttgtttgtttgttttttgtttttttgagacagagtctcactttgtaccccagaaagtaaatctagttagatgtggtttgtctcggctcactgcaacctccaccccgtgcgttctagcaattctcctgcctcagccaccacacctggcctaagaggggaggataagtgttttagtgatcatattagactgaatgtggcagatgagatttcccgcccccccattgttggttagactgacattcaacattcaacaagagccacctgcccttgtaggcatttctgccactatacccctacataaacctagagtgctattgcttacttgctttccttcaaatacattttttcatttgtggcctccacattcttgtgtgtgatgtcctttctctgtgaaatgtcttctaccctttttttcaaagcctagtttagaactgacctcttctatgaaccctctgccgactggcctttccttccccagtcccccaagttcaaaatgatctctttcctttgaatactatagtatttgcacaattcactatctccttatcatattcttcttgtttatttgttatcagctgatgttgacatcataagttcaggttcctaactagatccaatattggaatttttcagcttttgctaagaagagagcttgtatgtctttgggaataatgggcagaaaaagataactttgagaagtcttagacttctaatagctttgatatttaaaagtacatgtaatacaagaggtttttttcctacatttaatgcatggagaagataggacatttagaaatatggaattaatgttcatttgactggcaaaagattattttctcagatgtagtgaagtgtggtaaagaacttcactctagagccagaatgtctgtgtttgtatcccagagcccaccacttacatttaaccattaacattcaacttactgtctctgagtttcagtggcctcatctataaaatgaggataataagagtacctacttcatagagttgttttagtggttaaataaactaacgtaaacttgctagaacttgataaactaatattggatgagaactggttgaaataatgcctggctatagtaaaaacttggtaaatgttagttgccattacaatgcaactactgttcctaccattccctctgccagtgcctggtattcagtagcactcagtaaatgttagttaaatgaagaaataactgaaggaatgaatgaacaaatggttgatgtagagattgcttttccattgttgtttattgaatattttgagatgtataacatactgtctgttaggcactgtgggatgggcactcacggagctgtcttccaaaggggtataggagaggagacgcagtgatctcagcaacctacctttaaaacatatcctagtatctactgccatgttaggttctcttcttttgctttttttaaaaaaaaattctcacaaaactccccccacccacttcagtttatagatgaggaagctcctactacataatagtgcttcccagtctaattcttgacctcattgtatttatatgtcctttttttttttgacagagtctcactcattgcagtggcacaatcacagctcactgcaacctctgcctcccctgctcaagtgatcctcccacctcaacctcctgagtagctgggactacaggcatgcaccaccacgcctggctaatttttgtatttttttgtagagatgcggttttgccatgttggccaggctggtctcgaactcctgggctcaagccatctgcccactttggcctctgagagtgctgagattataggcatgagccaccattcccagccatgttttcctttttcattgaactttatctactttagccattaaactccactccattggtcttgtcattactaagagctgaaccacctgcaaaatattaagttaaaaagcgttttctttgacaacagttttcttttcttcatcttcctctatcactttacttctgaacttttattctctcattttgatctgacccctacttctctgtttttcctggccatttagtactttcttgttttgctcatcccatttcccagtggagaccttctggtctgctgctttatcactggttttgttagaagacatacaaatggcaaggaggtatatgaaaaggtgcctaacatcattgatcatcagagaaatgcagaccaaaactacaatgagatatcatttcaccccagttaaaatggctttttttttttttttccaaaagacaggcaataacaaagtactggtgaggatgtggagtaaagggaacccacatacactattagtaggaatgtaaattagtacagccactgtggagaacagtttgaaggttcctcaaaaaactaaaaatagagctaccatataatccagcaatcccactgctaggtatatatccaaaagaaaggcaatcaatatacggaagagatacctgcacacccaggtttattgcagcactattcacaatagccaagatttggaagcaacccaggtgtccaacagatgaatggataaagaaaacatggtatataaacacaatggaatactattcagctgtgaaaaagaatgaaatcctgtcatttgcaatcctgtcttgaatagaactggaggtcatgatgttaagtgaaataagacaggcacaaacttcacatgttctcacttatttgtgggagctaaaaattaaaacaatcgaactcatggagctagagaatagaattatggttaccagaggctggaagggtggttgggcgtataagtgtagggggagtggggatggttaatgggtacaaaaaaatgagaacgaataagatctacttgataacacaacagggtgactatagtcaacagtaattatacatttaaaaataactagaagagtataattagattgtaacacaaaagataaatgcttgaggtgatggatacctatttaccctgatgtgattattacttatttcatgcctatatcaaaatatttatactccaaaaatatatatacctactatgtacccacaaaaatttaaaaatttatatattgtttttgctatcacctttagaatttcttgtcattggatagttcgtctgtataccattctggtcttcattccccagggcccccgttgtctgatttttctgcttctagaactgttagaggtcacaaaagcaagatggttgtatctatcacaatttttgtctgactttaactgggtatctgttacgatttagtagtcatcttactgacttcttgttggtttccaattgaatcctcacagtagactgttttcattgtaatcagtatcgaattatagcctgttcccttcttcataaatgaaggctttcttcttcaacagttcttagtgacttcacctgtactttatttctctgctttgaatatttcgaagaaaacatattcttgctctttcccaaggttaacactacatacattaccttgaccacaggatgttttcttgcagattgtgacctaattccatcacccttcagcagcccccaccgttttcatggattcagctaaaccttctgtaagatgactctttttccccctaatctttatatctcttttgatatgtagctttagtctcactttttttccttttggattttgccagttagatgtctccctggaattccacttcagcatggctaagactaagcttgtcttctctttcctccccaaagcaaattgtaattaggatagactgaaggtgacagaagataactaagatcttcttcatcctttcggctcttatggaagctgaattccagtagtcattctaaatttgttgtatgtcagcttatggtatcttttcatgtctttacattcagccaaagaggaagttccttgaaggggagaccagagggcgtgctgtgcttcttaatcctctctttcttaaccagtaagaggcattcagtagatatctgatgatactgattaatagaggggaacttttcagattcttttttttttttaaccctagtaagctttagtacaaactaaatgctgagagattatcaagtaagggattgatcatcacaagaagactcaggatgttacatcctgtaggttttatagtttcctatattgtaaaaaatatgagttatagcagcttgtctggatgtcatacaggtataaaaatcagttttataaacttgagtaaattggggcccattttagaaaaaactcttgcaggctgtgaatgccaatatataagtaaagtattaagtataatgttatttaatgtgggcaaacataaagccaggtgtaaattttttaggtttaaaatcttatagaactatacatccaaaagaaaatttcaagttaaacataatacaaagcaatacaatctaaattaacattaatttaatgtgatgaatgatattgccttgctaaaagtgggtcactacttacaatgtgcaaatggtactcatcgttagggtatagattcttttaaactatgacatacgtacactaccatgtggaacgtgatgatgtgttctctgttctaactactgggaagacttccttggcatagcacatgccatggggtcagttggctttgacttcatatagatatgccatttacttggtcagtgtcacttctatgacaagtagtatgttgtgccagtttgattataagtacaaatatgggcaatgaagtaacttggttttaaggttgttactaagctgagtaacagtgtgtggctatacaaatttttataggctatcaggaatgaaaacacaggagattgttgtagattcaagtattttagattcaagtttgaagatgctcatgcagatgtttaactgagttgtatagacctttatgtttctttctttttctctttttttttttttgagacagagtcttgctctgtcacccaagctggagtgcaatggtgtgatctcggcttactgcaacctccgcctcccaggttcaagcaattctcctgcctcagcctcccaagtagctgggattacagatgtgcaccacgacgcccagctgattttttgtattttagtagaggcggggtctcaccatgttgtcaagatggtctcaatctcctgaccttgtgatccacccacctctgcctcccaaagtgctgtgattacaggcgtgagccaccgcgcctgactgacctttatgtttcttaactttatgctatacatcagttgatatttcaaaaatttaaatggtttctatgattattctttgggctaagaaattgggcattaattgtcctcatatgtatggtttttgtggctacttcatgtagattttatttttggtggttatcaaattggaatttttttttttttttttttttttgagacggagtctcattctgtttcccaggttggagtacagtggtgcaatctcagctcactgcagcctcgacctcccaggctcaagcagtcctctcacctcagccttctaagtagctgggactacaggcacgcaccaccacacctggctagttttttgtgtttttagtagagatggggttttaccctgttggccaggctggtcttgaactcctggcctcaagtgatccacctgcctcagcctcccaaagtgctgggattagaggcatgagccaccacacctggctgaaattggaatttcattggtactgcctgtaattttatgttaatttttttttttttttgtcgtcactagcttttatctaaagcccctagagagaaaggccatgataccttgtatacaaggttataagagtatacaagggaaagggagggctgaagggaacagggtgggctggtacaagcctcattagaaataccattgagtctgtgagtaaaacatcattatatgaaaaggagatgtggttttagggtggtccaattacttttgcaccagcctaataaaattacaagtcattatcaatagagacattgtaaaacctttttttttcccaaaagaagtatcaggtatgataattacatgtctgcccaactttcgttatagattaacataacttaattgtatttaaggtacaatttaggagagttgctgaaaaatgaatctttagtattgggatgccttgattctaccctcaatagctataatggattatgtgtctgagtagattaataaaaatcttttgagcatttttcttgaactacttcactgaagattagctttttgagcatccattttaatttctcagtatataaggatcggtttatcacaactgtattgttttccctggccttgttagattatattttcatatcatgtagaaaaataggtgtattcgttctcccttgaagtcctttgtctcccaaaggaaatggttgcaatacagatgtgtcacctcttccacaggtaaagtggaatggagaagtagccagttaaatagtgcatgctcaatttggaacatttagagcatacaggaaagttatttatttggtaaatattttttaagcatttactatgtttcatgcattgtactagttgtagaggatataattgaatacaactacatgtagcccttgactttatggaactagtctagtataaagatttaagattgcctggcatggtggctcacgccactaatcccagcactttgagaggccaaggcaggattgcttgaggccagaagtttaagagtagcttggtcaacataatgagactccatctctaaaataaatagatagatagatagatagatagatagatagatagatagatagaagtagttagacaacacaaagcagtttcactcatcttgtggcaaggagttatgtatttctaatcaaatttggcaactcaagcattttcaacaaaatctacatgttttttcagaataaagtgaccaacacagaatgttacctgtaaaaatcagagcaataattgctatctaaaataattttgaaaattaagtggtactgaaaggctcatatagcaaaaatatggcctcctgtcattgtactttcctacttcccagactcaccattttcaacattttttagtagtttattttgccattttatagcatagtacctgacattttatttattcaacagacatttcttaagtacctaatacatgccattccttgtttgaagggatgctaaggatacagtggtgaacaaggcgttgtggggttgtatagagggtattcattcctaaccttgaaccaaatatttctttctgttggataatgcattaaaaattgcaaacagtttacaaacttttggagcaatggtggccttgatcataaagtagggactgcttctaccgtatacatgcttggtggtgtatttgtgatatctggctaaagtttctacatggaaattgactgactttagttttgagacttctgggaaccagtcaggcaaaatagtgaaactgtgtatcctgtttccaagagttgtcttttaaggttatctgcttcattcatttggcctgacttgctaggcaaatgcctagggtaaatatgatttgattaactataacaacaacagcaacaacaacaactttattttttagagcagtttgaggttcacagcaaaattgagcagaatgtacagagattttccctatacccgcttcccctacgcatgtgcggcctcccctactatcaacatcccccaccagagtggtttgttacaattaatgaacctacattgacacatcattatcactcaaggtccgtagtttacattagagtccactcttggtgttgtgtatgggtttggtcgattttataatgacatttatccaccattatagtgtcatacatagtaattttgctaccctaaaaatccagtgtgctccacctgttcctccttccctcctccctcatccctggcaaccactgaactttttaacatctccatagttttgccttttccagaatgtcatatcattggaatcacacagtatgcagccttttcaaatgggcttctttccgttagtaataggcatttaagtttcatcctcatcttttcatggcttgatagctcatttctttccctccctcttttcttccctgtcttccttccttcctcttctttcctgtttcctctttcttcttccttttttaagagacaaggtgtctcactctgttgcccaggctggagtgcagtggcccaatcatagctcattgcagccttgaattcctgggctcaagtgatcctcctgcgttagcctcctgagtagctgggatcacaggctccagtcattttagtgctgaataatatttcattatctggatgtaccgcctattcattcacctactgaagaatatcttggttgcttctaagttttggcaattatgagtgaagttactataaacattgtatacaagttttatgtggatgtatgttgtcatctcccttgggcagataccaaggagtgccattgttggatcatatggtaaatatatctttagttttgtacagaattctaggttggtatttttttctctctcagtcctttattttatttggagacagtctcgctatgtcgcccaggctgccatacagtggtgccatctgggctcactgaaacctccacctcccaggttcaagcgattcttgtgccttggcctcccaagtagctgggattacaggagtgcgccaccacgcctgctaatttttgtatttttagtagagacagggttttgccatgttgcccaggctggtctcaaactcctgaccttaagtgattcacccacctcaatctcccaaaatcctgggattacaggcctgagctactgtgcctgatctctctcagtactttaaagaaatatttcattccacttttcttttttttcttctttttgagatggagtctcactctgtcgcctgggctggagtgcagtggcgcgatctcagctcactgccacctccgcctcctgggttcaagtgattctcctgcctcagcctcctgaatagctgagattacaggcgcccaccaccatgcccagctaattttttgcatttttagtagagacgggggttccaccatgttggccaggctggtctcgaactcctgacctcgtgattcgcacatctcggcctcccaaattgctgggattacaggtgtgagctaccacgcctggcccactcttcttgcttacatagtttctgaggagatgtcagatgtaatttttatttttgctcttctgtaggcaagttgagttttttccccctctagcttctctcaggatttttttctttatctttgattttcagtagtttgaaaattatatgcctagctgtcagggttttttgcttgtttgtttttgttttctcaggtgtgactccagaaaggttctaaagaggagctttacaatctcttctctggggtttatggagacttcctttacccttctgtgttagccccttaaagcactgcgtcaaccttaaaagggcacaggaaagggtgtctatgccatttttatgccatttatcctgcttggtgttttctgagctttcttcatctgcggtttaatgtctcacattaatttgtagaaattctctgtcattgtttcaaatttttcttcagttcttttctctgtttcttcttctggtgttcccattatgcttttgtggttgtcgtacagttattggatattttgttccaggcttttttttttccagtctttttttccttttgcttctcggttttgtaggtgtctgttgagatactctcaagtgcagatattctttcctcagctttgtctagtttactaataagcccattaaaggcagtcttcatttctgttacagtctttttgatcagtagcatttcttttttattctttcttaaaatttctgtctttctgcttacattgcccatctgttcttgcatggtttctactttgtccattagagttcttaggatatttatcataattatttcaaatttctggtgtaacaattccaacatccctgcaacatccaagtctagtttcgatgcttactgtgtctcttccagctgtgttttttcctatttaatatgtcttataattttttcttgatagccatacatgatgcattaggtaacagaaactgctgtgagtggacctttagtaatgtggtggtaaggtgtgcatggaggggaaacattttcagtctgttagtgaacttttgtcaacttcacatgtgcttctcaagtccatcctgtaagtgggagagtagggctagagaggactgaagttgggtatatattaaatactttctcctacaaagaagcctagaggggacgcattaggggattttttttcccccagtattcactgtgatgacccttattgagctcctggaggtaaaactcacaaaactgtggttctcccccctgcccatattactacatgtccctggagtttatatctttcagacttgtctgcactgagcttccaccaatttgtcaaatacagatcaggtttccctaccacccgtgcagttgaaaacccacatacaacttttgactcctccagagcttaactactcatagcctgctattgactggaagccttgccaataacataaacagttgattaatacatattttatatgttttctgtattatatattgtattcttacaataaagagaaaagaagatgttattaagaaaatcataaggaagataaaatatatttactgttcattaagtggttcccatgggtgctggttcccatggaggttgccccttgtgagtttttgctcagggaagttgtgattctctatatttgcctgttggtctcctaatttgggagtcatcagttttccctgtgacctcacttctcttacagagttaagaacagttgttggtttttcagtttgttcagtgttttacatgttgttagaacacagtggtacttctaagtttcttaacatgctagatcagaaacctgaagtctcacctaatttggctttttatattttttcttcttttttttcttccattgctaccaaagcatttttcatctgtgtctggggtgacattagagcagaatgtgatttctaggtaaacattattgggctccctagcagaaaaatttttgaaagtagtacatgaattctgtataattaaaattttcttttcatcttaataggtataggtaataggcacggcctattttttttttgctcaacagtctaaaatagtaatttaatcacctaatagccttagttatatagttgaaagaagagttggaaatctgattcatgggttggaaatcacctgtcacatatgagttttaggcactggtcactttattttgaaacagctttggggttttttcctttttcaactcataataggctttaacagcttttagttttgtttctgtttttttaacagcatgagttgccaaatttggttatagcttcttggtacaagatgggtaaatttgctttgtgttgtgtaattactttttattttaaatgctacctcttttatgaacactaactttacactaagattaggaaaatgagaattgcatgtctgcaacaaatagctatctgtagtattaaattgtgaaaatgtagactttggattggagctggcatctcttaatatgtaattgtaacatagagtaaataagtattttgtcccttgtagggtcaaacagtacagtgcatgggcagaattagagatgtaggcttttttttttttttttttttttactggcttagagaaccgtttgatcagctaatatggaattaagtccctagggctgcccaggcacaacattaactgctattaaaggaaaatttaaaagagtattagtgaaggttaaatactgaccatggacatctggcaaaattgatgttttttttcccctccaccattgtttatagtttattgttatttatcagagaattaatgtttattttcagaatctattaccataagaaatctgtttgaggacttcgtatgtgccaggaattctactaaataatgatataatgctgaacagaattagataggatcctcacttcgttaagcttacagtctagtggtatagatcaacattaatcaaagaataacacaaatagaaagcagagcagtggttcatgggattgactgtagagaagcatgagggaagttcccaggtgatggaaaatactttatttcttaatcgtggtggttacatgtgtgcatatgtttatgaaaatatattgtacatttaaagtggatacattttatcacatgtaaattatgactctataaagttaattaaaaagaataactcaggtaaggtggtgtgtgcgcctgtagtcccagctatttctgaggcaggaagatcacttgagcccaggagtttgagttcagcatgggcaacatgagacctgtgagactttgtctctaaaaaaatttaaataaataactaagataaatgtaaaattacagctgtagtaagttctacaaaggagagttacatgggctatgacgatgtaagatagcaagaactgacattggcagggaggaaatgatgatgagtagaagtaaataagtgaagtgtggggattgatgtcaaggggacagtataaaagaaataacagcatgcgccaaggccctaaaattggaaagtccttggcaaattaaaggagtttgaaaaaggccattgtgtgcaaagcagaaaataggtactacaaggtaaaagatggagctaagcggtaggtaaggctaaaccttgtcagccattgttaaatattgaattgtatcctaagcacaactcagtggaaagcagttaaagttctttaattgggggaggcaatgaaggggtaataaaattggttatagaaatactgctctggctctagtgttgagaatgaattggagtagccagagtagattcaagaagactttagtaagattattccaacaggccaggacctgttatagggtggtggcaatggagagagatggacagaatggagagtgtatttaggaggtaaaaatgacagaacttggtgatgcactgaatgtgaaatggggaaggtgtctaggaggactactaggtttatggtttgcgtattagggtggatgatagcagtttcatttactgagacagggagccctggcagagtacccagcttttagagtgggtagggggaaggggagagtgcatctggtgttgggcattttgaagtgatttacatacaacaaactgaaggtatctttaacactgagtccagcaggttagcatatttattcagcaagcattgcacctttttttgttgtttttggggtcttcaactcctggcctcgaatcctccctccttcccccgcctctcccagcctccgcctcccaaagtgctgggatttcaggagtgagccaccgcgcctggccagcatcgcgctgtttgtgcagtgtgccctgtgctaggtcttgcagtgggtaccagtagagacataaaagtacaaaagataattggacgtttagtagagtcctgaaagggggcgggataggaagatacctaaccataagaaaaaccagcaagagcggaaaaggagctagtcctccagatcaataagttaatcacttatgtttgtgattccctgcattttgggtgattctctgtcgaggtcctcttaagtccagacttttgatataatctgcagtttgcgccatttggattcctgaagcatctttacaagccacctacattccttatggagctgtggcacaacagcaagcccacgatgtctcaccggattaataaaaatataggcgctcacgcttttgtttaccgatatagtatctcctcctcccctcactccatcaacccccacgcgacacaactttccggaagtaagcaaaatccgttatcaaggtgaaactccggggaccaggctccacagctgccataaactggatggcacgttagaagccggtgggtgtaggtgaggcacgctggcgcccgcgggcccttctccagccgctacccagtgggaatccgcggggctgaagccccgaaaccaggctgagcgtcccagagcgcaacctccctttcccccagcagcgccggcgccgcagaagccgcgtgtccccaggcgcactcccccaaggtgaacccccgccccccacggaggcggctgggtcgcgggtctgggcggggcgctccggacgccctcccgccgctgcgcacccctcccgcgagctgccagctccctcggcctctccacccaaaactggcccaaccgccaatcgtctgcctctcacctcctacagcaggtgacccatggccaatcgccaggggtctctttgccaggagccgccagggccagccaatcggggcgacccctccgccggggaggggacgggaaaggggtggggggtgaagggggtgaagggggtgtcccgggggacgggctgaacctcagtcaggaccgcctgcaccgcagtccggggatcgggtcgaggggagaagaaaaaggggtgctcgggagcagcccccggctacctcccctggaggcacagagggcgggggccttggcgaatggctttcttgctggccacttgcggagtgagtagaccccgagggtctgggagaggggccggcccctacccctgagtccccggggtcccggccgccaggccggagcgcgaatgtcgtgctcaccctgcctccttcccgccgccccctgggggtttggattcaggatttgttcctagtgtccaagattttgataagaaacttacagaagctgatgcttacctacaaatcttgattgaacaattaaagctttttgatgacaagcttcaaaactgcaaagaagatgaacagagaaagaaaattgaaactctcaaagagacaacaaatagcatggtagaatcaattaaacactgcattgtgttgctgcagattgccaaagaccagagtaatgcggagaagcacgcagatggaatgataagtactattaatcccgtagatgcaatatatcaacctagtcctttggaacctgtgatcagcacaatgccttcccagactgtgttacctccagaacctgttcagttgtgtaagtcagagcagcgtccatcttccctaccagttggacctgtgttggctaccttgggacatcatcagactcctacaccaaatagtacaggcagtggccattcaccaccgagtagcagtctcacttctccaagccacgtgaacttgtctccaaatacagtcccagagttctcttactccagcagtgaagatgaattttatgatgctgatgaattccatcaaagtggctcatccccaaagcgcttaatagattcttctggatctgcctcagtcctgacacacagcagctcgggaaatagtctaaaacgcccagataccacagaatcacttaattcttccttgtccaatggaacaagtgatgctgacctgtttgattcacatgatgacagagatgatgatgcggaggcagggtctgtggaggagcacaagagcgttatcatgcatctcttgtcgcaggttagacttggaatggatcttactaaggtagttcttccaacgtttattcttgaaagaagatctcttttagaaatgtatgcagacttttttgcacatccggacctgtttgtgagcattagtgaccagaaggatcccaaggatcgaatggttcaggttgtgaaatggtacctctcagcctttcatgcgggaaggaaaggatcagttgccaaaaagccatacaatcccattttgggcgagatttttcagtgtcattggacattaccaaatgatactgaagagaacacagaactagtttcagaaggaccagttccctgggtttccaaaaacagtgtaacatttgtggctgagcaggtttcccatcatccacccatttcagccttttatgctgagtgttttaacaagaagatacaattcaatgctcatatctggaccaaatcaaaattccttgggatgtcaattggggtgcacaacatagggcagggctgtgtctcatgtctagactatgatgaacattacattctcacattccccaatggctatggaaggcaagtgtgtccatttcctctgatcagcagtagactctgctgttccttgagacatgccccttccccctcttcctcttaactgtcaaccttacctaaaaacttttgattttgcaggtctatcctcacagtgccctgggtggaattaggaggagaatgcaatattaattgttccaaaacaggctatagtgcaaatatcatcttccacactaaacccttctatgggggcaagaagcacagaattactgccgagattttttctccaaatgacaagaagtctttttgctcaattgaaggggaatggaatggtgtgatgtatgcaaaatatgcaacaggggaaaatacagtctttgtagataccaagaagttgcctataatcaagaagaaagtgaggaagttggaagatcagaacgagtatgaatcccgcagcctttggaaggatgtcactttcaacttaaaaatcagagacattgatgcagcaactgaagcaaagcacaggcttgaagaaagacaaagagcagaagcccgagaaaggaaggagaaggaaattcagtgggagacaaggttatttcatgaagatggagaatgctgggtttatgatgaaccattactgaaacgtcttggtgctgccaagcattaggttggaagatgcaaagtttatacctgatgatcagggcagtaggcataattcagcaacaaacaatcttcctttgggagaaacctgttcattccaatcttctaattacagtggttcctatctcagggatactggactttctgacgcagatgaacaattaaggggaaaagcttcccttttccctctgtggcagttacgattttgacttcagtcctgagaaaaacttcaggttttgaaaatcagatgatgtcttctccttttccaaacaccacacgttgaaagcatttataaatccaagtctgaaactctgcgctctagtactgctgttaagatacacaacttgtttcttagttcatataatctcgggatacacacacacacacacatatatatacacacacatacgtatacacacacatacatatatataaatatacctgatgccagatttttttcataaatattctgcctactgtaaatatgggttcctctgagttgttttagaaaattagcgcaatgtattaaaatcaagtgttaggaaatttcatggtcttacctacaataacttttattttggaattgaactattattaaattgtatctaatcctggaaaaaaaacaaaaatgctagtaaaatgataatgtaccgaaattggagaaatattcaattgtaactcacttttaaaaataataaaaccttagggggggtcccggtacaaatttccccttatagagggcggttttaaatttaattggcggcttttaacaacgtt

SEQ ID NO: 735102 - DNA, 18612 bp, Homo sapiens
  misc_feature (18536)..(18536): n is a, c, g, or t
  misc_feature (18547)..(18547): n is a, c, g, or t
  misc_feature (18552)..(18552): n is a, c, g, or t
  misc_feature (18555)..(18555): n is a, c, g, or t
  misc_feature (18557)..(18557): n is a, c, g, or t
gtaagggtctttacatggtttccagatagttcattagttgttgctttctttttttgtctgttttctgttttttttttttaaataactgtggtatgatgtaataggaacttataatttctgagttgcttatttttcctttacagttatagtaaagttatactcatttattttctcctgctttctgcagagtaaaatactgatttttgtctagaaacaagacagtgcaagacaatgttgaaagtgaaattctatgttaaaatatgccagatttattttaagaatttaatatctgtagtcagttatcaatacaaccaaattacataattatgcatgataataggtaaatactgagaagttcacctcattttcttgttaaaggatttggctattaccgtatgtgtcagttagtactcttttgtatggtagtgaaagaaaactcaacccaaactgattcatgaagaagaaagtaaatctggttagatgtggtttgaattaggtaattcatgtcatgaggactcagatctcccatctctatttctacgttccacttttgcattggcttcattttcggttaggttctcccttggtggtggtaaggtggttgtagcaatgtcagcctcccatttttggaaccgagtccataggaggctattctttctagaccttaataggagtaacacaattattgctcatcaccctagctttggccatgtgtcaaatcctgaccagtcacaatttcacagtcatagattctaccctggagctgggatgttactggcctcactagaaacacattgctgatagggtagaaggtgtgttcatcctacccaacccgacccgcaccaaagtcagaatagggaaaaacagatgttgggtgacatgcaactaacgtctgccgtactacactgaagatatttttctatgtttattctccagtgaaagagcttatatttgtggtacataggggattttgttttaatttagaaaatttaattgtagaaaacatgttttataaccctttctctgtactttgttctatatcaggaattgacttgattagataaggtgacatagggtatcttaggccctacaagatagtaaaccccccatcacttgaaagtattcagtagaggcttaaaaaacattattaaaggatgtggttattaggggactttaagaaatgaatatgaaattgaagtaggaaatctttaagctactctgtgagttatgccttttaaaagcaatttgtaattcctgtagatttcttttaaatttaggcagtttcataaatgactatagcatcattttagcaaatttgtgatcctgtaagaggaggataagtgttttttgtttgtttgtttgttttttgtttttttgagacagagtctcactttgtaccccagaaagtaaatctagttagatgtggtttgtctcggctcactgcaacctccaccccgtgcgttctagcaattctcctgcctcagccaccacacctggcctaagaggggaggataagtgttttagtgatcatattagactgaatgtggcagatgagatttcccgcccccccattgttggttagactgacattcaacattcaacaagagccacctgcccttgtaggcatttctgccactatacccctacataaacctagagtgctattgcttacttgctttccttcaaatacattttttcatttgtggcctccacattcttgtgtgtgatgtcctttctctgtgaaatgtcttctaccctttttttcaaagcctagtttagaactgacctcttctatgaaccctctgccgactggcctttccttccccagtcccccaagttcaaaatgatctctttcctttgaatactatagtatttgcacaattcactatctccttatcatattcttcttgtttatttgttatcagctgatgttgacatcataagttcaggttcctaactagatccaatattggaatttttcagcttttgctaagaagagagcttgtatgtctttgggaataatgggcagaaaaagataactttgagaagtcttagacttctaatagctttgatatttaaaagtacatgtaatacaagaggtttttttcctacatttaatgcatggagaagataggacatttagaaatatggaattaatgttcatttgactggcaaaagattattttctcagatgtagtgaagtgtggtaaagaacttcactctagagccagaatgtctgtgtttgtatcccagagcccaccacttacatttaaccattaacattcaacttactgtctctgagtttcagtggcctcatctataaaatgaggataataagagtacctacttcatagagttgttttagtggttaaataaactaacgtaaacttgctagaacttgataaactaatattggatgagaactggttgaaataatgcctggctatagtaaaaacttggtaaatgttagttgccattacaatgcaactactgttcctaccattccctctgccagtgcctggtattcagtagcactcagtaaatgttagttaaatgaagaaataactgaaggaatgaatgaacaaatggttgatgtagagattgcttttccattgttgtttattgaatattttgagatgtataacatactgtctgttaggcactgtgggatgggcactcacggagctgtcttccaaaggggtataggagaggagacgcagtgatctcagcaacctacctttaaaacatatcctagtatctactgccatgttaggttctcttcttttgctttttttaaaaaaaaattctcacaaaactccccccacccacttcagtttatagatgaggaagctcctactacataatagtgcttcccagtctaattcttgacctcattgtatttatatgtcctttttttttttgacagagtctcactcattgcagtggcacaatcacagctcactgcaacctctgcctcccctgctcaagtgatcctcccacctcaacctcctgagtagctgggactacaggcatgcaccaccacgcctggctaatttttgtatttttttgtagagatgcggttttgccatgttggccaggctggtctcgaactcctgggctcaagccatctgcccactttggcctctgagagtgctgagattataggcatgagccaccattcccagccatgttttcctttttcattgaactttatctactttagccattaaactccactccattggtcttgtcattactaagagctgaaccacctgcaaaatattaagttaaaaagcgttttctttgacaacagttttcttttcttcatcttcctctatcactttacttctgaacttttattctctcattttgatctgacccctacttctctgtttttcctggccatttagtactttcttgttttgctcatcccatttcccagtggagaccttctggtctgctgctttatcactggttttgttagaagacatacaaatggcaaggaggtatatgaaaaggtgcctaacatcattgatcatcagagaaatgcagaccaaaactacaatgagatatcatttcaccccagttaaaatggctttttttttttttttccaaaagacaggcaataacaaagtactggtgaggatgtggagtaaagggaacccacatacactattagtaggaatgtaaattagtacagccactgtggagaacagtttgaaggttcctcaaaaaactaaaaatagagctaccatataatccagcaatcccactgctaggtatatatccaaaagaaaggcaatcaatatacggaagagatacctgcacacccaggtttattgcagcactattcacaatagccaagatttggaagcaacccaggtgtccaacagatgaatggataaagaaaacatggtatataaacacaatggaatactattcagctgtgaaaaagaatgaaatcctgtcatttgcaatcctgtcttgaatagaactggaggtcatgatgttaagtgaaataagacaggcacaaacttcacatgttctcacttatttgtgggagctaaaaattaaaacaatcgaactcatggagctagagaatagaattatggttaccagaggctggaagggtggttgggcgtataagtgtagggggagtggggatggttaatgggtacaaaaaaatgagaacgaataagatctacttgataacacaacagggtgactatagtcaacagtaattatacatttaaaaataactagaagagtataattagattgtaacacaaaagataaatgcttgaggtgatggatacctatttaccctgatgtgattattacttatttcatgcctatatcaaaatatttatactccaaaaatatatatacctactatgtacccacaaaaatttaaaaatttatatattgtttttgctatcacctttagaatttcttgtcattggatagttcgtctgtataccattctggtcttcattccccagggcccccgttgtctgatttttctgcttctagaactgttagaggtcacaaaagcaagatggttgtatctatcacaatttttgtctgactttaactgggtatctgttacgatttagtagtcatcttactgacttcttgttggtttccaattgaatcctcacagtagactgttttcattgtaatcagtatcgaattatagcctgttcccttcttcataaatgaaggctttcttcttcaacagttcttagtgacttcacctgtactttatttctctgctttgaatatttcgaagaaaacatattcttgctctttcccaaggttaacactacatacattaccttgaccacaggatgttttcttgcagattgtgacctaattccatcacccttcagcagcccccaccgttttcatggattcagctaaaccttctgtaagatgactctttttccccctaatctttatatctcttttgatatgtagctttagtctcactttttttccttttggattttgccagttagatgtctccctggaattccacttcagcatggctaagactaagcttgtcttctctttcctccccaaagcaaattgtaattaggatagactgaaggtgacagaagataactaagatcttcttcatcctttcggctcttatggaagctgaattccagtagtcattctaaatttgttgtatgtcagcttatggtatcttttcatgtctttacattcagccaaagaggaagttccttgaaggggagaccagagggcgtgctgtgcttcttaatcctctctttcttaaccagtaagaggcattcagtagatatctgatgatactgattaatagaggggaacttttcagattcttttttttttttaaccctagtaagctttagtacaaactaaatgctgagagattatcaagtaagggattgatcatcacaagaagactcaggatgttacatcctgtaggttttatagtttcctatattgtaaaaaatatgagttatagcagcttgtctggatgtcatacaggtataaaaatcagttttataaacttgagtaaattggggcccattttagaaaaaactcttgcaggctgtgaatgccaatatataagtaaagtattaagtataatgttatttaatgtgggcaaacataaagccaggtgtaaattttttaggtttaaaatcttatagaactatacatccaaaagaaaatttcaagttaaacataatacaaagcaatacaatctaaattaacattaatttaatgtgatgaatgatattgccttgctaaaagtgggtcactacttacaatgtgcaaatggtactcatcgttagggtatagattcttttaaactatgacatacgtacactaccatgtggaacgtgatgatgtgttctctgttctaactactgggaagacttccttggcatagcacatgccatggggtcagttggctttgacttcatatagatatgccatttacttggtcagtgtcacttctatgacaagtagtatgttgtgccagtttgattataagtacaaatatgggcaatgaagtaacttggttttaaggttgttactaagctgagtaacagtgtgtggctatacaaatttttataggctatcaggaatgaaaacacaggagattgttgtagattcaagtattttagattcaagtttgaagatgctcatgcagatgtttaactgagttgtatagacctttatgtttctttctttttctctttttttttttttgagacagagtcttgctctgtcacccaagctggagtgcaatggtgtgatctcggcttactgcaacctccgcctcccaggttcaagcaattctcctgcctcagcctcccaagtagctgggattacagatgtgcaccacgacgcccagctgattttttgtattttagtagaggcggggtctcaccatgttgtcaagatggtctcaatctcctgaccttgtgatccacccacctctgcctcccaaagtgctgtgattacaggcgtgagccaccgcgcctgactgacctttatgtttcttaactttatgctatacatcagttgatatttcaaaaatttaaatggtttctatgattattctttgggctaagaaattgggcattaattgtcctcatatgtatggtttttgtggctacttcatgtagattttatttttggtggttatcaaattggaatttttttttttttttttttttttgagacggagtctcattctgtttcccaggttggagtacagtggtgcaatctcagctcactgcagcctcgacctcccaggctcaagcagtcctctcacctcagccttctaagtagctgggactacaggcacgcaccaccacacctggctagttttttgtgtttttagtagagatggggttttaccctgttggccaggctggtcttgaactcctggcctcaagtgatccacctgcctcagcctcccaaagtgctgggattagaggcatgagccaccacacctggctgaaattggaatttcattggtactgcctgtaattttatgttaatttttttttttttttgtcgtcactagcttttatctaaagcccctagagagaaaggccatgataccttgtatacaaggttataagagtatacaagggaaagggagggctgaagggaacagggtgggctggtacaagcctcattagaaataccattgagtctgtgagtaaaacatcattatatgaaaaggagatgtggttttagggtggtccaattacttttgcaccagcctaataaaattacaagtcattatcaatagagacattgtaaaacctttttttttcccaaaagaagtatcaggtatgataattacatgtctgcccaactttcgttatagattaacataacttaattgtatttaaggtacaatttaggagagttgctgaaaaatgaatctttagtattgggatgccttgattctaccctcaatagctataatggattatgtgtctgagtagattaataaaaatcttttgagcatttttcttgaactacttcactgaagattagctttttgagcatccattttaatttctcagtatataaggatcggtttatcacaactgtattgttttccctggccttgttagattatattttcatatcatgtagaaaaataggtgtattcgttctcccttgaagtcctttgtctcccaaaggaaatggttgcaatacagatgtgtcacctcttccacaggtaaagtggaatggagaagtagccagttaaatagtgcatgctcaatttggaacatttagagcatacaggaaagttatttatttggtaaatattttttaagcatttactatgtttcatgcattgtactagttgtagaggatataattgaatacaactacatgtagcccttgactttatggaactagtctagtataaagatttaagattgcctggcatggtggctcacgccactaatcccagcactttgagaggccaaggcaggattgcttgaggccagaagtttaagagtagcttggtcaacataatgagactccatctctaaaataaatagatagatagatagatagatagatagatagatagatagatagaagtagttagacaacacaaagcagtttcactcatcttgtggcaaggagttatgtatttctaatcaaatttggcaactcaagcattttcaacaaaatctacatgttttttcagaataaagtgaccaacacagaatgttacctgtaaaaatcagagcaataattgctatctaaaataattttgaaaattaagtggtactgaaaggctcatatagcaaaaatatggcctcctgtcattgtactttcctacttcccagactcaccattttcaacattttttagtagtttattttgccattttatagcatagtacctgacattttatttattcaacagacatttcttaagtacctaatacatgccattccttgtttgaagggatgctaaggatacagtggtgaacaaggcgttgtggggttgtatagagggtattcattcctaaccttgaaccaaatatttctttctgttggataatgcattaaaaattgcaaacagtttacaaacttttggagcaatggtggccttgatcataaagtagggactgcttctaccgtatacatgcttggtggtgtatttgtgatatctggctaaagtttctacatggaaattgactgactttagttttgagacttctgggaaccagtcaggcaaaatagtgaaactgtgtatcctgtttccaagagttgtcttttaaggttatctgcttcattcatttggcctgacttgctaggcaaatgcctagggtaaatatgatttgattaactataacaacaacagcaacaacaacaactttattttttagagcagtttgaggttcacagcaaaattgagcagaatgtacagagattttccctatacccgcttcccctacgcatgtgcggcctcccctactatcaacatcccccaccagagtggtttgttacaattaatgaacctacattgacacatcattatcactcaaggtccgtagtttacattagagtccactcttggtgttgtgtatgggtttggtcgattttataatgacatttatccaccattatagtgtcatacatagtaattttgctaccctaaaaatccagtgtgctccacctgttcctccttccctcctccctcatccctggcaaccactgaactttttaacatctccatagttttgccttttccagaatgtcatatcattggaatcacacagtatgcagccttttcaaatgggcttctttccgttagtaataggcatttaagtttcatcctcatcttttcatggcttgatagctcatttctttccctccctcttttcttccctgtcttccttccttcctcttctttcctgtttcctctttcttcttccttttttaagagacaaggtgtctcactctgttgcccaggctggagtgcagtggcccaatcatagctcattgcagccttgaattcctgggctcaagtgatcctcctgcgttagcctcctgagtagctgggatcacaggctccagtcattttagtgctgaataatatttcattatctggatgtaccgcctattcattcacctactgaagaatatcttggttgcttctaagttttggcaattatgagtgaagttactataaacattgtatacaagttttatgtggatgtatgttgtcatctcccttgggcagataccaaggagtgccattgttggatcatatggtaaatatatctttagttttgtacagaattctaggttggtatttttttctctctcagtcctttattttatttggagacagtctcgctatgtcgcccaggctgccatacagtggtgccatctgggctcactgaaacctccacctcccaggttcaagcgattcttgtgccttggcctcccaagtagctgggattacaggagtgcgccaccacgcctgctaatttttgtatttttagtagagacagggttttgccatgttgcccaggctggtctcaaactcctgaccttaagtgattcacccacctcaatctcccaaaatcctgggattacaggcctgagctactgtgcctgatctctctcagtactttaaagaaatatttcattccacttttcttttttttcttctttttgagatggagtctcactctgtcgcctgggctggagtgcagtggcgcgatctcagctcactgccacctccgcctcctgggttcaagtgattctcctgcctcagcctcctgaatagctgagattacaggcgcccaccaccatgcccagctaattttttgcatttttagtagagacgggggttccaccatgttggccaggctggtctcgaactcctgacctcgtgattcgcacatctcggcctcccaaattgctgggattacaggtgtgagctaccacgcctggcccactcttcttgcttacatagtttctgaggagatgtcagatgtaatttttatttttgctcttctgtaggcaagttgagttttttccccctctagcttctctcaggatttttttctttatctttgattttcagtagtttgaaaattatatgcctagctgtcagggttttttgcttgtttgtttttgttttctcaggtgtgactccagaaaggttctaaagaggagctttacaatctcttctctggggtttatggagacttcctttacccttctgtgttagccccttaaagcactgcgtcaaccttaaaagggcacaggaaagggtgtctatgccatttttatgccatttatcctgcttggtgttttctgagctttcttcatctgcggtttaatgtctcacattaatttgtagaaattctctgtcattgtttcaaatttttcttcagttcttttctctgtttcttcttctggtgttcccattatgcttttgtggttgtcgtacagttattggatattttgttccaggcttttttttttccagtctttttttccttttgcttctcggttttgtaggtgtctgttgagatactctcaagtgcagatattctttcctcagctttgtctagtttactaataagcccattaaaggcagtcttcatttctgttacagtctttttgatcagtagcatttcttttttattctttcttaaaatttctgtctttctgcttacattgcccatctgttcttgcatggtttctactttgtccattagagttcttaggatatttatcataattatttcaaatttctggtgtaacaattccaacatccctgcaacatccaagtctagtttcgatgcttactgtgtctcttccagctgtgttttttcctatttaatatgtcttataattttttcttgatagccatacatgatgcattaggtaacagaaactgctgtgagtggacctttagtaatgtggtggtaaggtgtgcatggaggggaaacattttcagtctgttagtgaacttttgtcaacttcacatgtgcttctcaagtccatcctgtaagtgggagagtagggctagagaggactgaagttgggtatatattaaatactttctcctacaaagaagcctagaggggacgcattaggggattttttttcccccagtattcactgtgatgacccttattgagctcctggaggtaaaactcacaaaactgtggttctcccccctgcccatattactacatgtccctggagtttatatctttcagacttgtctgcactgagcttccaccaatttgtcaaatacagatcaggtttccctaccacccgtgcagttgaaaacccacatacaacttttgactcctccagagcttaactactcatagcctgctattgactggaagccttgccaataacataaacagttgattaatacatattttatatgttttctgtattatatattgtattcttacaataaagagaaaagaagatgttattaagaaaatcataaggaagataaaatatatttactgttcattaagtggttcccatgggtgctggttcccatggaggttgccccttgtgagtttttgctcagggaagttgtgattctctatatttgcctgttggtctcctaatttgggagtcatcagttttccctgtgacctcacttctcttacagagttaagaacagttgttggtttttcagtttgttcagtgttttacatgttgttagaacacagtggtacttctaagtttcttaacatgctagatcagaaacctgaagtctcacctaatttggctttttatattttttcttcttttttttcttccattgctaccaaagcatttttcatctgtgtctggggtgacattagagcagaatgtgatttctaggtaaacattattgggctccctagcagaaaaatttttgaaagtagtacatgaattctgtataattaaaattttcttttcatcttaataggtataggtaataggcacggcctattttttttttgctcaacagtctaaaatagtaatttaatcacctaatagccttagttatatagttgaaagaagagttggaaatctgattcatgggttggaaatcacctgtcacatatgagttttaggcactggtcactttattttgaaacagctttggggttttttcctttttcaactcataataggctttaacagcttttagttttgtttctgtttttttaacagcatgagttgccaaatttggttatagcttcttggtacaagatgggtaaatttgctttgtgttgtgtaattactttttattttaaatgctacctcttttatgaacactaactttacactaagattaggaaaatgagaattgcatgtctgcaacaaatagctatctgtagtattaaattgtgaaaatgtagactttggattggagctggcatctcttaatatgtaattgtaacatagagtaaataagtattttgtcccttgtagggtcaaacagtacagtgcatgggcagaattagagatgtaggcttttttttttttttttttttttactggcttagagaaccgtttgatcagctaatatggaattaagtccctagggctgcccaggcacaacattaactgctattaaaggaaaatttaaaagagtattagtgaaggttaaatactgaccatggacatctggcaaaattgatgttttttttcccctccaccattgtttatagtttattgttatttatcagagaattaatgtttattttcagaatctattaccataagaaatctgtttgaggacttcgtatgtgccaggaattctactaaataatgatataatgctgaacagaattagataggatcctcacttcgttaagcttacagtctagtggtatagatcaacattaatcaaagaataacacaaatagaaagcagagcagtggttcatgggattgactgtagagaagcatgagggaagttcccaggtgatggaaaatactttatttcttaatcgtggtggttacatgtgtgcatatgtttatgaaaatatattgtacatttaaagtggatacattttatcacatgtaaattatgactctataaagttaattaaaaagaataactcaggtaaggtggtgtgtgcgcctgtagtcccagctatttctgaggcaggaagatcacttgagcccaggagtttgagttcagcatgggcaacatgagacctgtgagactttgtctctaaaaaaatttaaataaataactaagataaatgtaaaattacagctgtagtaagttctacaaaggagagttacatgggctatgacgatgtaagatagcaagaactgacattggcagggaggaaatgatgatgagtagaagtaaataagtgaagtgtggggattgatgtcaaggggacagtataaaagaaataacagcatgcgccaaggccctaaaattggaaagtccttggcaaattaaaggagtttgaaaaaggccattgtgtgcaaagcagaaaataggtactacaaggtaaaagatggagctaagcggtaggtaaggctaaaccttgtcagccattgttaaatattgaattgtatcctaagcacaactcagtggaaagcagttaaagttctttaattgggggaggcaatgaaggggtaataaaattggttatagaaatactgctctggctctagtgttgagaatgaattggagtagccagagtagattcaagaagactttagtaagattattccaacaggccaggacctgttatagggtggtggcaatggagagagatggacagaatggagagtgtatttaggaggtaaaaatgacagaacttggtgatgcactgaatgtgaaatggggaaggtgtctaggaggactactaggtttatggtttgcgtattagggtggatgatagcagtttcatttactgagacagggagccctggcagagtacccagcttttagagtgggtagggggaaggggagagtgcatctggtgttgggcattttgaagtgatttacatacaacaaactgaaggtatctttaacactgagtccagcaggttagcatatttattcagcaagcattgcacctttttttgttgtttttggggtcttcaactcctggcctcgaatcctccctccttcccccgcctctcccagcctccgcctcccaaagtgctgggatttcaggagtgagccaccgcgcctggccagcatcgcgctgtttgtgcagtgtgccctgtgctaggtcttgcagtgggtaccagtagagacataaaagtacaaaagataattggacgtttagtagagtcctgaaagggggcgggataggaagatacctaaccataagaaaaaccagcaagagcggaaaaggagctagtcctccagatcaataagttaatcacttatgtttgtgattccctgcattttgggtgattctctgtcgaggtcctcttaagtccagacttttgatataatctgcagtttgcgccatttggattcctgaagcatctttacaagccacctacattccttatggagctgtggcacaacagcaagcccacgatgtctcaccggattaataaaaatataggcgctcacgcttttgtttaccgatatagtatctcctcctcccctcactccatcaacccccacgcgacacaactttccggaagtaagcaaaatccgttatcaaggtgaaactccggggaccaggctccacagctgccataaactggatggcacgttagaagccggtgggtgtaggtgaggcacgctggcgcccgcgggcccttctccagccgctacccagtgggaatccgcggggctgaagccccgaaaccaggctgagcgtcccagagcgcaacctccctttcccccagcagcgccggcgccgcagaagccgcgtgtccccaggcgcactcccccaaggtgaacccccgccccccacggaggcggctgggtcgcgggtctgggcggggcgctccggacgccctcccgccgctgcgcacccctcccgcgagctgccagctccctcggcctctccacccaaaactggcccaaccgccaatcgtctgcctctcacctcctacagcaggtgacccatggccaatcgccaggggtctctttgccaggagccgccagggccagccaatcggggcgacccctccgccggggaggggacgggaaaggggtggggggtgaagggggtgaagggggtgtcccgggggacgggctgaacctcagtcaggaccgcctgcaccgcagtccggggatcgggtcgaggggagaagaaaaaggggtgctcgggagcagcccccggctacctcccctggaggcacagagggcgggggccttggcgaatggctttcttgctggccacttgcggagtgagtagaccccgagggtctgggagaggggccggcccctacccctgagtccccggggtcccggccgccaggccggagcgcgaatgtcgtgctcaccctgcctccttcccgccgccccctgggggtttggattcaggatttgttcctagtgtccaagattttgataagaaacttacagaagctgatgcttacctacaaatcttgattgaacaattaaagctttttgatgacaagcttcaaaactgcaaagaagatgaacagagaaagaaaattgaaactctcaaagagacaacaaatagcatggtagaatcaattaaacactgcattgtgttgctgcagattgccaaagaccagagtaatgcggagaagcacgcagatggaatgataagtactattaatcccgtagatgcaatatatcaacctagtcctttggaacctgtgatcagcacaatgccttcccagactgtgttacctccagaacctgttcagttgtgtaagtcagagcagcgtccatcttccctaccagttggacctgtgttggctaccttgggacatcatcagactcctacaccaaatagtacaggcagtggccattcaccaccgagtagcagtctcacttctccaagccacgtgaacttgtctccaaatacagtcccagagttctcttactccagcagtgaagatgaattttatgatgctgatgaattccatcaaagtggctcatccccaaagcgcttaatagattcttctggatctgcctcagtcctgacacacagcagctcgggaaatagtctaaaacgcccagataccacagaatcacttaattcttccttgtccaatggaacaagtgatgctgacctgtttgattcacatgatgacagagatgatgatgcggaggcagggtctgtggaggagcacaagagcgttatcatgcatctcttgtcgcaggttagacttggaatggatcttactaaggtagttcttccaacgtttattcttgaaagaagatctcttttagaaatgtatgcagacttttttgcacatccggacctgtttgtgagcattagtgaccagaaggatcccaaggatcgaatggttcaggttgtgaaatggtacctctcagcctttcatgcgggaaggaaaggatcagttgccaaaaagccatacaatcccattttgggcgagatttttcagtgtcattggacattaccaaatgatactgaagagaacacagaactagtttcagaaggaccagttccctgggtttccaaaaacagtgtaacatttgtggctgagcaggtttcccatcatccacccatttcagccttttatgctgagtgttttaacaagaagatacaattcaatgctcatatctggaccaaatcaaaattccttgggatgtcaattggggtgcacaacatagggcagggctgtgtctcatgtctagactatgatgaacattacattctcacattccccaatggctatggaaggcaagtgtgtccatttcctctgatcagcagtagactctgctgttccttgagacatgccccttccccctcttcctcttaactgtcaaccttacctaaaaacttttgattttgcaggtctatcctcacagtgccctgggtggaattaggaggagaatgcaatattaattgttccaaaacaggctatagtgcaaatatcatcttccacactaaacccttctatgggggcaagaagcacagaattactgccgagattttttctccaaatgacaagaagtctttttgctcaattgaaggggaatggaatggtgtgatgtatgcaaaatatgcaacaggggaaaatacagtctttgtagataccaagaagttgcctataatcaagaagaaagtgaggaagttggaagatcagaacgagtatgaatcccgcagcctttggaaggatgtcactttcaacttaaaaatcagagacattgatgcagcaactgaagcaaagcacaggcttgaagaaagacaaagagcagaagcccgagaaaggaaggagaaggaaattcagtgggagacaaggttatttcatgaagatggagaatgctgggtttatgatgaaccattactgaaacgtcttggtgctgccaagcattaggttggaagatgcaaagtttatacctgatgatcagggcagtaggcataattcagcaacaaacaatcttcctttgggagaaacctgttcattccaatcttctaattacagtggttcctatctcagggatactggactttctgacgcagatgaacaattaaggggaaaagcttcccttttccctctgtggcagttacgattttgacttcagtcctgagaaaaacttcaggttttgaaaatcagatgatgtcttctccttttccaaacaccacacgttgaaagcatttataaatccaagtctgaaactctgcgctctagtactgctgttaagatacacaacttgtttcttagttcatataatctcgggatacacacacacacacacatatatatacacacacatacgtatacacacacatacatatatataaatatacctgatgccagatttttttcataaatattctgcctactgtaaatatggggnccccgggtggntaaanatngngccggtttaacccggggggaattcggggtaccacacaaaaccattgggaggcaca

SEQ ID NO: 735103 - DNA, 18781 bp, Homo sapiens
gtaagggtctttacatggtttccagatagttcattagttgttgctttctttttttgtctgttttctgttttttttttttaaataactgtggtatgatgtaataggaacttataatttctgagttgcttatttttcctttacagttatagtaaagttatactcatttattttctcctgctttctgcagagtaaaatactgatttttgtctagaaacaagacagtgcaagacaatgttgaaagtgaaattctatgttaaaatatgccagatttattttaagaatttaatatctgtagtcagttatcaatacaaccaaattacataattatgcatgataataggtaaatactgagaagttcacctcattttcttgttaaaggatttggctattaccgtatgtgtcagttagtactcttttgtatggtagtgaaagaaaactcaacccaaactgattcatgaagaagaaagtaaatctggttagatgtggtttgaattaggtaattcatgtcatgaggactcagatctcccatctctatttctacgttccacttttgcattggcttcattttcggttaggttctcccttggtggtggtaaggtggttgtagcaatgtcagcctcccatttttggaaccgagtccataggaggctattctttctagaccttaataggagtaacacaattattgctcatcaccctagctttggccatgtgtcaaatcctgaccagtcacaatttcacagtcatagattctaccctggagctgggatgttactggcctcactagaaacacattgctgatagggtagaaggtgtgttcatcctacccaacccgacccgcaccaaagtcagaatagggaaaaacagatgttgggtgacatgcaactaacgtctgccgtactacactgaagatatttttctatgtttattctccagtgaaagagcttatatttgtggtacataggggattttgttttaatttagaaaatttaattgtagaaaacatgttttataaccctttctctgtactttgttctatatcaggaattgacttgattagataaggtgacatagggtatcttaggccctacaagatagtaaaccccccatcacttgaaagtattcagtagaggcttaaaaaacattattaaaggatgtggttattaggggactttaagaaatgaatatgaaattgaagtaggaaatctttaagctactctgtgagttatgccttttaaaagcaatttgtaattcctgtagatttcttttaaatttaggcagtttcataaatgactatagcatcattttagcaaatttgtgatcctgtaagaggaggataagtgttttttgtttgtttgtttgttttttgtttttttgagacagagtctcactttgtaccccagaaagtaaatctagttagatgtggtttgtctcggctcactgcaacctccaccccgtgcgttctagcaattctcctgcctcagccaccacacctggcctaagaggggaggataagtgttttagtgatcatattagactgaatgtggcagatgagatttcccgcccccccattgttggttagactgacattcaacattcaacaagagccacctgcccttgtaggcatttctgccactatacccctacataaacctagagtgctattgcttacttgctttccttcaaatacattttttcatttgtggcctccacattcttgtgtgtgatgtcctttctctgtgaaatgtcttctaccctttttttcaaagcctagtttagaactgacctcttctatgaaccctctgccgactggcctttccttccccagtcccccaagttcaaaatgatctctttcctttgaatactatagtatttgcacaattcactatctccttatcatattcttcttgtttatttgttatcagctgatgttgacatcataagttcaggttcctaactagatccaatattggaatttttcagcttttgctaagaagagagcttgtatgtctttgggaataatgggcagaaaaagataactttgagaagtcttagacttctaatagctttgatatttaaaagtacatgtaatacaagaggtttttttcctacatttaatgcatggagaagataggacatttagaaatatggaattaatgttcatttgactggcaaaagattattttctcagatgtagtgaagtgtggtaaagaacttcactctagagccagaatgtctgtgtttgtatcccagagcccaccacttacatttaaccattaacattcaacttactgtctctgagtttcagtggcctcatctataaaatgaggataataagagtacctacttcatagagttgttttagtggttaaataaactaacgtaaacttgctagaacttgataaactaatattggatgagaactggttgaaataatgcctggctatagtaaaaacttggtaaatgttagttgccattacaatgcaactactgttcctaccattccctctgccagtgcctggtattcagtagcactcagtaaatgttagttaaatgaagaaataactgaaggaatgaatgaacaaatggttgatgtagagattgcttttccattgttgtttattgaatattttgagatgtataacatactgtctgttaggcactgtgggatgggcactcacggagctgtcttccaaaggggtataggagaggagacgcagtgatctcagcaacctacctttaaaacatatcctagtatctactgccatgttaggttctcttcttttgctttttttaaaaaaaaattctcacaaaactccccccacccacttcagtttatagatgaggaagctcctactacataatagtgcttcccagtctaattcttgacctcattgtatttatatgtcctttttttttttgacagagtctcactcattgcagtggcacaatcacagctcactgcaacctctgcctcccctgctcaagtgatcctcccacctcaacctcctgagtagctgggactacaggcatgcaccaccacgcctggctaatttttgtatttttttgtagagatgcggttttgccatgttggccaggctggtctcgaactcctgggctcaagccatctgcccactttggcctctgagagtgctgagattataggcatgagccaccattcccagccatgttttcctttttcattgaactttatctactttagccattaaactccactccattggtcttgtcattactaagagctgaaccacctgcaaaatattaagttaaaaagcgttttctttgacaacagttttcttttcttcatcttcctctatcactttacttctgaacttttattctctcattttgatctgacccctacttctctgtttttcctggccatttagtactttcttgttttgctcatcccatttcccagtggagaccttctggtctgctgctttatcactggttttgttagaagacatacaaatggcaaggaggtatatgaaaaggtgcctaacatcattgatcatcagagaaatgcagaccaaaactacaatgagatatcatttcaccccagttaaaatggctttttttttttttttccaaaagacaggcaataacaaagtactggtgaggatgtggagtaaagggaacccacatacactattagtaggaatgtaaattagtacagccactgtggagaacagtttgaaggttcctcaaaaaactaaaaatagagctaccatataatccagcaatcccactgctaggtatatatccaaaagaaaggcaatcaatatacggaagagatacctgcacacccaggtttattgcagcactattcacaatagccaagatttggaagcaacccaggtgtccaacagatgaatggataaagaaaacatggtatataaacacaatggaatactattcagctgtgaaaaagaatgaaatcctgtcatttgcaatcctgtcttgaatagaactggaggtcatgatgttaagtgaaataagacaggcacaaacttcacatgttctcacttatttgtgggagctaaaaattaaaacaatcgaactcatggagctagagaatagaattatggttaccagaggctggaagggtggttgggcgtataagtgtagggggagtggggatggttaatgggtacaaaaaaatgagaacgaataagatctacttgataacacaacagggtgactatagtcaacagtaattatacatttaaaaataactagaagagtataattagattgtaacacaaaagataaatgcttgaggtgatggatacctatttaccctgatgtgattattacttatttcatgcctatatcaaaatatttatactccaaaaatatatatacctactatgtacccacaaaaatttaaaaatttatatattgtttttgctatcacctttagaatttcttgtcattggatagttcgtctgtataccattctggtcttcattccccagggcccccgttgtctgatttttctgcttctagaactgttagaggtcacaaaagcaagatggttgtatctatcacaatttttgtctgactttaactgggtatctgttacgatttagtagtcatcttactgacttcttgttggtttccaattgaatcctcacagtagactgttttcattgtaatcagtatcgaattatagcctgttcccttcttcataaatgaaggctttcttcttcaacagttcttagtgacttcacctgtactttatttctctgctttgaatatttcgaagaaaacatattcttgctctttcccaaggttaacactacatacattaccttgaccacaggatgttttcttgcagattgtgacctaattccatcacccttcagcagcccccaccgttttcatggattcagctaaaccttctgtaagatgactctttttccccctaatctttatatctcttttgatatgtagctttagtctcactttttttccttttggattttgccagttagatgtctccctggaattccacttcagcatggctaagactaagcttgtcttctctttcctccccaaagcaaattgtaattaggatagactgaaggtgacagaagataactaagatcttcttcatcctttcggctcttatggaagctgaattccagtagtcattctaaatttgttgtatgtcagcttatggtatcttttcatgtctttacattcagccaaagaggaagttccttgaaggggagaccagagggcgtgctgtgcttcttaatcctctctttcttaaccagtaagaggcattcagtagatatctgatgatactgattaatagaggggaacttttcagattcttttttttttttaaccctagtaagctttagtacaaactaaatgctgagagattatcaagtaagggattgatcatcacaagaagactcaggatgttacatcctgtaggttttatagtttcctatattgtaaaaaatatgagttatagcagcttgtctggatgtcatacaggtataaaaatcagttttataaacttgagtaaattggggcccattttagaaaaaactcttgcaggctgtgaatgccaatatataagtaaagtattaagtataatgttatttaatgtgggcaaacataaagccaggtgtaaattttttaggtttaaaatcttatagaactatacatccaaaagaaaatttcaagttaaacataatacaaagcaatacaatctaaattaacattaatttaatgtgatgaatgatattgccttgctaaaagtgggtcactacttacaatgtgcaaatggtactcatcgttagggtatagattcttttaaactatgacatacgtacactaccatgtggaacgtgatgatgtgttctctgttctaactactgggaagacttccttggcatagcacatgccatggggtcagttggctttgacttcatatagatatgccatttacttggtcagtgtcacttctatgacaagtagtatgttgtgccagtttgattataagtacaaatatgggcaatgaagtaacttggttttaaggttgttactaagctgagtaacagtgtgtggctatacaaatttttataggctatcaggaatgaaaacacaggagattgttgtagattcaagtattttagattcaagtttgaagatgctcatgcagatgtttaactgagttgtatagacctttatgtttctttctttttctctttttttttttttgagacagagtcttgctctgtcacccaagctggagtgcaatggtgtgatctcggcttactgcaacctccgcctcccaggttcaagcaattctcctgcctcagcctcccaagtagctgggattacagatgtgcaccacgacgcccagctgattttttgtattttagtagaggcggggtctcaccatgttgtcaagatggtctcaatctcctgaccttgtgatccacccacctctgcctcccaaagtgctgtgattacaggcgtgagccaccgcgcctgactgacctttatgtttcttaactttatgctatacatcagttgatatttcaaaaatttaaatggtttctatgattattctttgggctaagaaattgggcattaattgtcctcatatgtatggtttttgtggctacttcatgtagattttatttttggtggttatcaaattggaatttttttttttttttttttttttgagacggagtctcattctgtttcccaggttggagtacagtggtgcaatctcagctcactgcagcctcgacctcccaggctcaagcagtcctctcacctcagccttctaagtagctgggactacaggcacgcaccaccacacctggctagttttttgtgtttttagtagagatggggttttaccctgttggccaggctggtcttgaactcctggcctcaagtgatccacctgcctcagcctcccaaagtgctgggattagaggcatgagccaccacacctggctgaaattggaatttcattggtactgcctgtaattttatgttaatttttttttttttttgtcgtcactagcttttatctaaagcccctagagagaaaggccatgataccttgtatacaaggttataagagtatacaagggaaagggagggctgaagggaacagggtgggctggtacaagcctcattagaaataccattgagtctgtgagtaaaacatcattatatgaaaaggagatgtggttttagggtggtccaattacttttgcaccagcctaataaaattacaagtcattatcaatagagacattgtaaaacctttttttttcccaaaagaagtatcaggtatgataattacatgtctgcccaactttcgttatagattaacataacttaattgtatttaaggtacaatttaggagagttgctgaaaaatgaatctttagtattgggatgccttgattctaccctcaatagctataatggattatgtgtctgagtagattaataaaaatcttttgagcatttttcttgaactacttcactgaagattagctttttgagcatccattttaatttctcagtatataaggatcggtttatcacaactgtattgttttccctggccttgttagattatattttcatatcatgtagaaaaataggtgtattcgttctcccttgaagtcctttgtctcccaaaggaaatggttgcaatacagatgtgtcacctcttccacaggtaaagtggaatggagaagtagccagttaaatagtgcatgctcaatttggaacatttagagcatacaggaaagttatttatttggtaaatattttttaagcatttactatgtttcatgcattgtactagttgtagaggatataattgaatacaactacatgtagcccttgactttatggaactagtctagtataaagatttaagattgcctggcatggtggctcacgccactaatcccagcactttgagaggccaaggcaggattgcttgaggccagaagtttaagagtagcttggtcaacataatgagactccatctctaaaataaatagatagatagatagatagatagatagatagatagatagatagaagtagttagacaacacaaagcagtttcactcatcttgtggcaaggagttatgtatttctaatcaaatttggcaactcaagcattttcaacaaaatctacatgttttttcagaataaagtgaccaacacagaatgttacctgtaaaaatcagagcaataattgctatctaaaataattttgaaaattaagtggtactgaaaggctcatatagcaaaaatatggcctcctgtcattgtactttcctacttcccagactcaccattttcaacattttttagtagtttattttgccattttatagcatagtacctgacattttatttattcaacagacatttcttaagtacctaatacatgccattccttgtttgaagggatgctaaggatacagtggtgaacaaggcgttgtggggttgtatagagggtattcattcctaaccttgaaccaaatatttctttctgttggataatgcattaaaaattgcaaacagtttacaaacttttggagcaatggtggccttgatcataaagtagggactgcttctaccgtatacatgcttggtggtgtatttgtgatatctggctaaagtttctacatggaaattgactgactttagttttgagacttctgggaaccagtcaggcaaaatagtgaaactgtgtatcctgtttccaagagttgtcttttaaggttatctgcttcattcatttggcctgacttgctaggcaaatgcctagggtaaatatgatttgattaactataacaacaacagcaacaacaacaactttattttttagagcagtttgaggttcacagcaaaattgagcagaatgtacagagattttccctatacccgcttcccctacgcatgtgcggcctcccctactatcaacatcccccaccagagtggtttgttacaattaatgaacctacattgacacatcattatcactcaaggtccgtagtttacattagagtccactcttggtgttgtgtatgggtttggtcgattttataatgacatttatccaccattatagtgtcatacatagtaattttgctaccctaaaaatccagtgtgctccacctgttcctccttccctcctccctcatccctggcaaccactgaactttttaacatctccatagttttgccttttccagaatgtcatatcattggaatcacacagtatgcagccttttcaaatgggcttctttccgttagtaataggcatttaagtttcatcctcatcttttcatggcttgatagctcatttctttccctccctcttttcttccctgtcttccttccttcctcttctttcctgtttcctctttcttcttccttttttaagagacaaggtgtctcactctgttgcccaggctggagtgcagtggcccaatcatagctcattgcagccttgaattcctgggctcaagtgatcctcctgcgttagcctcctgagtagctgggatcacaggctccagtcattttagtgctgaataatatttcattatctggatgtaccgcctattcattcacctactgaagaatatcttggttgcttctaagttttggcaattatgagtgaagttactataaacattgtatacaagttttatgtggatgtatgttgtcatctcccttgggcagataccaaggagtgccattgttggatcatatggtaaatatatctttagttttgtacagaattctaggttggtatttttttctctctcagtcctttattttatttggagacagtctcgctatgtcgcccaggctgccatacagtggtgccatctgggctcactgaaacctccacctcccaggttcaagcgattcttgtgccttggcctcccaagtagctgggattacaggagtgcgccaccacgcctgctaatttttgtatttttagtagagacagggttttgccatgttgcccaggctggtctcaaactcctgaccttaagtgattcacccacctcaatctcccaaaatcctgggattacaggcctgagctactgtgcctgatctctctcagtactttaaagaaatatttcattccacttttcttttttttcttctttttgagatggagtctcactctgtcgcctgggctggagtgcagtggcgcgatctcagctcactgccacctccgcctcctgggttcaagtgattctcctgcctcagcctcctgaatagctgagattacaggcgcccaccaccatgcccagctaattttttgcatttttagtagagacgggggttccaccatgttggccaggctggtctcgaactcctgacctcgtgattcgcacatctcggcctcccaaattgctgggattacaggtgtgagctaccacgcctggcccactcttcttgcttacatagtttctgaggagatgtcagatgtaatttttatttttgctcttctgtaggcaagttgagttttttccccctctagcttctctcaggatttttttctttatctttgattttcagtagtttgaaaattatatgcctagctgtcagggttttttgcttgtttgtttttgttttctcaggtgtgactccagaaaggttctaaagaggagctttacaatctcttctctggggtttatggagacttcctttacccttctgtgttagccccttaaagcactgcgtcaaccttaaaagggcacaggaaagggtgtctatgccatttttatgccatttatcctgcttggtgttttctgagctttcttcatctgcggtttaatgtctcacattaatttgtagaaattctctgtcattgtttcaaatttttcttcagttcttttctctgtttcttcttctggtgttcccattatgcttttgtggttgtcgtacagttattggatattttgttccaggcttttttttttccagtctttttttccttttgcttctcggttttgtaggtgtctgttgagatactctcaagtgcagatattctttcctcagctttgtctagtttactaataagcccattaaaggcagtcttcatttctgttacagtctttttgatcagtagcatttcttttttattctttcttaaaatttctgtctttctgcttacattgcccatctgttcttgcatggtttctactttgtccattagagttcttaggatatttatcataattatttcaaatttctggtgtaacaattccaacatccctgcaacatccaagtctagtttcgatgcttactgtgtctcttccagctgtgttttttcctatttaatatgtcttataattttttcttgatagccatacatgatgcattaggtaacagaaactgctgtgagtggacctttagtaatgtggtggtaaggtgtgcatggaggggaaacattttcagtctgttagtgaacttttgtcaacttcacatgtgcttctcaagtccatcctgtaagtgggagagtagggctagagaggactgaagttgggtatatattaaatactttctcctacaaagaagcctagaggggacgcattaggggattttttttcccccagtattcactgtgatgacccttattgagctcctggaggtaaaactcacaaaactgtggttctcccccctgcccatattactacatgtccctggagtttatatctttcagacttgtctgcactgagcttccaccaatttgtcaaatacagatcaggtttccctaccacccgtgcagttgaaaacccacatacaacttttgactcctccagagcttaactactcatagcctgctattgactggaagccttgccaataacataaacagttgattaatacatattttatatgttttctgtattatatattgtattcttacaataaagagaaaagaagatgttattaagaaaatcataaggaagataaaatatatttactgttcattaagtggttcccatgggtgctggttcccatggaggttgccccttgtgagtttttgctcagggaagttgtgattctctatatttgcctgttggtctcctaatttgggagtcatcagttttccctgtgacctcacttctcttacagagttaagaacagttgttggtttttcagtttgttcagtgttttacatgttgttagaacacagtggtacttctaagtttcttaacatgctagatcagaaacctgaagtctcacctaatttggctttttatattttttcttcttttttttcttccattgctaccaaagcatttttcatctgtgtctggggtgacattagagcagaatgtgatttctaggtaaacattattgggctccctagcagaaaaatttttgaaagtagtacatgaattctgtataattaaaattttcttttcatcttaataggtataggtaataggcacggcctattttttttttgctcaacagtctaaaatagtaatttaatcacctaatagccttagttatatagttgaaagaagagttggaaatctgattcatgggttggaaatcacctgtcacatatgagttttaggcactggtcactttattttgaaacagctttggggttttttcctttttcaactcataataggctttaacagcttttagttttgtttctgtttttttaacagcatgagttgccaaatttggttatagcttcttggtacaagatgggtaaatttgctttgtgttgtgtaattactttttattttaaatgctacctcttttatgaacactaactttacactaagattaggaaaatgagaattgcatgtctgcaacaaatagctatctgtagtattaaattgtgaaaatgtagactttggattggagctggcatctcttaatatgtaattgtaacatagagtaaataagtattttgtcccttgtagggtcaaacagtacagtgcatgggcagaattagagatgtaggcttttttttttttttttttttttactggcttagagaaccgtttgatcagctaatatggaattaagtccctagggctgcccaggcacaacattaactgctattaaaggaaaatttaaaagagtattagtgaaggttaaatactgaccatggacatctggcaaaattgatgttttttttcccctccaccattgtttatagtttattgttatttatcagagaattaatgtttattttcagaatctattaccataagaaatctgtttgaggacttcgtatgtgccaggaattctactaaataatgatataatgctgaacagaattagataggatcctcacttcgttaagcttacagtctagtggtatagatcaacattaatcaaagaataacacaaatagaaagcagagcagtggttcatgggattgactgtagagaagcatgagggaagttcccaggtgatggaaaatactttatttcttaatcgtggtggttacatgtgtgcatatgtttatgaaaatatattgtacatttaaagtggatacattttatcacatgtaaattatgactctataaagttaattaaaaagaataactcaggtaaggtggtgtgtgcgcctgtagtcccagctatttctgaggcaggaagatcacttgagcccaggagtttgagttcagcatgggcaacatgagacctgtgagactttgtctctaaaaaaatttaaataaataactaagataaatgtaaaattacagctgtagtaagttctacaaaggagagttacatgggctatgacgatgtaagatagcaagaactgacattggcagggaggaaatgatgatgagtagaagtaaataagtgaagtgtggggattgatgtcaaggggacagtataaaagaaataacagcatgcgccaaggccctaaaattggaaagtccttggcaaattaaaggagtttgaaaaaggccattgtgtgcaaagcagaaaataggtactacaaggtaaaagatggagctaagcggtaggtaaggctaaaccttgtcagccattgttaaatattgaattgtatcctaagcacaactcagtggaaagcagttaaagttctttaattgggggaggcaatgaaggggtaataaaattggttatagaaatactgctctggctctagtgttgagaatgaattggagtagccagagtagattcaagaagactttagtaagattattccaacaggccaggacctgttatagggtggtggcaatggagagagatggacagaatggagagtgtatttaggaggtaaaaatgacagaacttggtgatgcactgaatgtgaaatggggaaggtgtctaggaggactactaggtttatggtttgcgtattagggtggatgatagcagtttcatttactgagacagggagccctggcagagtacccagcttttagagtgggtagggggaaggggagagtgcatctggtgttgggcattttgaagtgatttacatacaacaaactgaaggtatctttaacactgagtccagcaggttagcatatttattcagcaagcattgcacctttttttgttgtttttggggtcttcaactcctggcctcgaatcctccctccttcccccgcctctcccagcctccgcctcccaaagtgctgggatttcaggagtgagccaccgcgcctggccagcatcgcgctgtttgtgcagtgtgccctgtgctaggtcttgcagtgggtaccagtagagacataaaagtacaaaagataattggacgtttagtagagtcctgaaagggggcgggataggaagatacctaaccataagaaaaaccagcaagagcggaaaaggagctagtcctccagatcaataagttaatcacttatgtttgtgattccctgcattttgggtgattctctgtcgaggtcctcttaagtccagacttttgatataatctgcagtttgcgccatttggattcctgaagcatctttacaagccacctacattccttatggagctgtggcacaacagcaagcccacgatgtctcaccggattaataaaaatataggcgctcacgcttttgtttaccgatatagtatctcctcctcccctcactccatcaacccccacgcgacacaactttccggaagtaagcaaaatccgttatcaaggtgaaactccggggaccaggctccacagctgccataaactggatggcacgttagaagccggtgggtgtaggtgaggcacgctggcgcccgcgggcccttctccagccgctacccagtgggaatccgcggggctgaagccccgaaaccaggctgagcgtcccagagcgcaacctccctttcccccagcagcgccggcgccgcagaagccgcgtgtccccaggcgcactcccccaaggtgaacccccgccccccacggaggcggctgggtcgcgggtctgggcggggcgctccggacgccctcccgccgctgcgcacccctcccgcgagctgccagctccctcggcctctccacccaaaactggcccaaccgccaatcgtctgcctctcacctcctacagcaggtgacccatggccaatcgccaggggtctctttgccaggagccgccagggccagccaatcggggcgacccctccgccggggaggggacgggaaaggggtggggggtgaagggggtgaagggggtgtcccgggggacgggctgaacctcagtcaggaccgcctgcaccgcagtccggggatcgggtcgaggggagaagaaaaaggggtgctcgggagcagcccccggctacctcccctggaggcacagagggcgggggccttggcgaatggctttcttgctggccacttgcggagtgagtagaccccgagggtctgggagaggggccggcccctacccctgagtccccggggtcccggccgccaggccggagcgcgaatgtcgtgctcaccctgcctccttcccgccgccccctgggggtttggattcaggatttgttcctagtgtccaagattttgataagaaacttacagaagctgatgcttacctacaaatcttgattgaacaattaaagctttttgatgacaagcttcaaaactgcaaagaagatgaacagagaaagaaaattgaaactctcaaagagacaacaaatagcatggtagaatcaattaaacactgcattgtgttgctgcagattgccaaagaccagagtaatgcggagaagcacgcagatggaatgataagtactattaatcccgtagatgcaatatatcaacctagtcctttggaacctgtgatcagcacaatgccttcccagactgtgttacctccagaacctgttcagttgtgtaagtcagagcagcgtccatcttccctaccagttggacctgtgttggctaccttgggacatcatcagactcctacaccaaatagtacaggcagtggccattcaccaccgagtagcagtctcacttctccaagccacgtgaacttgtctccaaatacagtcccagagttctcttactccagcagtgaagatgaattttatgatgctgatgaattccatcaaagtggctcatccccaaagcgcttaatagattcttctggatctgcctcagtcctgacacacagcagctcgggaaatagtctaaaacgcccagataccacagaatcacttaattcttccttgtccaatggaacaagtgatgctgacctgtttgattcacatgatgacagagatgatgatgcggaggcagggtctgtggaggagcacaagagcgttatcatgcatctcttgtcgcaggttagacttggaatggatcttactaaggtagttcttccaacgtttattcttgaaagaagatctcttttagaaatgtatgcagacttttttgcacatccggacctgtttgtgagcattagtgaccagaaggatcccaaggatcgaatggttcaggttgtgaaatggtacctctcagcctttcatgcgggaaggaaaggatcagttgccaaaaagccatacaatcccattttgggcgagatttttcagtgtcattggacattaccaaatgatactgaagagaacacagaactagtttcagaaggaccagttccctgggtttccaaaaacagtgtaacatttgtggctgagcaggtttcccatcatccacccatttcagccttttatgctgagtgttttaacaagaagatacaattcaatgctcatatctggaccaaatcaaaattccttgggatgtcaattggggtgcacaacatagggcagggctgtgtctcatgtctagactatgatgaacattacattctcacattccccaatggctatggaaggtctatcctcacagtgccctgggtggaattaggaggagaatgcaatattaattgttccaaaacaggctatagtgcaaatatcatcttccacactaaacccttctatgggggcaagaagcacagaattactgccgagattttgtaggtattttttctgccttagagctcttatgcttttctgaaataactgccttttgtcttgaactacagcttctggattaggagtgtgaaagaatggttctgtctttgtaagcgtgtttcacattttatgtgtcatgtcttttgctgaagtcccatatcagaagaagacctaaaacatatattcagagcagtcagaggtcattgataggtttccttcctaaaaacctgacttgcaatgttgaactaaaagaggccttcctaggttgcctagctaaaccagattatggatccctaatttattcttgccagattgaatgatgagctggtccttacagcagactttgtgacccctgcagcactgcctcctggtcctcacagctatccctttttctgtgcctttgctggggaaaaacagtaaccatcacattttgcacgcatctggcttgcttccacttgacactcttgggtcacgtgcagatgactgtgccagtcagtggaaagtctatagtgatggcaccatgactctctctgcctctggaacccttaactgggggggaaggggacagtgggaaagaaagtttcaggcgttgatagcagctctcctccctctgccctggtcatgtctcccttttctggcctctttcaatcctgtttatgccttgcccttcctaaccaggcctttgctgtgttgcttatcttctcacattccatagttgtgtgtccaagtagaggtctgttacggcttttgcagaatggatccttgctcagggaaagtattcacaccatctggcacagaggtccctttcaacctgaggatgaaagcctgcattatattcttaagcaaagccttccctgacccccagtgcccatgtaagctcaccacagcacttaccacctagaatttcaatggtggttacgtctctctccactacgctgtgaacagcttgaggatagggaatttgccaactctgttatggtccttgcacccagaataggacgttcttgcccaaacccaccattcttgggatctcaagttcataagcgtcctgttgaaggccctcattcttatagttagccctggggagtccagttctgttaagatgctttcatcaaaaacttcacagttgctcttctgtgctctactctgtagttgggccacactgagcagattctttggtagaattttcaacttgagactaacacaagtatttccttttctgttcag

SEQ ID NO: 735104 - DNA, 19177 bp, Homo sapiens
gtaagggtctttacatggtttccagatagttcattagttgttgctttctttttttgtctgttttctgttttttttttttaaataactgtggtatgatgtaataggaacttataatttctgagttgcttatttttcctttacagttatagtaaagttatactcatttattttctcctgctttctgcagagtaaaatactgatttttgtctagaaacaagacagtgcaagacaatgttgaaagtgaaattctatgttaaaatatgccagatttattttaagaatttaatatctgtagtcagttatcaatacaaccaaattacataattatgcatgataataggtaaatactgagaagttcacctcattttcttgttaaaggatttggctattaccgtatgtgtcagttagtactcttttgtatggtagtgaaagaaaactcaacccaaactgattcatgaagaagaaagtaaatctggttagatgtggtttgaattaggtaattcatgtcatgaggactcagatctcccatctctatttctacgttccacttttgcattggcttcattttcggttaggttctcccttggtggtggtaaggtggttgtagcaatgtcagcctcccatttttggaaccgagtccataggaggctattctttctagaccttaataggagtaacacaattattgctcatcaccctagctttggccatgtgtcaaatcctgaccagtcacaatttcacagtcatagattctaccctggagctgggatgttactggcctcactagaaacacattgctgatagggtagaaggtgtgttcatcctacccaacccgacccgcaccaaagtcagaatagggaaaaacagatgttgggtgacatgcaactaacgtctgccgtactacactgaagatatttttctatgtttattctccagtgaaagagcttatatttgtggtacataggggattttgttttaatttagaaaatttaattgtagaaaacatgttttataaccctttctctgtactttgttctatatcaggaattgacttgattagataaggtgacatagggtatcttaggccctacaagatagtaaaccccccatcacttgaaagtattcagtagaggcttaaaaaacattattaaaggatgtggttattaggggactttaagaaatgaatatgaaattgaagtaggaaatctttaagctactctgtgagttatgccttttaaaagcaatttgtaattcctgtagatttcttttaaatttaggcagtttcataaatgactatagcatcattttagcaaatttgtgatcctgtaagaggaggataagtgttttttgtttgtttgtttgttttttgtttttttgagacagagtctcactttgtaccccagaaagtaaatctagttagatgtggtttgtctcggctcactgcaacctccaccccgtgcgttctagcaattctcctgcctcagccaccacacctggcctaagaggggaggataagtgttttagtgatcatattagactgaatgtggcagatgagatttcccgcccccccattgttggttagactgacattcaacattcaacaagagccacctgcccttgtaggcatttctgccactatacccctacataaacctagagtgctattgcttacttgctttccttcaaatacattttttcatttgtggcctccacattcttgtgtgtgatgtcctttctctgtgaaatgtcttctaccctttttttcaaagcctagtttagaactgacctcttctatgaaccctctgccgactggcctttccttccccagtcccccaagttcaaaatgatctctttcctttgaatactatagtatttgcacaattcactatctccttatcatattcttcttgtttatttgttatcagctgatgttgacatcataagttcaggttcctaactagatccaatattggaatttttcagcttttgctaagaagagagcttgtatgtctttgggaataatgggcagaaaaagataactttgagaagtcttagacttctaatagctttgatatttaaaagtacatgtaatacaagaggtttttttcctacatttaatgcatggagaagataggacatttagaaatatggaattaatgttcatttgactggcaaaagattattttctcagatgtagtgaagtgtggtaaagaacttcactctagagccagaatgtctgtgtttgtatcccagagcccaccacttacatttaaccattaacattcaacttactgtctctgagtttcagtggcctcatctataaaatgaggataataagagtacctacttcatagagttgttttagtggttaaataaactaacgtaaacttgctagaacttgataaactaatattggatgagaactggttgaaataatgcctggctatagtaaaaacttggtaaatgttagttgccattacaatgcaactactgttcctaccattccctctgccagtgcctggtattcagtagcactcagtaaatgttagttaaatgaagaaataactgaaggaatgaatgaacaaatggttgatgtagagattgcttttccattgttgtttattgaatattttgagatgtataacatactgtctgttaggcactgtgggatgggcactcacggagctgtcttccaaaggggtataggagaggagacgcagtgatctcagcaacctacctttaaaacatatcctagtatctactgccatgttaggttctcttcttttgctttttttaaaaaaaaattctcacaaaactccccccacccacttcagtttatagatgaggaagctcctactacataatagtgcttcccagtctaattcttgacctcattgtatttatatgtcctttttttttttgacagagtctcactcattgcagtggcacaatcacagctcactgcaacctctgcctcccctgctcaagtgatcctcccacctcaacctcctgagtagctgggactacaggcatgcaccaccacgcctggctaatttttgtatttttttgtagagatgcggttttgccatgttggccaggctggtctcgaactcctgggctcaagccatctgcccactttggcctctgagagtgctgagattataggcatgagccaccattcccagccatgttttcctttttcattgaactttatctactttagccattaaactccactccattggtcttgtcattactaagagctgaaccacctgcaaaatattaagttaaaaagcgttttctttgacaacagttttcttttcttcatcttcctctatcactttacttctgaacttttattctctcattttgatctgacccctacttctctgtttttcctggccatttagtactttcttgttttgctcatcccatttcccagtggagaccttctggtctgctgctttatcactggttttgttagaagacatacaaatggcaaggaggtatatgaaaaggtgcctaacatcattgatcatcagagaaatgcagaccaaaactacaatgagatatcatttcaccccagttaaaatggctttttttttttttttccaaaagacaggcaataacaaagtactggtgaggatgtggagtaaagggaacccacatacactattagtaggaatgtaaattagtacagccactgtggagaacagtttgaaggttcctcaaaaaactaaaaatagagctaccatataatccagcaatcccactgctaggtatatatccaaaagaaaggcaatcaatatacggaagagatacctgcacacccaggtttattgcagcactattcacaatagccaagatttggaagcaacccaggtgtccaacagatgaatggataaagaaaacatggtatataaacacaatggaatactattcagctgtgaaaaagaatgaaatcctgtcatttgcaatcctgtcttgaatagaactggaggtcatgatgttaagtgaaataagacaggcacaaacttcacatgttctcacttatttgtgggagctaaaaattaaaacaatcgaactcatggagctagagaatagaattatggttaccagaggctggaagggtggttgggcgtataagtgtagggggagtggggatggttaatgggtacaaaaaaatgagaacgaataagatctacttgataacacaacagggtgactatagtcaacagtaattatacatttaaaaataactagaagagtataattagattgtaacacaaaagataaatgcttgaggtgatggatacctatttaccctgatgtgattattacttatttcatgcctatatcaaaatatttatactccaaaaatatatatacctactatgtacccacaaaaatttaaaaatttatatattgtttttgctatcacctttagaatttcttgtcattggatagttcgtctgtataccattctggtcttcattccccagggcccccgttgtctgatttttctgcttctagaactgttagaggtcacaaaagcaagatggttgtatctatcacaatttttgtctgactttaactgggtatctgttacgatttagtagtcatcttactgacttcttgttggtttccaattgaatcctcacagtagactgttttcattgtaatcagtatcgaattatagcctgttcccttcttcataaatgaaggctttcttcttcaacagttcttagtgacttcacctgtactttatttctctgctttgaatatttcgaagaaaacatattcttgctctttcccaaggttaacactacatacattaccttgaccacaggatgttttcttgcagattgtgacctaattccatcacccttcagcagcccccaccgttttcatggattcagctaaaccttctgtaagatgactctttttccccctaatctttatatctcttttgatatgtagctttagtctcactttttttccttttggattttgccagttagatgtctccctggaattccacttcagcatggctaagactaagcttgtcttctctttcctccccaaagcaaattgtaattaggatagactgaaggtgacagaagataactaagatcttcttcatcctttcggctcttatggaagctgaattccagtagtcattctaaatttgttgtatgtcagcttatggtatcttttcatgtctttacattcagccaaagaggaagttccttgaaggggagaccagagggcgtgctgtgcttcttaatcctctctttcttaaccagtaagaggcattcagtagatatctgatgatactgattaatagaggggaacttttcagattcttttttttttttaaccctagtaagctttagtacaaactaaatgctgagagattatcaagtaagggattgatcatcacaagaagactcaggatgttacatcctgtaggttttatagtttcctatattgtaaaaaatatgagttatagcagcttgtctggatgtcatacaggtataaaaatcagttttataaacttgagtaaattggggcccattttagaaaaaactcttgcaggctgtgaatgccaatatataagtaaagtattaagtataatgttatttaatgtgggcaaacataaagccaggtgtaaattttttaggtttaaaatcttatagaactatacatccaaaagaaaatttcaagttaaacataatacaaagcaatacaatctaaattaacattaatttaatgtgatgaatgatattgccttgctaaaagtgggtcactacttacaatgtgcaaatggtactcatcgttagggtatagattcttttaaactatgacatacgtacactaccatgtggaacgtgatgatgtgttctctgttctaactactgggaagacttccttggcatagcacatgccatggggtcagttggctttgacttcatatagatatgccatttacttggtcagtgtcacttctatgacaagtagtatgttgtgccagtttgattataagtacaaatatgggcaatgaagtaacttggttttaaggttgttactaagctgagtaacagtgtgtggctatacaaatttttataggctatcaggaatgaaaacacaggagattgttgtagattcaagtattttagattcaagtttgaagatgctcatgcagatgtttaactgagttgtatagacctttatgtttctttctttttctctttttttttttttgagacagagtcttgctctgtcacccaagctggagtgcaatggtgtgatctcggcttactgcaacctccgcctcccaggttcaagcaattctcctgcctcagcctcccaagtagctgggattacagatgtgcaccacgacgcccagctgattttttgtattttagtagaggcggggtctcaccatgttgtcaagatggtctcaatctcctgaccttgtgatccacccacctctgcctcccaaagtgctgtgattacaggcgtgagccaccgcgcctgactgacctttatgtttcttaactttatgctatacatcagttgatatttcaaaaatttaaatggtttctatgattattctttgggctaagaaattgggcattaattgtcctcatatgtatggtttttgtggctacttcatgtagattttatttttggtggttatcaaattggaatttttttttttttttttttttttgagacggagtctcattctgtttcccaggttggagtacagtggtgcaatctcagctcactgcagcctcgacctcccaggctcaagcagtcctctcacctcagccttctaagtagctgggactacaggcacgcaccaccacacctggctagttttttgtgtttttagtagagatggggttttaccctgttggccaggctggtcttgaactcctggcctcaagtgatccacctgcctcagcctcccaaagtgctgggattagaggcatgagccaccacacctggctgaaattggaatttcattggtactgcctgtaattttatgttaatttttttttttttttgtcgtcactagcttttatctaaagcccctagagagaaaggccatgataccttgtatacaaggttataagagtatacaagggaaagggagggctgaagggaacagggtgggctggtacaagcctcattagaaataccattgagtctgtgagtaaaacatcattatatgaaaaggagatgtggttttagggtggtccaattacttttgcaccagcctaataaaattacaagtcattatcaatagagacattgtaaaacctttttttttcccaaaagaagtatcaggtatgataattacatgtctgcccaactttcgttatagattaacataacttaattgtatttaaggtacaatttaggagagttgctgaaaaatgaatctttagtattgggatgccttgattctaccctcaatagctataatggattatgtgtctgagtagattaataaaaatcttttgagcatttttcttgaactacttcactgaagattagctttttgagcatccattttaatttctcagtatataaggatcggtttatcacaactgtattgttttccctggccttgttagattatattttcatatcatgtagaaaaataggtgtattcgttctcccttgaagtcctttgtctcccaaaggaaatggttgcaatacagatgtgtcacctcttccacaggtaaagtggaatggagaagtagccagttaaatagtgcatgctcaatttggaacatttagagcatacaggaaagttatttatttggtaaatattttttaagcatttactatgtttcatgcattgtactagttgtagaggatataattgaatacaactacatgtagcccttgactttatggaactagtctagtataaagatttaagattgcctggcatggtggctcacgccactaatcccagcactttgagaggccaaggcaggattgcttgaggccagaagtttaagagtagcttggtcaacataatgagactccatctctaaaataaatagatagatagatagatagatagatagatagatagatagatagaagtagttagacaacacaaagcagtttcactcatcttgtggcaaggagttatgtatttctaatcaaatttggcaactcaagcattttcaacaaaatctacatgttttttcagaataaagtgaccaacacagaatgttacctgtaaaaatcagagcaataattgctatctaaaataattttgaaaattaagtggtactgaaaggctcatatagcaaaaatatggcctcctgtcattgtactttcctacttcccagactcaccattttcaacattttttagtagtttattttgccattttatagcatagtacctgacattttatttattcaacagacatttcttaagtacctaatacatgccattccttgtttgaagggatgctaaggatacagtggtgaacaaggcgttgtggggttgtatagagggtattcattcctaaccttgaaccaaatatttctttctgttggataatgcattaaaaattgcaaacagtttacaaacttttggagcaatggtggccttgatcataaagtagggactgcttctaccgtatacatgcttggtggtgtatttgtgatatctggctaaagtttctacatggaaattgactgactttagttttgagacttctgggaaccagtcaggcaaaatagtgaaactgtgtatcctgtttccaagagttgtcttttaaggttatctgcttcattcatttggcctgacttgctaggcaaatgcctagggtaaatatgatttgattaactataacaacaacagcaacaacaacaactttattttttagagcagtttgaggttcacagcaaaattgagcagaatgtacagagattttccctatacccgcttcccctacgcatgtgcggcctcccctactatcaacatcccccaccagagtggtttgttacaattaatgaacctacattgacacatcattatcactcaaggtccgtagtttacattagagtccactcttggtgttgtgtatgggtttggtcgattttataatgacatttatccaccattatagtgtcatacatagtaattttgctaccctaaaaatccagtgtgctccacctgttcctccttccctcctccctcatccctggcaaccactgaactttttaacatctccatagttttgccttttccagaatgtcatatcattggaatcacacagtatgcagccttttcaaatgggcttctttccgttagtaataggcatttaagtttcatcctcatcttttcatggcttgatagctcatttctttccctccctcttttcttccctgtcttccttccttcctcttctttcctgtttcctctttcttcttccttttttaagagacaaggtgtctcactctgttgcccaggctggagtgcagtggcccaatcatagctcattgcagccttgaattcctgggctcaagtgatcctcctgcgttagcctcctgagtagctgggatcacaggctccagtcattttagtgctgaataatatttcattatctggatgtaccgcctattcattcacctactgaagaatatcttggttgcttctaagttttggcaattatgagtgaagttactataaacattgtatacaagttttatgtggatgtatgttgtcatctcccttgggcagataccaaggagtgccattgttggatcatatggtaaatatatctttagttttgtacagaattctaggttggtatttttttctctctcagtcctttattttatttggagacagtctcgctatgtcgcccaggctgccatacagtggtgccatctgggctcactgaaacctccacctcccaggttcaagcgattcttgtgccttggcctcccaagtagctgggattacaggagtgcgccaccacgcctgctaatttttgtatttttagtagagacagggttttgccatgttgcccaggctggtctcaaactcctgaccttaagtgattcacccacctcaatctcccaaaatcctgggattacaggcctgagctactgtgcctgatctctctcagtactttaaagaaatatttcattccacttttcttttttttcttctttttgagatggagtctcactctgtcgcctgggctggagtgcagtggcgcgatctcagctcactgccacctccgcctcctgggttcaagtgattctcctgcctcagcctcctgaatagctgagattacaggcgcccaccaccatgcccagctaattttttgcatttttagtagagacgggggttccaccatgttggccaggctggtctcgaactcctgacctcgtgattcgcacatctcggcctcccaaattgctgggattacaggtgtgagctaccacgcctggcccactcttcttgcttacatagtttctgaggagatgtcagatgtaatttttatttttgctcttctgtaggcaagttgagttttttccccctctagcttctctcaggatttttttctttatctttgattttcagtagtttgaaaattatatgcctagctgtcagggttttttgcttgtttgtttttgttttctcaggtgtgactccagaaaggttctaaagaggagctttacaatctcttctctggggtttatggagacttcctttacccttctgtgttagccccttaaagcactgcgtcaaccttaaaagggcacaggaaagggtgtctatgccatttttatgccatttatcctgcttggtgttttctgagctttcttcatctgcggtttaatgtctcacattaatttgtagaaattctctgtcattgtttcaaatttttcttcagttcttttctctgtttcttcttctggtgttcccattatgcttttgtggttgtcgtacagttattggatattttgttccaggcttttttttttccagtctttttttccttttgcttctcggttttgtaggtgtctgttgagatactctcaagtgcagatattctttcctcagctttgtctagtttactaataagcccattaaaggcagtcttcatttctgttacagtctttttgatcagtagcatttcttttttattctttcttaaaatttctgtctttctgcttacattgcccatctgttcttgcatggtttctactttgtccattagagttcttaggatatttatcataattatttcaaatttctggtgtaacaattccaacatccctgcaacatccaagtctagtttcgatgcttactgtgtctcttccagctgtgttttttcctatttaatatgtcttataattttttcttgatagccatacatgatgcattaggtaacagaaactgctgtgagtggacctttagtaatgtggtggtaaggtgtgcatggaggggaaacattttcagtctgttagtgaacttttgtcaacttcacatgtgcttctcaagtccatcctgtaagtgggagagtagggctagagaggactgaagttgggtatatattaaatactttctcctacaaagaagcctagaggggacgcattaggggattttttttcccccagtattcactgtgatgacccttattgagctcctggaggtaaaactcacaaaactgtggttctcccccctgcccatattactacatgtccctggagtttatatctttcagacttgtctgcactgagcttccaccaatttgtcaaatacagatcaggtttccctaccacccgtgcagttgaaaacccacatacaacttttgactcctccagagcttaactactcatagcctgctattgactggaagccttgccaataacataaacagttgattaatacatattttatatgttttctgtattatatattgtattcttacaataaagagaaaagaagatgttattaagaaaatcataaggaagataaaatatatttactgttcattaagtggttcccatgggtgctggttcccatggaggttgccccttgtgagtttttgctcagggaagttgtgattctctatatttgcctgttggtctcctaatttgggagtcatcagttttccctgtgacctcacttctcttacagagttaagaacagttgttggtttttcagtttgttcagtgttttacatgttgttagaacacagtggtacttctaagtttcttaacatgctagatcagaaacctgaagtctcacctaatttggctttttatattttttcttcttttttttcttccattgctaccaaagcatttttcatctgtgtctggggtgacattagagcagaatgtgatttctaggtaaacattattgggctccctagcagaaaaatttttgaaagtagtacatgaattctgtataattaaaattttcttttcatcttaataggtataggtaataggcacggcctattttttttttgctcaacagtctaaaatagtaatttaatcacctaatagccttagttatatagttgaaagaagagttggaaatctgattcatgggttggaaatcacctgtcacatatgagttttaggcactggtcactttattttgaaacagctttggggttttttcctttttcaactcataataggctttaacagcttttagttttgtttctgtttttttaacagcatgagttgccaaatttggttatagcttcttggtacaagatgggtaaatttgctttgtgttgtgtaattactttttattttaaatgctacctcttttatgaacactaactttacactaagattaggaaaatgagaattgcatgtctgcaacaaatagctatctgtagtattaaattgtgaaaatgtagactttggattggagctggcatctcttaatatgtaattgtaacatagagtaaataagtattttgtcccttgtagggtcaaacagtacagtgcatgggcagaattagagatgtaggcttttttttttttttttttttttactggcttagagaaccgtttgatcagctaatatggaattaagtccctagggctgcccaggcacaacattaactgctattaaaggaaaatttaaaagagtattagtgaaggttaaatactgaccatggacatctggcaaaattgatgttttttttcccctccaccattgtttatagtttattgttatttatcagagaattaatgtttattttcagaatctattaccataagaaatctgtttgaggacttcgtatgtgccaggaattctactaaataatgatataatgctgaacagaattagataggatcctcacttcgttaagcttacagtctagtggtatagatcaacattaatcaaagaataacacaaatagaaagcagagcagtggttcatgggattgactgtagagaagcatgagggaagttcccaggtgatggaaaatactttatttcttaatcgtggtggttacatgtgtgcatatgtttatgaaaatatattgtacatttaaagtggatacattttatcacatgtaaattatgactctataaagttaattaaaaagaataactcaggtaaggtggtgtgtgcgcctgtagtcccagctatttctgaggcaggaagatcacttgagcccaggagtttgagttcagcatgggcaacatgagacctgtgagactttgtctctaaaaaaatttaaataaataactaagataaatgtaaaattacagctgtagtaagttctacaaaggagagttacatgggctatgacgatgtaagatagcaagaactgacattggcagggaggaaatgatgatgagtagaagtaaataagtgaagtgtggggattgatgtcaaggggacagtataaaagaaataacagcatgcgccaaggccctaaaattggaaagtccttggcaaattaaaggagtttgaaaaaggccattgtgtgcaaagcagaaaataggtactacaaggtaaaagatggagctaagcggtaggtaaggctaaaccttgtcagccattgttaaatattgaattgtatcctaagcacaactcagtggaaagcagttaaagttctttaattgggggaggcaatgaaggggtaataaaattggttatagaaatactgctctggctctagtgttgagaatgaattggagtagccagagtagattcaagaagactttagtaagattattccaacaggccaggacctgttatagggtggtggcaatggagagagatggacagaatggagagtgtatttaggaggtaaaaatgacagaacttggtgatgcactgaatgtgaaatggggaaggtgtctaggaggactactaggtttatggtttgcgtattagggtggatgatagcagtttcatttactgagacagggagccctggcagagtacccagcttttagagtgggtagggggaaggggagagtgcatctggtgttgggcattttgaagtgatttacatacaacaaactgaaggtatctttaacactgagtccagcaggttagcatatttattcagcaagcattgcacctttttttgttgtttttggggtcttcaactcctggcctcgaatcctccctccttcccccgcctctcccagcctccgcctcccaaagtgctgggatttcaggagtgagccaccgcgcctggccagcatcgcgctgtttgtgcagtgtgccctgtgctaggtcttgcagtgggtaccagtagagacataaaagtacaaaagataattggacgtttagtagagtcctgaaagggggcgggataggaagatacctaaccataagaaaaaccagcaagagcggaaaaggagctagtcctccagatcaataagttaatcacttatgtttgtgattccctgcattttgggtgattctctgtcgaggtcctcttaagtccagacttttgatataatctgcagtttgcgccatttggattcctgaagcatctttacaagccacctacattccttatggagctgtggcacaacagcaagcccacgatgtctcaccggattaataaaaatataggcgctcacgcttttgtttaccgatatagtatctcctcctcccctcactccatcaacccccacgcgacacaactttccggaagtaagcaaaatccgttatcaaggtgaaactccggggaccaggctccacagctgccataaactggatggcacgttagaagccggtgggtgtaggtgaggcacgctggcgcccgcgggcccttctccagccgctacccagtgggaatccgcggggctgaagccccgaaaccaggctgagcgtcccagagcgcaacctccctttcccccagcagcgccggcgccgcagaagccgcgtgtccccaggcgcactcccccaaggtgaacccccgccccccacggaggcggctgggtcgcgggtctgggcggggcgctccggacgccctcccgccgctgcgcacccctcccgcgagctgccagctccctcggcctctccacccaaaactggcccaaccgccaatcgtctgcctctcacctcctacagcaggtgacccatggccaatcgccaggggtctctttgccaggagccgccagggccagccaatcggggcgacccctccgccggggaggggacgggaaaggggtggggggtgaagggggtgaagggggtgtcccgggggacgggctgaacctcagtcaggaccgcctgcaccgcagtccggggatcgggtcgaggggagaagaaaaaggggtgctcgggagcagcccccggctacctcccctggaggcacagagggcgggggccttggcgaatggctttcttgctggccacttgcggagtgagtagaccccgagggtctgggagaggggccggcccctacccctgagtccccggggtcccggccgccaggccggagcgcgaatgtcgtgctcaccctgcctccttcccgccgccccctgggggtttggattcaggatttgttcctagtgtccaagattttgataagaaacttacagaagctgatgcttacctacaaatcttgattgaacaattaaagctttttgatgacaagcttcaaaactgcaaagaagatgaacagagaaagaaaattgaaactctcaaagagacaacaaatagcatggtagaatcaattaaacactgcattgtgttgctgcagattgccaaagaccagagtaatgcggagaagcacgcagatggaatgataagtactattaatcccgtagatgcaatatatcaacctagtcctttggaacctgtgatcagcacaatgccttcccagactgtgttacctccagaacctgttcagttgtgtaagtcagagcagcgtccatcttccctaccagttggacctgtgttggctaccttgggacatcatcagactcctacaccaaatagtacaggcagtggccattcaccaccgagtagcagtctcacttctccaagccacgtgaacttgtctccaaatacagtcccagagttctcttactccagcagtgaagatgaattttatgatgctgatgaattccatcaaagtggctcatccccaaagcgcttaatagattcttctggatctgcctcagtcctgacacacagcagctcgggaaatagtctaaaacgcccagataccacagaatcacttaattcttccttgtccaatggaacaagtgatgctgacctgtttgattcacatgatgacagagatgatgatgcggaggcagggtctgtggaggagcacaagagcgttatcatgcatctcttgtcgcaggttagacttggaatggatcttactaaggtagttcttccaacgtttattcttgaaagaagatctcttttagaaatgtatgcagacttttttgcacatccggacctgtttgtgagcattagtgaccagaaggatcccaaggatcgaatggttcaggttgtgaaatggtacctctcagcctttcatgcgggaaggaaaggatcagttgccaaaaagccatacaatcccattttgggcgagatttttcagtgtcattggacattaccaaatgatactgaagagaacacagaactagtttcagaaggaccagttccctgggtttccaaaaacagtgtaacatttgtggctgagcaggtttcccatcatccacccatttcagccttttatgctgagtgttttaacaagaagatacaattcaatgctcatatctggaccaaatcaaaattccttgggatgtcaattggggtgcacaacatagggcagggctgtgtctcatgtctagactatgatgaacattacattctcacattccccaatggctatggaaggtctatcctcacagtgccctgggtggaattaggaggagaatgcaatattaattgttccaaaacaggctatagtgcaaatatcatcttccacactaaacccttctatgggggcaagaagcacagaattactgccgagattttttctccaaatgacaagaagtctttttgctcaattgaaggggaatggaatggtgtgatgtatgcaaaatatgcaacaggggaaaatacagtctttgtagataccaagaagttgcctataatcaagaagaaagtgaggaagttggaagatcagaacgagtatgaatcccgcagcctttggaaggatgtcactttcaacttaaaaatcagagacattgatgcagcaactgaagcaaagcacaggcttgaagaaagacaaagagcagaagcccgagaaaggaaggagaaggaaattcagtgggagacaaggttatttcatgaagatggagaatgctgggtttatgatgaaccattactgaaacgtcttggtgctgccaagcattaggttggaagatgcaaagtttatacctgatgatcagggcagtaggcataattcagcaacaaacaatcttcctttgggagaaacctgttcattccaatcttctaattacagtggttcctatctcagggatactggactttctgacgcagatgaacaattaaggggaaaagcttcccttttccctctgtggcagttacgattttgacttcagtcctgagaaaaacttcaggttttgaaaatcagatgatgtcttctccttttccaaacaccacacgttgaaagcatttataaatccaagtctgaaactctgcgctctagtactgctgttaagatacacaacttgtttcttagttcatataatctcgggatacacacacacacacacatatatatacacacacatacgtatacacacacatacatatatataaatatacctgatgccagatttttttcataaatattctgcctactgtaaatatgggttcctctgagttgttttagaaaattagcgcaatgtattaaaatcaagtgttaggaaatttcatggtcttacctacaataacttttattttggaattgaactattattaaattgtatctaatcctggattacagtttaattaattattcttagtgcttaaggcttcataaagtaatttttccaacctttttttaaaaagagcatcttttattatcttttatggttaaacttggaagccaattatttggcaaccttgaatacaagagctagcttttcaaagaaagacacttgaaataatggaggatccattcttttcctctgtcagattgtatgttctgtctttagcccctgccaggcaattccccagaatcttcacttaactcatattgcacatgtagggctgcctaccaacattttatccaaaaatgttttattgccttagagggtttgggaagagtgtgtatttatagatccccaccccacagtgaacaaaaatagatagatagatagaataaaatgaatgccacagcagcagatggctcattctgaagggaaatacagaactatatctatctatctatctatcatcttttttatttaaaaatacattaaaaaaacaggtattagtacctagcatttagttagttattcaatatactggttacgtaaggcctttcaagaagtagattctcagtctgagaggacacaggccagggcttctcaaagtgctgctgcaggctttctggtctcgcttggcc

SEQ ID NO: 735105 - DNA, 19219 bp, Homo sapiens
  misc_feature (19219)..(19219): n is a, c, g, or t
gtaagggtctttacatggtttccagatagttcattagttgttgctttctttttttgtctgttttctgttttttttttttaaataactgtggtatgatgtaataggaacttataatttctgagttgcttatttttcctttacagttatagtaaagttatactcatttattttctcctgctttctgcagagtaaaatactgatttttgtctagaaacaagacagtgcaagacaatgttgaaagtgaaattctatgttaaaatatgccagatttattttaagaatttaatatctgtagtcagttatcaatacaaccaaattacataattatgcatgataataggtaaatactgagaagttcacctcattttcttgttaaaggatttggctattaccgtatgtgtcagttagtactcttttgtatggtagtgaaagaaaactcaacccaaactgattcatgaagaagaaagtaaatctggttagatgtggtttgaattaggtaattcatgtcatgaggactcagatctcccatctctatttctacgttccacttttgcattggcttcattttcggttaggttctcccttggtggtggtaaggtggttgtagcaatgtcagcctcccatttttggaaccgagtccataggaggctattctttctagaccttaataggagtaacacaattattgctcatcaccctagctttggccatgtgtcaaatcctgaccagtcacaatttcacagtcatagattctaccctggagctgggatgttactggcctcactagaaacacattgctgatagggtagaaggtgtgttcatcctacccaacccgacccgcaccaaagtcagaatagggaaaaacagatgttgggtgacatgcaactaacgtctgccgtactacactgaagatatttttctatgtttattctccagtgaaagagcttatatttgtggtacataggggattttgttttaatttagaaaatttaattgtagaaaacatgttttataaccctttctctgtactttgttctatatcaggaattgacttgattagataaggtgacatagggtatcttaggccctacaagatagtaaaccccccatcacttgaaagtattcagtagaggcttaaaaaacattattaaaggatgtggttattaggggactttaagaaatgaatatgaaattgaagtaggaaatctttaagctactctgtgagttatgccttttaaaagcaatttgtaattcctgtagatttcttttaaatttaggcagtttcataaatgactatagcatcattttagcaaatttgtgatcctgtaagaggaggataagtgttttttgtttgtttgtttgttttttgtttttttgagacagagtctcactttgtaccccagaaagtaaatctagttagatgtggtttgtctcggctcactgcaacctccaccccgtgcgttctagcaattctcctgcctcagccaccacacctggcctaagaggggaggataagtgttttagtgatcatattagactgaatgtggcagatgagatttcccgcccccccattgttggttagactgacattcaacattcaacaagagccacctgcccttgtaggcatttctgccactatacccctacataaacctagagtgctattgcttacttgctttccttcaaatacattttttcatttgtggcctccacattcttgtgtgtgatgtcctttctctgtgaaatgtcttctaccctttttttcaaagcctagtttagaactgacctcttctatgaaccctctgccgactggcctttccttccccagtcccccaagttcaaaatgatctctttcctttgaatactatagtatttgcacaattcactatctccttatcatattcttcttgtttatttgttatcagctgatgttgacatcataagttcaggttcctaactagatccaatattggaatttttcagcttttgctaagaagagagcttgtatgtctttgggaataatgggcagaaaaagataactttgagaagtcttagacttctaatagctttgatatttaaaagtacatgtaatacaagaggtttttttcctacatttaatgcatggagaagataggacatttagaaatatggaattaatgttcatttgactggcaaaagattattttctcagatgtagtgaagtgtggtaaagaacttcactctagagccagaatgtctgtgtttgtatcccagagcccaccacttacatttaaccattaacattcaacttactgtctctgagtttcagtggcctcatctataaaatgaggataataagagtacctacttcatagagttgttttagtggttaaataaactaacgtaaacttgctagaacttgataaactaatattggatgagaactggttgaaataatgcctggctatagtaaaaacttggtaaatgttagttgccattacaatgcaactactgttcctaccattccctctgccagtgcctggtattcagtagcactcagtaaatgttagttaaatgaagaaataactgaaggaatgaatgaacaaatggttgatgtagagattgcttttccattgttgtttattgaatattttgagatgtataacatactgtctgttaggcactgtgggatgggcactcacggagctgtcttccaaaggggtataggagaggagacgcagtgatctcagcaacctacctttaaaacatatcctagtatctactgccatgttaggttctcttcttttgctttttttaaaaaaaaattctcacaaaactccccccacccacttcagtttatagatgaggaagctcctactacataatagtgcttcccagtctaattcttgacctcattgtatttatatgtcctttttttttttgacagagtctcactcattgcagtggcacaatcacagctcactgcaacctctgcctcccctgctcaagtgatcctcccacctcaacctcctgagtagctgggactacaggcatgcaccaccacgcctggctaatttttgtatttttttgtagagatgcggttttgccatgttggccaggctggtctcgaactcctgggctcaagccatctgcccactttggcctctgagagtgctgagattataggcatgagccaccattcccagccatgttttcctttttcattgaactttatctactttagccattaaactccactccattggtcttgtcattactaagagctgaaccacctgcaaaatattaagttaaaaagcgttttctttgacaacagttttcttttcttcatcttcctctatcactttacttctgaacttttattctctcattttgatctgacccctacttctctgtttttcctggccatttagtactttcttgttttgctcatcccatttcccagtggagaccttctggtctgctgctttatcactggttttgttagaagacatacaaatggcaaggaggtatatgaaaaggtgcctaacatcattgatcatcagagaaatgcagaccaaaactacaatgagatatcatttcaccccagttaaaatggctttttttttttttttccaaaagacaggcaataacaaagtactggtgaggatgtggagtaaagggaacccacatacactattagtaggaatgtaaattagtacagccactgtggagaacagtttgaaggttcctcaaaaaactaaaaatagagctaccatataatccagcaatcccactgctaggtatatatccaaaagaaaggcaatcaatatacggaagagatacctgcacacccaggtttattgcagcactattcacaatagccaagatttggaagcaacccaggtgtccaacagatgaatggataaagaaaacatggtatataaacacaatggaatactattcagctgtgaaaaagaatgaaatcctgtcatttgcaatcctgtcttgaatagaactggaggtcatgatgttaagtgaaataagacaggcacaaacttcacatgttctcacttatttgtgggagctaaaaattaaaacaatcgaactcatggagctagagaatagaattatggttaccagaggctggaagggtggttgggcgtataagtgtagggggagtggggatggttaatgggtacaaaaaaatgagaacgaataagatctacttgataacacaacagggtgactatagtcaacagtaattatacatttaaaaataactagaagagtataattagattgtaacacaaaagataaatgcttgaggtgatggatacctatttaccctgatgtgattattacttatttcatgcctatatcaaaatatttatactccaaaaatatatatacctactatgtacccacaaaaatttaaaaatttatatattgtttttgctatcacctttagaatttcttgtcattggatagttcgtctgtataccattctggtcttcattccccagggcccccgttgtctgatttttctgcttctagaactgttagaggtcacaaaagcaagatggttgtatctatcacaatttttgtctgactttaactgggtatctgttacgatttagtagtcatcttactgacttcttgttggtttccaattgaatcctcacagtagactgttttcattgtaatcagtatcgaattatagcctgttcccttcttcataaatgaaggctttcttcttcaacagttcttagtgacttcacctgtactttatttctctgctttgaatatttcgaagaaaacatattcttgctctttcccaaggttaacactacatacattaccttgaccacaggatgttttcttgcagattgtgacctaattccatcacccttcagcagcccccaccgttttcatggattcagctaaaccttctgtaagatgactctttttccccctaatctttatatctcttttgatatgtagctttagtctcactttttttccttttggattttgccagttagatgtctccctggaattccacttcagcatggctaagactaagcttgtcttctctttcctccccaaagcaaattgtaattaggatagactgaaggtgacagaagataactaagatcttcttcatcctttcggctcttatggaagctgaattccagtagtcattctaaatttgttgtatgtcagcttatggtatcttttcatgtctttacattcagccaaagaggaagttccttgaaggggagaccagagggcgtgctgtgcttcttaatcctctctttcttaaccagtaagaggcattcagtagatatctgatgatactgattaatagaggggaacttttcagattcttttttttttttaaccctagtaagctttagtacaaactaaatgctgagagattatcaagtaagggattgatcatcacaagaagactcaggatgttacatcctgtaggttttatagtttcctatattgtaaaaaatatgagttatagcagcttgtctggatgtcatacaggtataaaaatcagttttataaacttgagtaaattggggcccattttagaaaaaactcttgcaggctgtgaatgccaatatataagtaaagtattaagtataatgttatttaatgtgggcaaacataaagccaggtgtaaattttttaggtttaaaatcttatagaactatacatccaaaagaaaatttcaagttaaacataatacaaagcaatacaatctaaattaacattaatttaatgtgatgaatgatattgccttgctaaaagtgggtcactacttacaatgtgcaaatggtactcatcgttagggtatagattcttttaaactatgacatacgtacactaccatgtggaacgtgatgatgtgttctctgttctaactactgggaagacttccttggcatagcacatgccatggggtcagttggctttgacttcatatagatatgccatttacttggtcagtgtcacttctatgacaagtagtatgttgtgccagtttgattataagtacaaatatgggcaatgaagtaacttggttttaaggttgttactaagctgagtaacagtgtgtggctatacaaatttttataggctatcaggaatgaaaacacaggagattgttgtagattcaagtattttagattcaagtttgaagatgctcatgcagatgtttaactgagttgtatagacctttatgtttctttctttttctctttttttttttttgagacagagtcttgctctgtcacccaagctggagtgcaatggtgtgatctcggcttactgcaacctccgcctcccaggttcaagcaattctcctgcctcagcctcccaagtagctgggattacagatgtgcaccacgacgcccagctgattttttgtattttagtagaggcggggtctcaccatgttgtcaagatggtctcaatctcctgaccttgtgatccacccacctctgcctcccaaagtgctgtgattacaggcgtgagccaccgcgcctgactgacctttatgtttcttaactttatgctatacatcagttgatatttcaaaaatttaaatggtttctatgattattctttgggctaagaaattgggcattaattgtcctcatatgtatggtttttgtggctacttcatgtagattttatttttggtggttatcaaattggaatttttttttttttttttttttttgagacggagtctcattctgtttcccaggttggagtacagtggtgcaatctcagctcactgcagcctcgacctcccaggctcaagcagtcctctcacctcagccttctaagtagctgggactacaggcacgcaccaccacacctggctagttttttgtgtttttagtagagatggggttttaccctgttggccaggctggtcttgaactcctggcctcaagtgatccacctgcctcagcctcccaaagtgctgggattagaggcatgagccaccacacctggctgaaattggaatttcattggtactgcctgtaattttatgttaatttttttttttttttgtcgtcactagcttttatctaaagcccctagagagaaaggccatgataccttgtatacaaggttataagagtatacaagggaaagggagggctgaagggaacagggtgggctggtacaagcctcattagaaataccattgagtctgtgagtaaaacatcattatatgaaaaggagatgtggttttagggtggtccaattacttttgcaccagcctaataaaattacaagtcattatcaatagagacattgtaaaacctttttttttcccaaaagaagtatcaggtatgataattacatgtctgcccaactttcgttatagattaacataacttaattgtatttaaggtacaatttaggagagttgctgaaaaatgaatctttagtattgggatgccttgattctaccctcaatagctataatggattatgtgtctgagtagattaataaaaatcttttgagcatttttcttgaactacttcactgaagattagctttttgagcatccattttaatttctcagtatataaggatcggtttatcacaactgtattgttttccctggccttgttagattatattttcatatcatgtagaaaaataggtgtattcgttctcccttgaagtcctttgtctcccaaaggaaatggttgcaatacagatgtgtcacctcttccacaggtaaagtggaatggagaagtagccagttaaatagtgcatgctcaatttggaacatttagagcatacaggaaagttatttatttggtaaatattttttaagcatttactatgtttcatgcattgtactagttgtagaggatataattgaatacaactacatgtagcccttgactttatggaactagtctagtataaagatttaagattgcctggcatggtggctcacgccactaatcccagcactttgagaggccaaggcaggattgcttgaggccagaagtttaagagtagcttggtcaacataatgagactccatctctaaaataaatagatagatagatagatagatagatagatagatagatagatagaagtagttagacaacacaaagcagtttcactcatcttgtggcaaggagttatgtatttctaatcaaatttggcaactcaagcattttcaacaaaatctacatgttttttcagaataaagtgaccaacacagaatgttacctgtaaaaatcagagcaataattgctatctaaaataattttgaaaattaagtggtactgaaaggctcatatagcaaaaatatggcctcctgtcattgtactttcctacttcccagactcaccattttcaacattttttagtagtttattttgccattttatagcatagtacctgacattttatttattcaacagacatttcttaagtacctaatacatgccattccttgtttgaagggatgctaaggatacagtggtgaacaaggcgttgtggggttgtatagagggtattcattcctaaccttgaaccaaatatttctttctgttggataatgcattaaaaattgcaaacagtttacaaacttttggagcaatggtggccttgatcataaagtagggactgcttctaccgtatacatgcttggtggtgtatttgtgatatctggctaaagtttctacatggaaattgactgactttagttttgagacttctgggaaccagtcaggcaaaatagtgaaactgtgtatcctgtttccaagagttgtcttttaaggttatctgcttcattcatttggcctgacttgctaggcaaatgcctagggtaaatatgatttgattaactataacaacaacagcaacaacaacaactttattttttagagcagtttgaggttcacagcaaaattgagcagaatgtacagagattttccctatacccgcttcccctacgcatgtgcggcctcccctactatcaacatcccccaccagagtggtttgttacaattaatgaacctacattgacacatcattatcactcaaggtccgtagtttacattagagtccactcttggtgttgtgtatgggtttggtcgattttataatgacatttatccaccattatagtgtcatacatagtaattttgctaccctaaaaatccagtgtgctccacctgttcctccttccctcctccctcatccctggcaaccactgaactttttaacatctccatagttttgccttttccagaatgtcatatcattggaatcacacagtatgcagccttttcaaatgggcttctttccgttagtaataggcatttaagtttcatcctcatcttttcatggcttgatagctcatttctttccctccctcttttcttccctgtcttccttccttcctcttctttcctgtttcctctttcttcttccttttttaagagacaaggtgtctcactctgttgcccaggctggagtgcagtggcccaatcatagctcattgcagccttgaattcctgggctcaagtgatcctcctgcgttagcctcctgagtagctgggatcacaggctccagtcattttagtgctgaataatatttcattatctggatgtaccgcctattcattcacctactgaagaatatcttggttgcttctaagttttggcaattatgagtgaagttactataaacattgtatacaagttttatgtggatgtatgttgtcatctcccttgggcagataccaaggagtgccattgttggatcatatggtaaatatatctttagttttgtacagaattctaggttggtatttttttctctctcagtcctttattttatttggagacagtctcgctatgtcgcccaggctgccatacagtggtgccatctgggctcactgaaacctccacctcccaggttcaagcgattcttgtgccttggcctcccaagtagctgggattacaggagtgcgccaccacgcctgctaatttttgtatttttagtagagacagggttttgccatgttgcccaggctggtctcaaactcctgaccttaagtgattcacccacctcaatctcccaaaatcctgggattacaggcctgagctactgtgcctgatctctctcagtactttaaagaaatatttcattccacttttcttttttttcttctttttgagatggagtctcactctgtcgcctgggctggagtgcagtggcgcgatctcagctcactgccacctccgcctcctgggttcaagtgattctcctgcctcagcctcctgaatagctgagattacaggcgcccaccaccatgcccagctaattttttgcatttttagtagagacgggggttccaccatgttggccaggctggtctcgaactcctgacctcgtgattcgcacatctcggcctcccaaattgctgggattacaggtgtgagctaccacgcctggcccactcttcttgcttacatagtttctgaggagatgtcagatgtaatttttatttttgctcttctgtaggcaagttgagttttttccccctctagcttctctcaggatttttttctttatctttgattttcagtagtttgaaaattatatgcctagctgtcagggttttttgcttgtttgtttttgttttctcaggtgtgactccagaaaggttctaaagaggagctttacaatctcttctctggggtttatggagacttcctttacccttctgtgttagccccttaaagcactgcgtcaaccttaaaagggcacaggaaagggtgtctatgccatttttatgccatttatcctgcttggtgttttctgagctttcttcatctgcggtttaatgtctcacattaatttgtagaaattctctgtcattgtttcaaatttttcttcagttcttttctctgtttcttcttctggtgttcccattatgcttttgtggttgtcgtacagttattggatattttgttccaggcttttttttttccagtctttttttccttttgcttctcggttttgtaggtgtctgttgagatactctcaagtgcagatattctttcctcagctttgtctagtttactaataagcccattaaaggcagtcttcatttctgttacagtctttttgatcagtagcatttcttttttattctttcttaaaatttctgtctttctgcttacattgcccatctgttcttgcatggtttctactttgtccattagagttcttaggatatttatcataattatttcaaatttctggtgtaacaattccaacatccctgcaacatccaagtctagtttcgatgcttactgtgtctcttccagctgtgttttttcctatttaatatgtcttataattttttcttgatagccatacatgatgcattaggtaacagaaactgctgtgagtggacctttagtaatgtggtggtaaggtgtgcatggaggggaaacattttcagtctgttagtgaacttttgtcaacttcacatgtgcttctcaagtccatcctgtaagtgggagagtagggctagagaggactgaagttgggtatatattaaatactttctcctacaaagaagcctagaggggacgcattaggggattttttttcccccagtattcactgtgatgacccttattgagctcctggaggtaaaactcacaaaactgtggttctcccccctgcccatattactacatgtccctggagtttatatctttcagacttgtctgcactgagcttccaccaatttgtcaaatacagatcaggtttccctaccacccgtgcagttgaaaacccacatacaacttttgactcctccagagcttaactactcatagcctgctattgactggaagccttgccaataacataaacagttgattaatacatattttatatgttttctgtattatatattgtattcttacaataaagagaaaagaagatgttattaagaaaatcataaggaagataaaatatatttactgttcattaagtggttcccatgggtgctggttcccatggaggttgccccttgtgagtttttgctcagggaagttgtgattctctatatttgcctgttggtctcctaatttgggagtcatcagttttccctgtgacctcacttctcttacagagttaagaacagttgttggtttttcagtttgttcagtgttttacatgttgttagaacacagtggtacttctaagtttcttaacatgctagatcagaaacctgaagtctcacctaatttggctttttatattttttcttcttttttttcttccattgctaccaaagcatttttcatctgtgtctggggtgacattagagcagaatgtgatttctaggtaaacattattgggctccctagcagaaaaatttttgaaagtagtacatgaattctgtataattaaaattttcttttcatcttaataggtataggtaataggcacggcctattttttttttgctcaacagtctaaaatagtaatttaatcacctaatagccttagttatatagttgaaagaagagttggaaatctgattcatgggttggaaatcacctgtcacatatgagttttaggcactggtcactttattttgaaacagctttggggttttttcctttttcaactcataataggctttaacagcttttagttttgtttctgtttttttaacagcatgagttgccaaatttggttatagcttcttggtacaagatgggtaaatttgctttgtgttgtgtaattactttttattttaaatgctacctcttttatgaacactaactttacactaagattaggaaaatgagaattgcatgtctgcaacaaatagctatctgtagtattaaattgtgaaaatgtagactttggattggagctggcatctcttaatatgtaattgtaacatagagtaaataagtattttgtcccttgtagggtcaaacagtacagtgcatgggcagaattagagatgtaggcttttttttttttttttttttttactggcttagagaaccgtttgatcagctaatatggaattaagtccctagggctgcccaggcacaacattaactgctattaaaggaaaatttaaaagagtattagtgaaggttaaatactgaccatggacatctggcaaaattgatgttttttttcccctccaccattgtttatagtttattgttatttatcagagaattaatgtttattttcagaatctattaccataagaaatctgtttgaggacttcgtatgtgccaggaattctactaaataatgatataatgctgaacagaattagataggatcctcacttcgttaagcttacagtctagtggtatagatcaacattaatcaaagaataacacaaatagaaagcagagcagtggttcatgggattgactgtagagaagcatgagggaagttcccaggtgatggaaaatactttatttcttaatcgtggtggttacatgtgtgcatatgtttatgaaaatatattgtacatttaaagtggatacattttatcacatgtaaattatgactctataaagttaattaaaaagaataactcaggtaaggtggtgtgtgcgcctgtagtcccagctatttctgaggcaggaagatcacttgagcccaggagtttgagttcagcatgggcaacatgagacctgtgagactttgtctctaaaaaaatttaaataaataactaagataaatgtaaaattacagctgtagtaagttctacaaaggagagttacatgggctatgacgatgtaagatagcaagaactgacattggcagggaggaaatgatgatgagtagaagtaaataagtgaagtgtggggattgatgtcaaggggacagtataaaagaaataacagcatgcgccaaggccctaaaattggaaagtccttggcaaattaaaggagtttgaaaaaggccattgtgtgcaaagcagaaaataggtactacaaggtaaaagatggagctaagcggtaggtaaggctaaaccttgtcagccattgttaaatattgaattgtatcctaagcacaactcagtggaaagcagttaaagttctttaattgggggaggcaatgaaggggtaataaaattggttatagaaatactgctctggctctagtgttgagaatgaattggagtagccagagtagattcaagaagactttagtaagattattccaacaggccaggacctgttatagggtggtggcaatggagagagatggacagaatggagagtgtatttaggaggtaaaaatgacagaacttggtgatgcactgaatgtgaaatggggaaggtgtctaggaggactactaggtttatggtttgcgtattagggtggatgatagcagtttcatttactgagacagggagccctggcagagtacccagcttttagagtgggtagggggaaggggagagtgcatctggtgttgggcattttgaagtgatttacatacaacaaactgaaggtatctttaacactgagtccagcaggttagcatatttattcagcaagcattgcacctttttttgttgtttttggggtcttcaactcctggcctcgaatcctccctccttcccccgcctctcccagcctccgcctcccaaagtgctgggatttcaggagtgagccaccgcgcctggccagcatcgcgctgtttgtgcagtgtgccctgtgctaggtcttgcagtgggtaccagtagagacataaaagtacaaaagataattggacgtttagtagagtcctgaaagggggcgggataggaagatacctaaccataagaaaaaccagcaagagcggaaaaggagctagtcctccagatcaataagttaatcacttatgtttgtgattccctgcattttgggtgattctctgtcgaggtcctcttaagtccagacttttgatataatctgcagtttgcgccatttggattcctgaagcatctttacaagccacctacattccttatggagctgtggcacaacagcaagcccacgatgtctcaccggattaataaaaatataggcgctcacgcttttgtttaccgatatagtatctcctcctcccctcactccatcaacccccacgcgacacaactttccggaagtaagcaaaatccgttatcaaggtgaaactccggggaccaggctccacagctgccataaactggatggcacgttagaagccggtgggtgtaggtgaggcacgctggcgcccgcgggcccttctccagccgctacccagtgggaatccgcggggctgaagccccgaaaccaggctgagcgtcccagagcgcaacctccctttcccccagcagcgccggcgccgcagaagccgcgtgtccccaggcgcactcccccaaggtgaacccccgccccccacggaggcggctgggtcgcgggtctgggcggggcgctccggacgccctcccgccgctgcgcacccctcccgcgagctgccagctccctcggcctctccacccaaaactggcccaaccgccaatcgtctgcctctcacctcctacagcaggtgacccatggccaatcgccaggggtctctttgccaggagccgccagggccagccaatcggggcgacccctccgccggggaggggacgggaaaggggtggggggtgaagggggtgaagggggtgtcccgggggacgggctgaacctcagtcaggaccgcctgcaccgcagtccggggatcgggtcgaggggagaagaaaaaggggtgctcgggagcagcccccggctacctcccctggaggcacagagggcgggggccttggcgaatggctttcttgctggccacttgcggagtgagtagaccccgagggtctgggagaggggccggcccctacccctgagtccccggggtcccggccgccaggccggagcgcgaatgtcgtgctcaccctgcctccttcccgccgccccctgggggtttggattcaggatttgttcctagtgtccaagattttgataagaaacttacagaagctgatgcttacctacaaatcttgattgaacaattaaagctttttgatgacaagcttcaaaactgcaaagaagatgaacagagaaagaaaattgaaactctcaaagagacaacaaatagcatggtagaatcaattaaacactgcattgtgttgctgcagattgccaaagaccagagtaatgcggagaagcacgcagatggaatgataagtactattaatcccgtagatgcaatatatcaacctagtcctttggaacctgtgatcagcacaatgccttcccagactgtgttacctccagaacctgttcagttgtgtaagtcagagcagcgtccatcttccctaccagttggacctgtgttggctaccttgggacatcatcagactcctacaccaaatagtacaggcagtggccattcaccaccgagtagcagtctcacttctccaagccacgtgaacttgtctccaaatacagtcccagagttctcttactccagcagtgaagatgaattttatgatgctgatgaattccatcaaagtggctcatccccaaagcgcttaatagattcttctggatctgcctcagtcctgacacacagcagctcgggaaatagtctaaaacgcccagataccacagaatcacttaattcttccttgtccaatggaacaagtgatgctgacctgtttgattcacatgatgacagagatgatgatgcggaggcagggtctgtggaggagcacaagagcgttatcatgcatctcttgtcgcaggttagacttggaatggatcttactaaggtagttcttccaacgtttattcttgaaagaagatctcttttagaaatgtatgcagacttttttgcacatccggacctgtttgtgagcattagtgaccagaaggatcccaaggatcgaatggttcaggttgtgaaatggtacctctcagcctttcatgcgggaaggaaaggatcagttgccaaaaagccatacaatcccattttgggcgagatttttcagtgtcattggacattaccaaatgatactgaagagaacacagaactagtttcagaaggaccagttccctgggtttccaaaaacagtgtaacatttgtggctgagcaggtttcccatcatccacccatttcagccttttatgctgagtgttttaacaagaagatacaattcaatgctcatatctggaccaaatcaaaattccttgggatgtcaattggggtgcacaacatagggcagggctgtgtctcatgtctagactatgatgaacattacattctcacattccccaatggctatggaaggtctatcctcacagtgccctgggtggaattaggaggagaatgcaatattaattgttccaaaacaggctatagtgcaaatatcatcttccacactaaacccttctatgggggcaagaagcacagaattactgccgagattttttctccaaatgacaagaagtctttttgctcaattgaaggggaatggaatggtgtgatgtatgcaaaatatgcaacaggggaaaatacagtctttgtagataccaagaagttgcctataatcaagaagaaagtgaggaagttggaagatcagaacgagtatgaatcccgcagcctttggaaggatgtcactttcaacttaaaaatcagagacattgatgcagcaactgaagcaaagcacaggcttgaagaaagacaaagagcagaagcccgagaaaggaaggagaaggaaattcagtgggagacaaggttatttcatgaagatggagaatgctgggtttatgatgaaccattactgaaacgtcttggtgctgccaagcattaggttggaagatgcaaagtttatacctgatgatcagggcagtaggcataattcagcaacaaacaatcttcctttgggagaaacctgttcattccaatcttctaattacagtggttcctatctcagggatactggactttctgacgcagatgaacaattaaggggaaaagcttcccttttccctctgtggcagttacgattttgacttcagtcctgagaaaaacttcaggttttgaaaatcagatgatgtcttctccttttccaaacaccacacgttgaaagcatttataaatccaagtctgaaactctgcgctctagtactgctgttaagatacacaacttgtttcttagttcatataatctcgggatacacacacacacacacatatatatacacacacatacgtatacacacacatacatatatataaatatacctgatgccagatttttttcataaatattctgcctactgtaaatatgggttcctctgagttgttttagaaaattagcgcaatgtattaaaatcaagtgttaggaaatttcatggtcttacctacaataacttttattttggaattgaactattattaaattgtatctaatcctggaaaaaaaaaaaaaaaaaaaaaaaaaaaaaaaacaaaaaaaagaacaaaataaaaaaaaagaaaacaacaaaaaaaaaaacaacaaaaaacaaaagagagggaggaggcgcaacaagcacaacgaagcactaccccgggagggggcacgccgcacacagaacgccggagcggcacgcccggaccccactatctagaaacgacaaagcgtgtgcccacacaaaacaaaagtaaaaagagcgcagacttatcaatcagacacacgccaagcgacgagacgcggccgcagatcctcaacaaacacagcacactgaatagcaaggtggagagaaacacaacctggtggctgacgcagcgacacacatcctgcgaaggaaaagacgagacactcacactaccatgggagagtggaggagcaaaacaacacacaggcgagaagaacaacaaaaacccagccacaccagcaaacataaacacgccaccatgacaacggcgacaacacaacaacgaccacgtctcaagcccgagtcactaactgagcacagacaacaccgcacacacaactacaatcagccgcggaacaaaggacaactaactacgaacgacaaccgactgatcagagcagagacaaacactcaactccaaccgagggagcgatcaaagaacaaataaggan

SEQ ID NO: 735106 - DNA, 18708 bp, Homo sapiens
gtaagggtctttacatggtttccagatagttcattagttgttgctttctttttttgtctgttttctgttttttttttttaaataactgtggtatgatgtaataggaacttataatttctgagttgcttatttttcctttacagttatagtaaagttatactcatttattttctcctgctttctgcagagtaaaatactgatttttgtctagaaacaagacagtgcaagacaatgttgaaagtgaaattctatgttaaaatatgccagatttattttaagaatttaatatctgtagtcagttatcaatacaaccaaattacataattatgcatgataataggtaaatactgagaagttcacctcattttcttgttaaaggatttggctattaccgtatgtgtcagttagtactcttttgtatggtagtgaaagaaaactcaacccaaactgattcatgaagaagaaagtaaatctggttagatgtggtttgaattaggtaattcatgtcatgaggactcagatctcccatctctatttctacgttccacttttgcattggcttcattttcggttaggttctcccttggtggtggtaaggtggttgtagcaatgtcagcctcccatttttggaaccgagtccataggaggctattctttctagaccttaataggagtaacacaattattgctcatcaccctagctttggccatgtgtcaaatcctgaccagtcacaatttcacagtcatagattctaccctggagctgggatgttactggcctcactagaaacacattgctgatagggtagaaggtgtgttcatcctacccaacccgacccgcaccaaagtcagaatagggaaaaacagatgttgggtgacatgcaactaacgtctgccgtactacactgaagatatttttctatgtttattctccagtgaaagagcttatatttgtggtacataggggattttgttttaatttagaaaatttaattgtagaaaacatgttttataaccctttctctgtactttgttctatatcaggaattgacttgattagataaggtgacatagggtatcttaggccctacaagatagtaaaccccccatcacttgaaagtattcagtagaggcttaaaaaacattattaaaggatgtggttattaggggactttaagaaatgaatatgaaattgaagtaggaaatctttaagctactctgtgagttatgccttttaaaagcaatttgtaattcctgtagatttcttttaaatttaggcagtttcataaatgactatagcatcattttagcaaatttgtgatcctgtaagaggaggataagtgttttttgtttgtttgtttgttttttgtttttttgagacagagtctcactttgtaccccagaaagtaaatctagttagatgtggtttgtctcggctcactgcaacctccaccccgtgcgttctagcaattctcctgcctcagccaccacacctggcctaagaggggaggataagtgttttagtgatcatattagactgaatgtggcagatgagatttcccgcccccccattgttggttagactgacattcaacattcaacaagagccacctgcccttgtaggcatttctgccactatacccctacataaacctagagtgctattgcttacttgctttccttcaaatacattttttcatttgtggcctccacattcttgtgtgtgatgtcctttctctgtgaaatgtcttctaccctttttttcaaagcctagtttagaactgacctcttctatgaaccctctgccgactggcctttccttccccagtcccccaagttcaaaatgatctctttcctttgaatactatagtatttgcacaattcactatctccttatcatattcttcttgtttatttgttatcagctgatgttgacatcataagttcaggttcctaactagatccaatattggaatttttcagcttttgctaagaagagagcttgtatgtctttgggaataatgggcagaaaaagataactttgagaagtcttagacttctaatagctttgatatttaaaagtacatgtaatacaagaggtttttttcctacatttaatgcatggagaagataggacatttagaaatatggaattaatgttcatttgactggcaaaagattattttctcagatgtagtgaagtgtggtaaagaacttcactctagagccagaatgtctgtgtttgtatcccagagcccaccacttacatttaaccattaacattcaacttactgtctctgagtttcagtggcctcatctataaaatgaggataataagagtacctacttcatagagttgttttagtggttaaataaactaacgtaaacttgctagaacttgataaactaatattggatgagaactggttgaaataatgcctggctatagtaaaaacttggtaaatgttagttgccattacaatgcaactactgttcctaccattccctctgccagtgcctggtattcagtagcactcagtaaatgttagttaaatgaagaaataactgaaggaatgaatgaacaaatggttgatgtagagattgcttttccattgttgtttattgaatattttgagatgtataacatactgtctgttaggcactgtgggatgggcactcacggagctgtcttccaaaggggtataggagaggagacgcagtgatctcagcaacctacctttaaaacatatcctagtatctactgccatgttaggttctcttcttttgctttttttaaaaaaaaattctcacaaaactccccccacccacttcagtttatagatgaggaagctcctactacataatagtgcttcccagtctaattcttgacctcattgtatttatatgtcctttttttttttgacagagtctcactcattgcagtggcacaatcacagctcactgcaacctctgcctcccctgctcaagtgatcctcccacctcaacctcctgagtagctgggactacaggcatgcaccaccacgcctggctaatttttgtatttttttgtagagatgcggttttgccatgttggccaggctggtctcgaactcctgggctcaagccatctgcccactttggcctctgagagtgctgagattataggcatgagccaccattcccagccatgttttcctttttcattgaactttatctactttagccattaaactccactccattggtcttgtcattactaagagctgaaccacctgcaaaatattaagttaaaaagcgttttctttgacaacagttttcttttcttcatcttcctctatcactttacttctgaacttttattctctcattttgatctgacccctacttctctgtttttcctggccatttagtactttcttgttttgctcatcccatttcccagtggagaccttctggtctgctgctttatcactggttttgttagaagacatacaaatggcaaggaggtatatgaaaaggtgcctaacatcattgatcatcagagaaatgcagaccaaaactacaatgagatatcatttcaccccagttaaaatggctttttttttttttttccaaaagacaggcaataacaaagtactggtgaggatgtggagtaaagggaacccacatacactattagtaggaatgtaaattagtacagccactgtggagaacagtttgaaggttcctcaaaaaactaaaaatagagctaccatataatccagcaatcccactgctaggtatatatccaaaagaaaggcaatcaatatacggaagagatacctgcacacccaggtttattgcagcactattcacaatagccaagatttggaagcaacccaggtgtccaacagatgaatggataaagaaaacatggtatataaacacaatggaatactattcagctgtgaaaaagaatgaaatcctgtcatttgcaatcctgtcttgaatagaactggaggtcatgatgttaagtgaaataagacaggcacaaacttcacatgttctcacttatttgtgggagctaaaaattaaaacaatcgaactcatggagctagagaatagaattatggttaccagaggctggaagggtggttgggcgtataagtgtagggggagtggggatggttaatgggtacaaaaaaatgagaacgaataagatctacttgataacacaacagggtgactatagtcaacagtaattatacatttaaaaataactagaagagtataattagattgtaacacaaaagataaatgcttgaggtgatggatacctatttaccctgatgtgattattacttatttcatgcctatatcaaaatatttatactccaaaaatatatatacctactatgtacccacaaaaatttaaaaatttatatattgtttttgctatcacctttagaatttcttgtcattggatagttcgtctgtataccattctggtcttcattccccagggcccccgttgtctgatttttctgcttctagaactgttagaggtcacaaaagcaagatggttgtatctatcacaatttttgtctgactttaactgggtatctgttacgatttagtagtcatcttactgacttcttgttggtttccaattgaatcctcacagtagactgttttcattgtaatcagtatcgaattatagcctgttcccttcttcataaatgaaggctttcttcttcaacagttcttagtgacttcacctgtactttatttctctgctttgaatatttcgaagaaaacatattcttgctctttcccaaggttaacactacatacattaccttgaccacaggatgttttcttgcagattgtgacctaattccatcacccttcagcagcccccaccgttttcatggattcagctaaaccttctgtaagatgactctttttccccctaatctttatatctcttttgatatgtagctttagtctcactttttttccttttggattttgccagttagatgtctccctggaattccacttcagcatggctaagactaagcttgtcttctctttcctccccaaagcaaattgtaattaggatagactgaaggtgacagaagataactaagatcttcttcatcctttcggctcttatggaagctgaattccagtagtcattctaaatttgttgtatgtcagcttatggtatcttttcatgtctttacattcagccaaagaggaagttccttgaaggggagaccagagggcgtgctgtgcttcttaatcctctctttcttaaccagtaagaggcattcagtagatatctgatgatactgattaatagaggggaacttttcagattcttttttttttttaaccctagtaagctttagtacaaactaaatgctgagagattatcaagtaagggattgatcatcacaagaagactcaggatgttacatcctgtaggttttatagtttcctatattgtaaaaaatatgagttatagcagcttgtctggatgtcatacaggtataaaaatcagttttataaacttgagtaaattggggcccattttagaaaaaactcttgcaggctgtgaatgccaatatataagtaaagtattaagtataatgttatttaatgtgggcaaacataaagccaggtgtaaattttttaggtttaaaatcttatagaactatacatccaaaagaaaatttcaagttaaacataatacaaagcaatacaatctaaattaacattaatttaatgtgatgaatgatattgccttgctaaaagtgggtcactacttacaatgtgcaaatggtactcatcgttagggtatagattcttttaaactatgacatacgtacactaccatgtggaacgtgatgatgtgttctctgttctaactactgggaagacttccttggcatagcacatgccatggggtcagttggctttgacttcatatagatatgccatttacttggtcagtgtcacttctatgacaagtagtatgttgtgccagtttgattataagtacaaatatgggcaatgaagtaacttggttttaaggttgttactaagctgagtaacagtgtgtggctatacaaatttttataggctatcaggaatgaaaacacaggagattgttgtagattcaagtattttagattcaagtttgaagatgctcatgcagatgtttaactgagttgtatagacctttatgtttctttctttttctctttttttttttttgagacagagtcttgctctgtcacccaagctggagtgcaatggtgtgatctcggcttactgcaacctccgcctcccaggttcaagcaattctcctgcctcagcctcccaagtagctgggattacagatgtgcaccacgacgcccagctgattttttgtattttagtagaggcggggtctcaccatgttgtcaagatggtctcaatctcctgaccttgtgatccacccacctctgcctcccaaagtgctgtgattacaggcgtgagccaccgcgcctgactgacctttatgtttcttaactttatgctatacatcagttgatatttcaaaaatttaaatggtttctatgattattctttgggctaagaaattgggcattaattgtcctcatatgtatggtttttgtggctacttcatgtagattttatttttggtggttatcaaattggaatttttttttttttttttttttttgagacggagtctcattctgtttcccaggttggagtacagtggtgcaatctcagctcactgcagcctcgacctcccaggctcaagcagtcctctcacctcagccttctaagtagctgggactacaggcacgcaccaccacacctggctagttttttgtgtttttagtagagatggggttttaccctgttggccaggctggtcttgaactcctggcctcaagtgatccacctgcctcagcctcccaaagtgctgggattagaggcatgagccaccacacctggctgaaattggaatttcattggtactgcctgtaattttatgttaatttttttttttttttgtcgtcactagcttttatctaaagcccctagagagaaaggccatgataccttgtatacaaggttataagagtatacaagggaaagggagggctgaagggaacagggtgggctggtacaagcctcattagaaataccattgagtctgtgagtaaaacatcattatatgaaaaggagatgtggttttagggtggtccaattacttttgcaccagcctaataaaattacaagtcattatcaatagagacattgtaaaacctttttttttcccaaaagaagtatcaggtatgataattacatgtctgcccaactttcgttatagattaacataacttaattgtatttaaggtacaatttaggagagttgctgaaaaatgaatctttagtattgggatgccttgattctaccctcaatagctataatggattatgtgtctgagtagattaataaaaatcttttgagcatttttcttgaactacttcactgaagattagctttttgagcatccattttaatttctcagtatataaggatcggtttatcacaactgtattgttttccctggccttgttagattatattttcatatcatgtagaaaaataggtgtattcgttctcccttgaagtcctttgtctcccaaaggaaatggttgcaatacagatgtgtcacctcttccacaggtaaagtggaatggagaagtagccagttaaatagtgcatgctcaatttggaacatttagagcatacaggaaagttatttatttggtaaatattttttaagcatttactatgtttcatgcattgtactagttgtagaggatataattgaatacaactacatgtagcccttgactttatggaactagtctagtataaagatttaagattgcctggcatggtggctcacgccactaatcccagcactttgagaggccaaggcaggattgcttgaggccagaagtttaagagtagcttggtcaacataatgagactccatctctaaaataaatagatagatagatagatagatagatagatagatagatagatagaagtagttagacaacacaaagcagtttcactcatcttgtggcaaggagttatgtatttctaatcaaatttggcaactcaagcattttcaacaaaatctacatgttttttcagaataaagtgaccaacacagaatgttacctgtaaaaatcagagcaataattgctatctaaaataattttgaaaattaagtggtactgaaaggctcatatagcaaaaatatggcctcctgtcattgtactttcctacttcccagactcaccattttcaacattttttagtagtttattttgccattttatagcatagtacctgacattttatttattcaacagacatttcttaagtacctaatacatgccattccttgtttgaagggatgctaaggatacagtggtgaacaaggcgttgtggggttgtatagagggtattcattcctaaccttgaaccaaatatttctttctgttggataatgcattaaaaattgcaaacagtttacaaacttttggagcaatggtggccttgatcataaagtagggactgcttctaccgtatacatgcttggtggtgtatttgtgatatctggctaaagtttctacatggaaattgactgactttagttttgagacttctgggaaccagtcaggcaaaatagtgaaactgtgtatcctgtttccaagagttgtcttttaaggttatctgcttcattcatttggcctgacttgctaggcaaatgcctagggtaaatatgatttgattaactataacaacaacagcaacaacaacaactttattttttagagcagtttgaggttcacagcaaaattgagcagaatgtacagagattttccctatacccgcttcccctacgcatgtgcggcctcccctactatcaacatcccccaccagagtggtttgttacaattaatgaacctacattgacacatcattatcactcaaggtccgtagtttacattagagtccactcttggtgttgtgtatgggtttggtcgattttataatgacatttatccaccattatagtgtcatacatagtaattttgctaccctaaaaatccagtgtgctccacctgttcctccttccctcctccctcatccctggcaaccactgaactttttaacatctccatagttttgccttttccagaatgtcatatcattggaatcacacagtatgcagccttttcaaatgggcttctttccgttagtaataggcatttaagtttcatcctcatcttttcatggcttgatagctcatttctttccctccctcttttcttccctgtcttccttccttcctcttctttcctgtttcctctttcttcttccttttttaagagacaaggtgtctcactctgttgcccaggctggagtgcagtggcccaatcatagctcattgcagccttgaattcctgggctcaagtgatcctcctgcgttagcctcctgagtagctgggatcacaggctccagtcattttagtgctgaataatatttcattatctggatgtaccgcctattcattcacctactgaagaatatcttggttgcttctaagttttggcaattatgagtgaagttactataaacattgtatacaagttttatgtggatgtatgttgtcatctcccttgggcagataccaaggagtgccattgttggatcatatggtaaatatatctttagttttgtacagaattctaggttggtatttttttctctctcagtcctttattttatttggagacagtctcgctatgtcgcccaggctgccatacagtggtgccatctgggctcactgaaacctccacctcccaggttcaagcgattcttgtgccttggcctcccaagtagctgggattacaggagtgcgccaccacgcctgctaatttttgtatttttagtagagacagggttttgccatgttgcccaggctggtctcaaactcctgaccttaagtgattcacccacctcaatctcccaaaatcctgggattacaggcctgagctactgtgcctgatctctctcagtactttaaagaaatatttcattccacttttcttttttttcttctttttgagatggagtctcactctgtcgcctgggctggagtgcagtggcgcgatctcagctcactgccacctccgcctcctgggttcaagtgattctcctgcctcagcctcctgaatagctgagattacaggcgcccaccaccatgcccagctaattttttgcatttttagtagagacgggggttccaccatgttggccaggctggtctcgaactcctgacctcgtgattcgcacatctcggcctcccaaattgctgggattacaggtgtgagctaccacgcctggcccactcttcttgcttacatagtttctgaggagatgtcagatgtaatttttatttttgctcttctgtaggcaagttgagttttttccccctctagcttctctcaggatttttttctttatctttgattttcagtagtttgaaaattatatgcctagctgtcagggttttttgcttgtttgtttttgttttctcaggtgtgactccagaaaggttctaaagaggagctttacaatctcttctctggggtttatggagacttcctttacccttctgtgttagccccttaaagcactgcgtcaaccttaaaagggcacaggaaagggtgtctatgccatttttatgccatttatcctgcttggtgttttctgagctttcttcatctgcggtttaatgtctcacattaatttgtagaaattctctgtcattgtttcaaatttttcttcagttcttttctctgtttcttcttctggtgttcccattatgcttttgtggttgtcgtacagttattggatattttgttccaggcttttttttttccagtctttttttccttttgcttctcggttttgtaggtgtctgttgagatactctcaagtgcagatattctttcctcagctttgtctagtttactaataagcccattaaaggcagtcttcatttctgttacagtctttttgatcagtagcatttcttttttattctttcttaaaatttctgtctttctgcttacattgcccatctgttcttgcatggtttctactttgtccattagagttcttaggatatttatcataattatttcaaatttctggtgtaacaattccaacatccctgcaacatccaagtctagtttcgatgcttactgtgtctcttccagctgtgttttttcctatttaatatgtcttataattttttcttgatagccatacatgatgcattaggtaacagaaactgctgtgagtggacctttagtaatgtggtggtaaggtgtgcatggaggggaaacattttcagtctgttagtgaacttttgtcaacttcacatgtgcttctcaagtccatcctgtaagtgggagagtagggctagagaggactgaagttgggtatatattaaatactttctcctacaaagaagcctagaggggacgcattaggggattttttttcccccagtattcactgtgatgacccttattgagctcctggaggtaaaactcacaaaactgtggttctcccccctgcccatattactacatgtccctggagtttatatctttcagacttgtctgcactgagcttccaccaatttgtcaaatacagatcaggtttccctaccacccgtgcagttgaaaacccacatacaacttttgactcctccagagcttaactactcatagcctgctattgactggaagccttgccaataacataaacagttgattaatacatattttatatgttttctgtattatatattgtattcttacaataaagagaaaagaagatgttattaagaaaatcataaggaagataaaatatatttactgttcattaagtggttcccatgggtgctggttcccatggaggttgccccttgtgagtttttgctcagggaagttgtgattctctatatttgcctgttggtctcctaatttgggagtcatcagttttccctgtgacctcacttctcttacagagttaagaacagttgttggtttttcagtttgttcagtgttttacatgttgttagaacacagtggtacttctaagtttcttaacatgctagatcagaaacctgaagtctcacctaatttggctttttatattttttcttcttttttttcttccattgctaccaaagcatttttcatctgtgtctggggtgacattagagcagaatgtgatttctaggtaaacattattgggctccctagcagaaaaatttttgaaagtagtacatgaattctgtataattaaaattttcttttcatcttaataggtataggtaataggcacggcctattttttttttgctcaacagtctaaaatagtaatttaatcacctaatagccttagttatatagttgaaagaagagttggaaatctgattcatgggttggaaatcacctgtcacatatgagttttaggcactggtcactttattttgaaacagctttggggttttttcctttttcaactcataataggctttaacagcttttagttttgtttctgtttttttaacagcatgagttgccaaatttggttatagcttcttggtacaagatgggtaaatttgctttgtgttgtgtaattactttttattttaaatgctacctcttttatgaacactaactttacactaagattaggaaaatgagaattgcatgtctgcaacaaatagctatctgtagtattaaattgtgaaaatgtagactttggattggagctggcatctcttaatatgtaattgtaacatagagtaaataagtattttgtcccttgtagggtcaaacagtacagtgcatgggcagaattagagatgtaggcttttttttttttttttttttttactggcttagagaaccgtttgatcagctaatatggaattaagtccctagggctgcccaggcacaacattaactgctattaaaggaaaatttaaaagagtattagtgaaggttaaatactgaccatggacatctggcaaaattgatgttttttttcccctccaccattgtttatagtttattgttatttatcagagaattaatgtttattttcagaatctattaccataagaaatctgtttgaggacttcgtatgtgccaggaattctactaaataatgatataatgctgaacagaattagataggatcctcacttcgttaagcttacagtctagtggtatagatcaacattaatcaaagaataacacaaatagaaagcagagcagtggttcatgggattgactgtagagaagcatgagggaagttcccaggtgatggaaaatactttatttcttaatcgtggtggttacatgtgtgcatatgtttatgaaaatatattgtacatttaaagtggatacattttatcacatgtaaattatgactctataaagttaattaaaaagaataactcaggtaaggtggtgtgtgcgcctgtagtcccagctatttctgaggcaggaagatcacttgagcccaggagtttgagttcagcatgggcaacatgagacctgtgagactttgtctctaaaaaaatttaaataaataactaagataaatgtaaaattacagctgtagtaagttctacaaaggagagttacatgggctatgacgatgtaagatagcaagaactgacattggcagggaggaaatgatgatgagtagaagtaaataagtgaagtgtggggattgatgtcaaggggacagtataaaagaaataacagcatgcgccaaggccctaaaattggaaagtccttggcaaattaaaggagtttgaaaaaggccattgtgtgcaaagcagaaaataggtactacaaggtaaaagatggagctaagcggtaggtaaggctaaaccttgtcagccattgttaaatattgaattgtatcctaagcacaactcagtggaaagcagttaaagttctttaattgggggaggcaatgaaggggtaataaaattggttatagaaatactgctctggctctagtgttgagaatgaattggagtagccagagtagattcaagaagactttagtaagattattccaacaggccaggacctgttatagggtggtggcaatggagagagatggacagaatggagagtgtatttaggaggtaaaaatgacagaacttggtgatgcactgaatgtgaaatggggaaggtgtctaggaggactactaggtttatggtttgcgtattagggtggatgatagcagtttcatttactgagacagggagccctggcagagtacccagcttttagagtgggtagggggaaggggagagtgcatctggtgttgggcattttgaagtgatttacatacaacaaactgaaggtatctttaacactgagtccagcaggttagcatatttattcagcaagcattgcacctttttttgttgtttttggggtcttcaactcctggcctcgaatcctccctccttcccccgcctctcccagcctccgcctcccaaagtgctgggatttcaggagtgagccaccgcgcctggccagcatcgcgctgtttgtgcagtgtgccctgtgctaggtcttgcagtgggtaccagtagagacataaaagtacaaaagataattggacgtttagtagagtcctgaaagggggcgggataggaagatacctaaccataagaaaaaccagcaagagcggaaaaggagctagtcctccagatcaataagttaatcacttatgtttgtgattccctgcattttgggtgattctctgtcgaggtcctcttaagtccagacttttgatataatctgcagtttgcgccatttggattcctgaagcatctttacaagccacctacattccttatggagctgtggcacaacagcaagcccacgatgtctcaccggattaataaaaatataggcgctcacgcttttgtttaccgatatagtatctcctcctcccctcactccatcaacccccacgcgacacaactttccggaagtaagcaaaatccgttatcaaggtgaaactccggggaccaggctccacagctgccataaactggatggcacgttagaagccggtgggtgtaggtgaggcacgctggcgcccgcgggcccttctccagccgctacccagtgggaatccgcggggctgaagccccgaaaccaggctgagcgtcccagagcgcaacctccctttcccccagcagcgccggcgccgcagaagccgcgtgtccccaggcgcactcccccaaggtgaacccccgccccccacggaggcggctgggtcgcgggtctgggcggggcgctccggacgccctcccgccgctgcgcacccctcccgcgagctgccagctccctcggcctctccacccaaaactggcccaaccgccaatcgtctgcctctcacctcctacagcaggtgacccatggccaatcgccaggggtctctttgccaggagccgccagggccagccaatcggggcgacccctccgccggggaggggacgggaaaggggtggggggtgaagggggtgaagggggtgtcccgggggacgggctgaacctcagtcaggaccgcctgcaccgcagtccggggatcgggtcgaggggagaagaaaaaggggtgctcgggagcagcccccggctacctcccctggaggcacagagggcgggggccttggcgaatggctttcttgctggccacttgcggagtgagtagaccccgagggtctgggagaggggccggcccctacccctgagtccccggggtcccggccgccaggccggagcgcgaatgtcgtgctcaccctgcctccttcccgccgccccctgggggtttggattcaggatttgttcctagtgtccaagattttgataagaaacttacagaagctgatgcttacctacaaatcttgattgaacaattaaagctttttgatgacaagcttcaaaactgcaaagaagatgaacagagaaagaaaattgaaactctcaaagagacaacaaatagcatggtagaatcaattaaacactgcattgtgttgctgcagattgccaaagaccagagtaatgcggagaagcacgcagatggaatgataagtactattaatcccgtagatgcaatatatcaacctagtcctttggaacctgtgatcagcacaatgccttcccagactgtgttacctccagaacctgttcagttgtgtaagtcagagcagcgtccatcttccctaccagttggacctgtgttggctaccttgggacatcatcagactcctacaccaaatagtacaggcagtggccattcaccaccgagtagcagtctcacttctccaagccacgtgaacttgtctccaaatacagtcccagagttctcttactccagcagtgaagatgaattttatgatgctgatgaattccatcaaagtggctcatccccaaagcgcttaatagattcttctggatctgcctcagtcctgacacacagcagctcgggaaatagtctaaaacgcccagataccacagaatcacttaattcttccttgtccaatggaacaagtgatgctgacctgtttgattcacatgatgacagagatgatgatgcggaggcagggtctgtggaggagcacaagagcgttatcatgcatctcttgtcgcaggttagacttggaatggatcttactaaggtagttcttccaacgtttattcttgaaagaagatctcttttagaaatgtatgcagacttttttgcacatccggacctgtttgtgagcattagtgaccagaaggatcccaaggatcgaatggttcaggttgtgaaatggtacctctcagcctttcatgcgggaaggaaaggatcagttgccaaaaagccatacaatcccattttgggcgagatttttcagtgtcattggacattaccaaatgatactgaagagaacacagaactagtttcagaaggaccagttccctgggtttccaaaaacagtgtaacatttgtggctgagcaggtttcccatcatccacccatttcagccttttatgctgagtgttttaacaagaagatacaattcaatgctcatatctggaccaaatcaaaattccttgggatgtcaattggggtgcacaacatagggcagggctgtgtctcatgtctagactatgatgaacattacattctcacattccccaatggctatggaaggtctatcctcacagtgccctgggtggaattaggaggagaatgcaatattaattgttccaaaacaggctatagtgcaaatatcatcttccacactaaacccttctatgggggcaagaagcacagaattactgccgagattttttctccaaatgacaagaagtctttttgctcaattgaaggggaatggaatggtgtgatgtatgcaaaatatgcaacaggggaaaatacagtctttgtagataccaagaagttgcctataatcaagaagaaagtgaggaagttggaagatcagaacgagtatgaatcccgcagcctttggaaggatgtcactttcaacttaaaaatcagagacattgatgcagcaactgaagcaaagcacaggcttgaagaaagacaaagagcagaagcccgagaaaggaaggagaaggaaattcagtgggagacaaggttatttcatgaagatggagaatgctgggtttatgatgaaccattactgaaacgtcttggtgctgccaagcattaggttggaagatgcaaagtttatacctgatgatcagggcagtaggcataattcagcaacaaacaatcttcctttgggagaaacctgttcattccaatcttctaattacagtggttcctatctcagggatactggactttctgacgcagatgaacaattaaggggaaaagcttcccttttccctctgtggcagttacgattttgacttcagtcctgagaaaaacttcaggttttgaaaatcagatgatgtcttctccttttccaaacaccacacgttgaaagcatttataaatccaagtctgaaactctgcgctctagtactgctgttaagatacacaacttgtttcttagttcatataatctcgggatacacacacacacacacatatatatacacacacatacgtatacacacacatacatatatataaatatacctgatgccagatttttttcataaatattctgcctactgtaaatatgggttcctctgagttgttttagaaaattagcgcaatgtattaaaatcaagtgttaggaaatttcatggtcttacctacaataacttttattttggaattgaactattattaaattgtatctaatcctggaaaaaaaacaaaaatgctagtaaaatgataatgtaccgaaattggagaaatattcaattgtaactcacttttaaaaataataaaaccttagggggggtcccggtacaaatttccccttatagagggcggttttaaatttaattggcggcttttaacaacgtt

SEQ ID NO: 735107 - DNA, 18498 bp, Homo sapiens
  misc_feature (18422)..(18422): n is a, c, g, or t
  misc_feature (18433)..(18433): n is a, c, g, or t
  misc_feature (18438)..(18438): n is a, c, g, or t
  misc_feature (18441)..(18441): n is a, c, g, or t
  misc_feature (18443)..(18443): n is a, c, g, or t
gtaagggtctttacatggtttccagatagttcattagttgttgctttctttttttgtctgttttctgttttttttttttaaataactgtggtatgatgtaataggaacttataatttctgagttgcttatttttcctttacagttatagtaaagttatactcatttattttctcctgctttctgcagagtaaaatactgatttttgtctagaaacaagacagtgcaagacaatgttgaaagtgaaattctatgttaaaatatgccagatttattttaagaatttaatatctgtagtcagttatcaatacaaccaaattacataattatgcatgataataggtaaatactgagaagttcacctcattttcttgttaaaggatttggctattaccgtatgtgtcagttagtactcttttgtatggtagtgaaagaaaactcaacccaaactgattcatgaagaagaaagtaaatctggttagatgtggtttgaattaggtaattcatgtcatgaggactcagatctcccatctctatttctacgttccacttttgcattggcttcattttcggttaggttctcccttggtggtggtaaggtggttgtagcaatgtcagcctcccatttttggaaccgagtccataggaggctattctttctagaccttaataggagtaacacaattattgctcatcaccctagctttggccatgtgtcaaatcctgaccagtcacaatttcacagtcatagattctaccctggagctgggatgttactggcctcactagaaacacattgctgatagggtagaaggtgtgttcatcctacccaacccgacccgcaccaaagtcagaatagggaaaaacagatgttgggtgacatgcaactaacgtctgccgtactacactgaagatatttttctatgtttattctccagtgaaagagcttatatttgtggtacataggggattttgttttaatttagaaaatttaattgtagaaaacatgttttataaccctttctctgtactttgttctatatcaggaattgacttgattagataaggtgacatagggtatcttaggccctacaagatagtaaaccccccatcacttgaaagtattcagtagaggcttaaaaaacattattaaaggatgtggttattaggggactttaagaaatgaatatgaaattgaagtaggaaatctttaagctactctgtgagttatgccttttaaaagcaatttgtaattcctgtagatttcttttaaatttaggcagtttcataaatgactatagcatcattttagcaaatttgtgatcctgtaagaggaggataagtgttttttgtttgtttgtttgttttttgtttttttgagacagagtctcactttgtaccccagaaagtaaatctagttagatgtggtttgtctcggctcactgcaacctccaccccgtgcgttctagcaattctcctgcctcagccaccacacctggcctaagaggggaggataagtgttttagtgatcatattagactgaatgtggcagatgagatttcccgcccccccattgttggttagactgacattcaacattcaacaagagccacctgcccttgtaggcatttctgccactatacccctacataaacctagagtgctattgcttacttgctttccttcaaatacattttttcatttgtggcctccacattcttgtgtgtgatgtcctttctctgtgaaatgtcttctaccctttttttcaaagcctagtttagaactgacctcttctatgaaccctctgccgactggcctttccttccccagtcccccaagttcaaaatgatctctttcctttgaatactatagtatttgcacaattcactatctccttatcatattcttcttgtttatttgttatcagctgatgttgacatcataagttcaggttcctaactagatccaatattggaatttttcagcttttgctaagaagagagcttgtatgtctttgggaataatgggcagaaaaagataactttgagaagtcttagacttctaatagctttgatatttaaaagtacatgtaatacaagaggtttttttcctacatttaatgcatggagaagataggacatttagaaatatggaattaatgttcatttgactggcaaaagattattttctcagatgtagtgaagtgtggtaaagaacttcactctagagccagaatgtctgtgtttgtatcccagagcccaccacttacatttaaccattaacattcaacttactgtctctgagtttcagtggcctcatctataaaatgaggataataagagtacctacttcatagagttgttttagtggttaaataaactaacgtaaacttgctagaacttgataaactaatattggatgagaactggttgaaataatgcctggctatagtaaaaacttggtaaatgttagttgccattacaatgcaactactgttcctaccattccctctgccagtgcctggtattcagtagcactcagtaaatgttagttaaatgaagaaataactgaaggaatgaatgaacaaatggttgatgtagagattgcttttccattgttgtttattgaatattttgagatgtataacatactgtctgttaggcactgtgggatgggcactcacggagctgtcttccaaaggggtataggagaggagacgcagtgatctcagcaacctacctttaaaacatatcctagtatctactgccatgttaggttctcttcttttgctttttttaaaaaaaaattctcacaaaactccccccacccacttcagtttatagatgaggaagctcctactacataatagtgcttcccagtctaattcttgacctcattgtatttatatgtcctttttttttttgacagagtctcactcattgcagtggcacaatcacagctcactgcaacctctgcctcccctgctcaagtgatcctcccacctcaacctcctgagtagctgggactacaggcatgcaccaccacgcctggctaatttttgtatttttttgtagagatgcggttttgccatgttggccaggctggtctcgaactcctgggctcaagccatctgcccactttggcctctgagagtgctgagattataggcatgagccaccattcccagccatgttttcctttttcattgaactttatctactttagccattaaactccactccattggtcttgtcattactaagagctgaaccacctgcaaaatattaagttaaaaagcgttttctttgacaacagttttcttttcttcatcttcctctatcactttacttctgaacttttattctctcattttgatctgacccctacttctctgtttttcctggccatttagtactttcttgttttgctcatcccatttcccagtggagaccttctggtctgctgctttatcactggttttgttagaagacatacaaatggcaaggaggtatatgaaaaggtgcctaacatcattgatcatcagagaaatgcagaccaaaactacaatgagatatcatttcaccccagttaaaatggctttttttttttttttccaaaagacaggcaataacaaagtactggtgaggatgtggagtaaagggaacccacatacactattagtaggaatgtaaattagtacagccactgtggagaacagtttgaaggttcctcaaaaaactaaaaatagagctaccatataatccagcaatcccactgctaggtatatatccaaaagaaaggcaatcaatatacggaagagatacctgcacacccaggtttattgcagcactattcacaatagccaagatttggaagcaacccaggtgtccaacagatgaatggataaagaaaacatggtatataaacacaatggaatactattcagctgtgaaaaagaatgaaatcctgtcatttgcaatcctgtcttgaatagaactggaggtcatgatgttaagtgaaataagacaggcacaaacttcacatgttctcacttatttgtgggagctaaaaattaaaacaatcgaactcatggagctagagaatagaattatggttaccagaggctggaagggtggttgggcgtataagtgtagggggagtggggatggttaatgggtacaaaaaaatgagaacgaataagatctacttgataacacaacagggtgactatagtcaacagtaattatacatttaaaaataactagaagagtataattagattgtaacacaaaagataaatgcttgaggtgatggatacctatttaccctgatgtgattattacttatttcatgcctatatcaaaatatttatactccaaaaatatatatacctactatgtacccacaaaaatttaaaaatttatatattgtttttgctatcacctttagaatttcttgtcattggatagttcgtctgtataccattctggtcttcattccccagggcccccgttgtctgatttttctgcttctagaactgttagaggtcacaaaagcaagatggttgtatctatcacaatttttgtctgactttaactgggtatctgttacgatttagtagtcatcttactgacttcttgttggtttccaattgaatcctcacagtagactgttttcattgtaatcagtatcgaattatagcctgttcccttcttcataaatgaaggctttcttcttcaacagttcttagtgacttcacctgtactttatttctctgctttgaatatttcgaagaaaacatattcttgctctttcccaaggttaacactacatacattaccttgaccacaggatgttttcttgcagattgtgacctaattccatcacccttcagcagcccccaccgttttcatggattcagctaaaccttctgtaagatgactctttttccccctaatctttatatctcttttgatatgtagctttagtctcactttttttccttttggattttgccagttagatgtctccctggaattccacttcagcatggctaagactaagcttgtcttctctttcctccccaaagcaaattgtaattaggatagactgaaggtgacagaagataactaagatcttcttcatcctttcggctcttatggaagctgaattccagtagtcattctaaatttgttgtatgtcagcttatggtatcttttcatgtctttacattcagccaaagaggaagttccttgaaggggagaccagagggcgtgctgtgcttcttaatcctctctttcttaaccagtaagaggcattcagtagatatctgatgatactgattaatagaggggaacttttcagattcttttttttttttaaccctagtaagctttagtacaaactaaatgctgagagattatcaagtaagggattgatcatcacaagaagactcaggatgttacatcctgtaggttttatagtttcctatattgtaaaaaatatgagttatagcagcttgtctggatgtcatacaggtataaaaatcagttttataaacttgagtaaattggggcccattttagaaaaaactcttgcaggctgtgaatgccaatatataagtaaagtattaagtataatgttatttaatgtgggcaaacataaagccaggtgtaaattttttaggtttaaaatcttatagaactatacatccaaaagaaaatttcaagttaaacataatacaaagcaatacaatctaaattaacattaatttaatgtgatgaatgatattgccttgctaaaagtgggtcactacttacaatgtgcaaatggtactcatcgttagggtatagattcttttaaactatgacatacgtacactaccatgtggaacgtgatgatgtgttctctgttctaactactgggaagacttccttggcatagcacatgccatggggtcagttggctttgacttcatatagatatgccatttacttggtcagtgtcacttctatgacaagtagtatgttgtgccagtttgattataagtacaaatatgggcaatgaagtaacttggttttaaggttgttactaagctgagtaacagtgtgtggctatacaaatttttataggctatcaggaatgaaaacacaggagattgttgtagattcaagtattttagattcaagtttgaagatgctcatgcagatgtttaactgagttgtatagacctttatgtttctttctttttctctttttttttttttgagacagagtcttgctctgtcacccaagctggagtgcaatggtgtgatctcggcttactgcaacctccgcctcccaggttcaagcaattctcctgcctcagcctcccaagtagctgggattacagatgtgcaccacgacgcccagctgattttttgtattttagtagaggcggggtctcaccatgttgtcaagatggtctcaatctcctgaccttgtgatccacccacctctgcctcccaaagtgctgtgattacaggcgtgagccaccgcgcctgactgacctttatgtttcttaactttatgctatacatcagttgatatttcaaaaatttaaatggtttctatgattattctttgggctaagaaattgggcattaattgtcctcatatgtatggtttttgtggctacttcatgtagattttatttttggtggttatcaaattggaatttttttttttttttttttttttgagacggagtctcattctgtttcccaggttggagtacagtggtgcaatctcagctcactgcagcctcgacctcccaggctcaagcagtcctctcacctcagccttctaagtagctgggactacaggcacgcaccaccacacctggctagttttttgtgtttttagtagagatggggttttaccctgttggccaggctggtcttgaactcctggcctcaagtgatccacctgcctcagcctcccaaagtgctgggattagaggcatgagccaccacacctggctgaaattggaatttcattggtactgcctgtaattttatgttaatttttttttttttttgtcgtcactagcttttatctaaagcccctagagagaaaggccatgataccttgtatacaaggttataagagtatacaagggaaagggagggctgaagggaacagggtgggctggtacaagcctcattagaaataccattgagtctgtgagtaaaacatcattatatgaaaaggagatgtggttttagggtggtccaattacttttgcaccagcctaataaaattacaagtcattatcaatagagacattgtaaaacctttttttttcccaaaagaagtatcaggtatgataattacatgtctgcccaactttcgttatagattaacataacttaattgtatttaaggtacaatttaggagagttgctgaaaaatgaatctttagtattgggatgccttgattctaccctcaatagctataatggattatgtgtctgagtagattaataaaaatcttttgagcatttttcttgaactacttcactgaagattagctttttgagcatccattttaatttctcagtatataaggatcggtttatcacaactgtattgttttccctggccttgttagattatattttcatatcatgtagaaaaataggtgtattcgttctcccttgaagtcctttgtctcccaaaggaaatggttgcaatacagatgtgtcacctcttccacaggtaaagtggaatggagaagtagccagttaaatagtgcatgctcaatttggaacatttagagcatacaggaaagttatttatttggtaaatattttttaagcatttactatgtttcatgcattgtactagttgtagaggatataattgaatacaactacatgtagcccttgactttatggaactagtctagtataaagatttaagattgcctggcatggtggctcacgccactaatcccagcactttgagaggccaaggcaggattgcttgaggccagaagtttaagagtagcttggtcaacataatgagactccatctctaaaataaatagatagatagatagatagatagatagatagatagatagatagaagtagttagacaacacaaagcagtttcactcatcttgtggcaaggagttatgtatttctaatcaaatttggcaactcaagcattttcaacaaaatctacatgttttttcagaataaagtgaccaacacagaatgttacctgtaaaaatcagagcaataattgctatctaaaataattttgaaaattaagtggtactgaaaggctcatatagcaaaaatatggcctcctgtcattgtactttcctacttcccagactcaccattttcaacattttttagtagtttattttgccattttatagcatagtacctgacattttatttattcaacagacatttcttaagtacctaatacatgccattccttgtttgaagggatgctaaggatacagtggtgaacaaggcgttgtggggttgtatagagggtattcattcctaaccttgaaccaaatatttctttctgttggataatgcattaaaaattgcaaacagtttacaaacttttggagcaatggtggccttgatcataaagtagggactgcttctaccgtatacatgcttggtggtgtatttgtgatatctggctaaagtttctacatggaaattgactgactttagttttgagacttctgggaaccagtcaggcaaaatagtgaaactgtgtatcctgtttccaagagttgtcttttaaggttatctgcttcattcatttggcctgacttgctaggcaaatgcctagggtaaatatgatttgattaactataacaacaacagcaacaacaacaactttattttttagagcagtttgaggttcacagcaaaattgagcagaatgtacagagattttccctatacccgcttcccctacgcatgtgcggcctcccctactatcaacatcccccaccagagtggtttgttacaattaatgaacctacattgacacatcattatcactcaaggtccgtagtttacattagagtccactcttggtgttgtgtatgggtttggtcgattttataatgacatttatccaccattatagtgtcatacatagtaattttgctaccctaaaaatccagtgtgctccacctgttcctccttccctcctccctcatccctggcaaccactgaactttttaacatctccatagttttgccttttccagaatgtcatatcattggaatcacacagtatgcagccttttcaaatgggcttctttccgttagtaataggcatttaagtttcatcctcatcttttcatggcttgatagctcatttctttccctccctcttttcttccctgtcttccttccttcctcttctttcctgtttcctctttcttcttccttttttaagagacaaggtgtctcactctgttgcccaggctggagtgcagtggcccaatcatagctcattgcagccttgaattcctgggctcaagtgatcctcctgcgttagcctcctgagtagctgggatcacaggctccagtcattttagtgctgaataatatttcattatctggatgtaccgcctattcattcacctactgaagaatatcttggttgcttctaagttttggcaattatgagtgaagttactataaacattgtatacaagttttatgtggatgtatgttgtcatctcccttgggcagataccaaggagtgccattgttggatcatatggtaaatatatctttagttttgtacagaattctaggttggtatttttttctctctcagtcctttattttatttggagacagtctcgctatgtcgcccaggctgccatacagtggtgccatctgggctcactgaaacctccacctcccaggttcaagcgattcttgtgccttggcctcccaagtagctgggattacaggagtgcgccaccacgcctgctaatttttgtatttttagtagagacagggttttgccatgttgcccaggctggtctcaaactcctgaccttaagtgattcacccacctcaatctcccaaaatcctgggattacaggcctgagctactgtgcctgatctctctcagtactttaaagaaatatttcattccacttttcttttttttcttctttttgagatggagtctcactctgtcgcctgggctggagtgcagtggcgcgatctcagctcactgccacctccgcctcctgggttcaagtgattctcctgcctcagcctcctgaatagctgagattacaggcgcccaccaccatgcccagctaattttttgcatttttagtagagacgggggttccaccatgttggccaggctggtctcgaactcctgacctcgtgattcgcacatctcggcctcccaaattgctgggattacaggtgtgagctaccacgcctggcccactcttcttgcttacatagtttctgaggagatgtcagatgtaatttttatttttgctcttctgtaggcaagttgagttttttccccctctagcttctctcaggatttttttctttatctttgattttcagtagtttgaaaattatatgcctagctgtcagggttttttgcttgtttgtttttgttttctcaggtgtgactccagaaaggttctaaagaggagctttacaatctcttctctggggtttatggagacttcctttacccttctgtgttagccccttaaagcactgcgtcaaccttaaaagggcacaggaaagggtgtctatgccatttttatgccatttatcctgcttggtgttttctgagctttcttcatctgcggtttaatgtctcacattaatttgtagaaattctctgtcattgtttcaaatttttcttcagttcttttctctgtttcttcttctggtgttcccattatgcttttgtggttgtcgtacagttattggatattttgttccaggcttttttttttccagtctttttttccttttgcttctcggttttgtaggtgtctgttgagatactctcaagtgcagatattctttcctcagctttgtctagtttactaataagcccattaaaggcagtcttcatttctgttacagtctttttgatcagtagcatttcttttttattctttcttaaaatttctgtctttctgcttacattgcccatctgttcttgcatggtttctactttgtccattagagttcttaggatatttatcataattatttcaaatttctggtgtaacaattccaacatccctgcaacatccaagtctagtttcgatgcttactgtgtctcttccagctgtgttttttcctatttaatatgtcttataattttttcttgatagccatacatgatgcattaggtaacagaaactgctgtgagtggacctttagtaatgtggtggtaaggtgtgcatggaggggaaacattttcagtctgttagtgaacttttgtcaacttcacatgtgcttctcaagtccatcctgtaagtgggagagtagggctagagaggactgaagttgggtatatattaaatactttctcctacaaagaagcctagaggggacgcattaggggattttttttcccccagtattcactgtgatgacccttattgagctcctggaggtaaaactcacaaaactgtggttctcccccctgcccatattactacatgtccctggagtttatatctttcagacttgtctgcactgagcttccaccaatttgtcaaatacagatcaggtttccctaccacccgtgcagttgaaaacccacatacaacttttgactcctccagagcttaactactcatagcctgctattgactggaagccttgccaataacataaacagttgattaatacatattttatatgttttctgtattatatattgtattcttacaataaagagaaaagaagatgttattaagaaaatcataaggaagataaaatatatttactgttcattaagtggttcccatgggtgctggttcccatggaggttgccccttgtgagtttttgctcagggaagttgtgattctctatatttgcctgttggtctcctaatttgggagtcatcagttttccctgtgacctcacttctcttacagagttaagaacagttgttggtttttcagtttgttcagtgttttacatgttgttagaacacagtggtacttctaagtttcttaacatgctagatcagaaacctgaagtctcacctaatttggctttttatattttttcttcttttttttcttccattgctaccaaagcatttttcatctgtgtctggggtgacattagagcagaatgtgatttctaggtaaacattattgggctccctagcagaaaaatttttgaaagtagtacatgaattctgtataattaaaattttcttttcatcttaataggtataggtaataggcacggcctattttttttttgctcaacagtctaaaatagtaatttaatcacctaatagccttagttatatagttgaaagaagagttggaaatctgattcatgggttggaaatcacctgtcacatatgagttttaggcactggtcactttattttgaaacagctttggggttttttcctttttcaactcataataggctttaacagcttttagttttgtttctgtttttttaacagcatgagttgccaaatttggttatagcttcttggtacaagatgggtaaatttgctttgtgttgtgtaattactttttattttaaatgctacctcttttatgaacactaactttacactaagattaggaaaatgagaattgcatgtctgcaacaaatagctatctgtagtattaaattgtgaaaatgtagactttggattggagctggcatctcttaatatgtaattgtaacatagagtaaataagtattttgtcccttgtagggtcaaacagtacagtgcatgggcagaattagagatgtaggcttttttttttttttttttttttactggcttagagaaccgtttgatcagctaatatggaattaagtccctagggctgcccaggcacaacattaactgctattaaaggaaaatttaaaagagtattagtgaaggttaaatactgaccatggacatctggcaaaattgatgttttttttcccctccaccattgtttatagtttattgttatttatcagagaattaatgtttattttcagaatctattaccataagaaatctgtttgaggacttcgtatgtgccaggaattctactaaataatgatataatgctgaacagaattagataggatcctcacttcgttaagcttacagtctagtggtatagatcaacattaatcaaagaataacacaaatagaaagcagagcagtggttcatgggattgactgtagagaagcatgagggaagttcccaggtgatggaaaatactttatttcttaatcgtggtggttacatgtgtgcatatgtttatgaaaatatattgtacatttaaagtggatacattttatcacatgtaaattatgactctataaagttaattaaaaagaataactcaggtaaggtggtgtgtgcgcctgtagtcccagctatttctgaggcaggaagatcacttgagcccaggagtttgagttcagcatgggcaacatgagacctgtgagactttgtctctaaaaaaatttaaataaataactaagataaatgtaaaattacagctgtagtaagttctacaaaggagagttacatgggctatgacgatgtaagatagcaagaactgacattggcagggaggaaatgatgatgagtagaagtaaataagtgaagtgtggggattgatgtcaaggggacagtataaaagaaataacagcatgcgccaaggccctaaaattggaaagtccttggcaaattaaaggagtttgaaaaaggccattgtgtgcaaagcagaaaataggtactacaaggtaaaagatggagctaagcggtaggtaaggctaaaccttgtcagccattgttaaatattgaattgtatcctaagcacaactcagtggaaagcagttaaagttctttaattgggggaggcaatgaaggggtaataaaattggttatagaaatactgctctggctctagtgttgagaatgaattggagtagccagagtagattcaagaagactttagtaagattattccaacaggccaggacctgttatagggtggtggcaatggagagagatggacagaatggagagtgtatttaggaggtaaaaatgacagaacttggtgatgcactgaatgtgaaatggggaaggtgtctaggaggactactaggtttatggtttgcgtattagggtggatgatagcagtttcatttactgagacagggagccctggcagagtacccagcttttagagtgggtagggggaaggggagagtgcatctggtgttgggcattttgaagtgatttacatacaacaaactgaaggtatctttaacactgagtccagcaggttagcatatttattcagcaagcattgcacctttttttgttgtttttggggtcttcaactcctggcctcgaatcctccctccttcccccgcctctcccagcctccgcctcccaaagtgctgggatttcaggagtgagccaccgcgcctggccagcatcgcgctgtttgtgcagtgtgccctgtgctaggtcttgcagtgggtaccagtagagacataaaagtacaaaagataattggacgtttagtagagtcctgaaagggggcgggataggaagatacctaaccataagaaaaaccagcaagagcggaaaaggagctagtcctccagatcaataagttaatcacttatgtttgtgattccctgcattttgggtgattctctgtcgaggtcctcttaagtccagacttttgatataatctgcagtttgcgccatttggattcctgaagcatctttacaagccacctacattccttatggagctgtggcacaacagcaagcccacgatgtctcaccggattaataaaaatataggcgctcacgcttttgtttaccgatatagtatctcctcctcccctcactccatcaacccccacgcgacacaactttccggaagtaagcaaaatccgttatcaaggtgaaactccggggaccaggctccacagctgccataaactggatggcacgttagaagccggtgggtgtaggtgaggcacgctggcgcccgcgggcccttctccagccgctacccagtgggaatccgcggggctgaagccccgaaaccaggctgagcgtcccagagcgcaacctccctttcccccagcagcgccggcgccgcagaagccgcgtgtccccaggcgcactcccccaaggtgaacccccgccccccacggaggcggctgggtcgcgggtctgggcggggcgctccggacgccctcccgccgctgcgcacccctcccgcgagctgccagctccctcggcctctccacccaaaactggcccaaccgccaatcgtctgcctctcacctcctacagcaggtgacccatggccaatcgccaggggtctctttgccaggagccgccagggccagccaatcggggcgacccctccgccggggaggggacgggaaaggggtggggggtgaagggggtgaagggggtgtcccgggggacgggctgaacctcagtcaggaccgcctgcaccgcagtccggggatcgggtcgaggggagaagaaaaaggggtgctcgggagcagcccccggctacctcccctggaggcacagagggcgggggccttggcgaatggctttcttgctggccacttgcggagtgagtagaccccgagggtctgggagaggggccggcccctacccctgagtccccggggtcccggccgccaggccggagcgcgaatgtcgtgctcaccctgcctccttcccgccgccccctgggggtttggattcaggatttgttcctagtgtccaagattttgataagaaacttacagaagctgatgcttacctacaaatcttgattgaacaattaaagctttttgatgacaagcttcaaaactgcaaagaagatgaacagagaaagaaaattgaaactctcaaagagacaacaaatagcatggtagaatcaattaaacactgcattgtgttgctgcagattgccaaagaccagagtaatgcggagaagcacgcagatggaatgataagtactattaatcccgtagatgcaatatatcaacctagtcctttggaacctgtgatcagcacaatgccttcccagactgtgttacctccagaacctgttcagttgtgtaagtcagagcagcgtccatcttccctaccagttggacctgtgttggctaccttgggacatcatcagactcctacaccaaatagtacaggcagtggccattcaccaccgagtagcagtctcacttctccaagccacgtgaacttgtctccaaatacagtcccagagttctcttactccagcagtgaagatgaattttatgatgctgatgaattccatcaaagtggctcatccccaaagcgcttaatagattcttctggatctgcctcagtcctgacacacagcagctcgggaaatagtctaaaacgcccagataccacagaatcacttaattcttccttgtccaatggaacaagtgatgctgacctgtttgattcacatgatgacagagatgatgatgcggaggcagggtctgtggaggagcacaagagcgttatcatgcatctcttgtcgcaggttagacttggaatggatcttactaaggtagttcttccaacgtttattcttgaaagaagatctcttttagaaatgtatgcagacttttttgcacatccggacctgtttgtgagcattagtgaccagaaggatcccaaggatcgaatggttcaggttgtgaaatggtacctctcagcctttcatgcgggaaggaaaggatcagttgccaaaaagccatacaatcccattttgggcgagatttttcagtgtcattggacattaccaaatgatactgaagagaacacagaactagtttcagaaggaccagttccctgggtttccaaaaacagtgtaacatttgtggctgagcaggtttcccatcatccacccatttcagccttttatgctgagtgttttaacaagaagatacaattcaatgctcatatctggaccaaatcaaaattccttgggatgtcaattggggtgcacaacatagggcagggctgtgtctcatgtctagactatgatgaacattacattctcacattccccaatggctatggaaggtctatcctcacagtgccctgggtggaattaggaggagaatgcaatattaattgttccaaaacaggctatagtgcaaatatcatcttccacactaaacccttctatgggggcaagaagcacagaattactgccgagattttttctccaaatgacaagaagtctttttgctcaattgaaggggaatggaatggtgtgatgtatgcaaaatatgcaacaggggaaaatacagtctttgtagataccaagaagttgcctataatcaagaagaaagtgaggaagttggaagatcagaacgagtatgaatcccgcagcctttggaaggatgtcactttcaacttaaaaatcagagacattgatgcagcaactgaagcaaagcacaggcttgaagaaagacaaagagcagaagcccgagaaaggaaggagaaggaaattcagtgggagacaaggttatttcatgaagatggagaatgctgggtttatgatgaaccattactgaaacgtcttggtgctgccaagcattaggttggaagatgcaaagtttatacctgatgatcagggcagtaggcataattcagcaacaaacaatcttcctttgggagaaacctgttcattccaatcttctaattacagtggttcctatctcagggatactggactttctgacgcagatgaacaattaaggggaaaagcttcccttttccctctgtggcagttacgattttgacttcagtcctgagaaaaacttcaggttttgaaaatcagatgatgtcttctccttttccaaacaccacacgttgaaagcatttataaatccaagtctgaaactctgcgctctagtactgctgttaagatacacaacttgtttcttagttcatataatctcgggatacacacacacacacacatatatatacacacacatacgtatacacacacatacatatatataaatatacctgatgccagatttttttcataaatattctgcctactgtaaatatggggnccccgggtggntaaanatngngccggtttaacccggggggaattcggggtaccacacaaaaccattgggaggcaca

SEQ ID NO: 735108 - DNA, 17317 bp, Homo sapiens
gtaagggtctttacatggtttccagatagttcattagttgttgctttctttttttgtctgttttctgttttttttttttaaataactgtggtatgatgtaataggaacttataatttctgagttgcttatttttcctttacagttatagtaaagttatactcatttattttctcctgctttctgcagagtaaaatactgatttttgtctagaaacaagacagtgcaagacaatgttgaaagtgaaattctatgttaaaatatgccagatttattttaagaatttaatatctgtagtcagttatcaatacaaccaaattacataattatgcatgataataggtaaatactgagaagttcacctcattttcttgttaaaggatttggctattaccgtatgtgtcagttagtactcttttgtatggtagtgaaagaaaactcaacccaaactgattcatgaagaagaaagtaaatctggttagatgtggtttgaattaggtaattcatgtcatgaggactcagatctcccatctctatttctacgttccacttttgcattggcttcattttcggttaggttctcccttggtggtggtaaggtggttgtagcaatgtcagcctcccatttttggaaccgagtccataggaggctattctttctagaccttaataggagtaacacaattattgctcatcaccctagctttggccatgtgtcaaatcctgaccagtcacaatttcacagtcatagattctaccctggagctgggatgttactggcctcactagaaacacattgctgatagggtagaaggtgtgttcatcctacccaacccgacccgcaccaaagtcagaatagggaaaaacagatgttgggtgacatgcaactaacgtctgccgtactacactgaagatatttttctatgtttattctccagtgaaagagcttatatttgtggtacataggggattttgttttaatttagaaaatttaattgtagaaaacatgttttataaccctttctctgtactttgttctatatcaggaattgacttgattagataaggtgacatagggtatcttaggccctacaagatagtaaaccccccatcacttgaaagtattcagtagaggcttaaaaaacattattaaaggatgtggttattaggggactttaagaaatgaatatgaaattgaagtaggaaatctttaagctactctgtgagttatgccttttaaaagcaatttgtaattcctgtagatttcttttaaatttaggcagtttcataaatgactatagcatcattttagcaaatttgtgatcctgtaagaggaggataagtgttttttgtttgtttgtttgttttttgtttttttgagacagagtctcactttgtaccccagaaagtaaatctagttagatgtggtttgtctcggctcactgcaacctccaccccgtgcgttctagcaattctcctgcctcagccaccacacctggcctaagaggggaggataagtgttttagtgatcatattagactgaatgtggcagatgagatttcccgcccccccattgttggttagactgacattcaacattcaacaagagccacctgcccttgtaggcatttctgccactatacccctacataaacctagagtgctattgcttacttgctttccttcaaatacattttttcatttgtggcctccacattcttgtgtgtgatgtcctttctctgtgaaatgtcttctaccctttttttcaaagcctagtttagaactgacctcttctatgaaccctctgccgactggcctttccttccccagtcccccaagttcaaaatgatctctttcctttgaatactatagtatttgcacaattcactatctccttatcatattcttcttgtttatttgttatcagctgatgttgacatcataagttcaggttcctaactagatccaatattggaatttttcagcttttgctaagaagagagcttgtatgtctttgggaataatgggcagaaaaagataactttgagaagtcttagacttctaatagctttgatatttaaaagtacatgtaatacaagaggtttttttcctacatttaatgcatggagaagataggacatttagaaatatggaattaatgttcatttgactggcaaaagattattttctcagatgtagtgaagtgtggtaaagaacttcactctagagccagaatgtctgtgtttgtatcccagagcccaccacttacatttaaccattaacattcaacttactgtctctgagtttcagtggcctcatctataaaatgaggataataagagtacctacttcatagagttgttttagtggttaaataaactaacgtaaacttgctagaacttgataaactaatattggatgagaactggttgaaataatgcctggctatagtaaaaacttggtaaatgttagttgccattacaatgcaactactgttcctaccattccctctgccagtgcctggtattcagtagcactcagtaaatgttagttaaatgaagaaataactgaaggaatgaatgaacaaatggttgatgtagagattgcttttccattgttgtttattgaatattttgagatgtataacatactgtctgttaggcactgtgggatgggcactcacggagctgtcttccaaaggggtataggagaggagacgcagtgatctcagcaacctacctttaaaacatatcctagtatctactgccatgttaggttctcttcttttgctttttttaaaaaaaaattctcacaaaactccccccacccacttcagtttatagatgaggaagctcctactacataatagtgcttcccagtctaattcttgacctcattgtatttatatgtcctttttttttttgacagagtctcactcattgcagtggcacaatcacagctcactgcaacctctgcctcccctgctcaagtgatcctcccacctcaacctcctgagtagctgggactacaggcatgcaccaccacgcctggctaatttttgtatttttttgtagagatgcggttttgccatgttggccaggctggtctcgaactcctgggctcaagccatctgcccactttggcctctgagagtgctgagattataggcatgagccaccattcccagccatgttttcctttttcattgaactttatctactttagccattaaactccactccattggtcttgtcattactaagagctgaaccacctgcaaaatattaagttaaaaagcgttttctttgacaacagttttcttttcttcatcttcctctatcactttacttctgaacttttattctctcattttgatctgacccctacttctctgtttttcctggccatttagtactttcttgttttgctcatcccatttcccagtggagaccttctggtctgctgctttatcactggttttgttagaagacatacaaatggcaaggaggtatatgaaaaggtgcctaacatcattgatcatcagagaaatgcagaccaaaactacaatgagatatcatttcaccccagttaaaatggctttttttttttttttccaaaagacaggcaataacaaagtactggtgaggatgtggagtaaagggaacccacatacactattagtaggaatgtaaattagtacagccactgtggagaacagtttgaaggttcctcaaaaaactaaaaatagagctaccatataatccagcaatcccactgctaggtatatatccaaaagaaaggcaatcaatatacggaagagatacctgcacacccaggtttattgcagcactattcacaatagccaagatttggaagcaacccaggtgtccaacagatgaatggataaagaaaacatggtatataaacacaatggaatactattcagctgtgaaaaagaatgaaatcctgtcatttgcaatcctgtcttgaatagaactggaggtcatgatgttaagtgaaataagacaggcacaaacttcacatgttctcacttatttgtgggagctaaaaattaaaacaatcgaactcatggagctagagaatagaattatggttaccagaggctggaagggtggttgggcgtataagtgtagggggagtggggatggttaatgggtacaaaaaaatgagaacgaataagatctacttgataacacaacagggtgactatagtcaacagtaattatacatttaaaaataactagaagagtataattagattgtaacacaaaagataaatgcttgaggtgatggatacctatttaccctgatgtgattattacttatttcatgcctatatcaaaatatttatactccaaaaatatatatacctactatgtacccacaaaaatttaaaaatttatatattgtttttgctatcacctttagaatttcttgtcattggatagttcgtctgtataccattctggtcttcattccccagggcccccgttgtctgatttttctgcttctagaactgttagaggtcacaaaagcaagatggttgtatctatcacaatttttgtctgactttaactgggtatctgttacgatttagtagtcatcttactgacttcttgttggtttccaattgaatcctcacagtagactgttttcattgtaatcagtatcgaattatagcctgttcccttcttcataaatgaaggctttcttcttcaacagttcttagtgacttcacctgtactttatttctctgctttgaatatttcgaagaaaacatattcttgctctttcccaaggttaacactacatacattaccttgaccacaggatgttttcttgcagattgtgacctaattccatcacccttcagcagcccccaccgttttcatggattcagctaaaccttctgtaagatgactctttttccccctaatctttatatctcttttgatatgtagctttagtctcactttttttccttttggattttgccagttagatgtctccctggaattccacttcagcatggctaagactaagcttgtcttctctttcctccccaaagcaaattgtaattaggatagactgaaggtgacagaagataactaagatcttcttcatcctttcggctcttatggaagctgaattccagtagtcattctaaatttgttgtatgtcagcttatggtatcttttcatgtctttacattcagccaaagaggaagttccttgaaggggagaccagagggcgtgctgtgcttcttaatcctctctttcttaaccagtaagaggcattcagtagatatctgatgatactgattaatagaggggaacttttcagattcttttttttttttaaccctagtaagctttagtacaaactaaatgctgagagattatcaagtaagggattgatcatcacaagaagactcaggatgttacatcctgtaggttttatagtttcctatattgtaaaaaatatgagttatagcagcttgtctggatgtcatacaggtataaaaatcagttttataaacttgagtaaattggggcccattttagaaaaaactcttgcaggctgtgaatgccaatatataagtaaagtattaagtataatgttatttaatgtgggcaaacataaagccaggtgtaaattttttaggtttaaaatcttatagaactatacatccaaaagaaaatttcaagttaaacataatacaaagcaatacaatctaaattaacattaatttaatgtgatgaatgatattgccttgctaaaagtgggtcactacttacaatgtgcaaatggtactcatcgttagggtatagattcttttaaactatgacatacgtacactaccatgtggaacgtgatgatgtgttctctgttctaactactgggaagacttccttggcatagcacatgccatggggtcagttggctttgacttcatatagatatgccatttacttggtcagtgtcacttctatgacaagtagtatgttgtgccagtttgattataagtacaaatatgggcaatgaagtaacttggttttaaggttgttactaagctgagtaacagtgtgtggctatacaaatttttataggctatcaggaatgaaaacacaggagattgttgtagattcaagtattttagattcaagtttgaagatgctcatgcagatgtttaactgagttgtatagacctttatgtttctttctttttctctttttttttttttgagacagagtcttgctctgtcacccaagctggagtgcaatggtgtgatctcggcttactgcaacctccgcctcccaggttcaagcaattctcctgcctcagcctcccaagtagctgggattacagatgtgcaccacgacgcccagctgattttttgtattttagtagaggcggggtctcaccatgttgtcaagatggtctcaatctcctgaccttgtgatccacccacctctgcctcccaaagtgctgtgattacaggcgtgagccaccgcgcctgactgacctttatgtttcttaactttatgctatacatcagttgatatttcaaaaatttaaatggtttctatgattattctttgggctaagaaattgggcattaattgtcctcatatgtatggtttttgtggctacttcatgtagattttatttttggtggttatcaaattggaatttttttttttttttttttttttgagacggagtctcattctgtttcccaggttggagtacagtggtgcaatctcagctcactgcagcctcgacctcccaggctcaagcagtcctctcacctcagccttctaagtagctgggactacaggcacgcaccaccacacctggctagttttttgtgtttttagtagagatggggttttaccctgttggccaggctggtcttgaactcctggcctcaagtgatccacctgcctcagcctcccaaagtgctgggattagaggcatgagccaccacacctggctgaaattggaatttcattggtactgcctgtaattttatgttaatttttttttttttttgtcgtcactagcttttatctaaagcccctagagagaaaggccatgataccttgtatacaaggttataagagtatacaagggaaagggagggctgaagggaacagggtgggctggtacaagcctcattagaaataccattgagtctgtgagtaaaacatcattatatgaaaaggagatgtggttttagggtggtccaattacttttgcaccagcctaataaaattacaagtcattatcaatagagacattgtaaaacctttttttttcccaaaagaagtatcaggtatgataattacatgtctgcccaactttcgttatagattaacataacttaattgtatttaaggtacaatttaggagagttgctgaaaaatgaatctttagtattgggatgccttgattctaccctcaatagctataatggattatgtgtctgagtagattaataaaaatcttttgagcatttttcttgaactacttcactgaagattagctttttgagcatccattttaatttctcagtatataaggatcggtttatcacaactgtattgttttccctggccttgttagattatattttcatatcatgtagaaaaataggtgtattcgttctcccttgaagtcctttgtctcccaaaggaaatggttgcaatacagatgtgtcacctcttccacaggtaaagtggaatggagaagtagccagttaaatagtgcatgctcaatttggaacatttagagcatacaggaaagttatttatttggtaaatattttttaagcatttactatgtttcatgcattgtactagttgtagaggatataattgaatacaactacatgtagcccttgactttatggaactagtctagtataaagatttaagattgcctggcatggtggctcacgccactaatcccagcactttgagaggccaaggcaggattgcttgaggccagaagtttaagagtagcttggtcaacataatgagactccatctctaaaataaatagatagatagatagatagatagatagatagatagatagatagaagtagttagacaacacaaagcagtttcactcatcttgtggcaaggagttatgtatttctaatcaaatttggcaactcaagcattttcaacaaaatctacatgttttttcagaataaagtgaccaacacagaatgttacctgtaaaaatcagagcaataattgctatctaaaataattttgaaaattaagtggtactgaaaggctcatatagcaaaaatatggcctcctgtcattgtactttcctacttcccagactcaccattttcaacattttttagtagtttattttgccattttatagcatagtacctgacattttatttattcaacagacatttcttaagtacctaatacatgccattccttgtttgaagggatgctaaggatacagtggtgaacaaggcgttgtggggttgtatagagggtattcattcctaaccttgaaccaaatatttctttctgttggataatgcattaaaaattgcaaacagtttacaaacttttggagcaatggtggccttgatcataaagtagggactgcttctaccgtatacatgcttggtggtgtatttgtgatatctggctaaagtttctacatggaaattgactgactttagttttgagacttctgggaaccagtcaggcaaaatagtgaaactgtgtatcctgtttccaagagttgtcttttaaggttatctgcttcattcatttggcctgacttgctaggcaaatgcctagggtaaatatgatttgattaactataacaacaacagcaacaacaacaactttattttttagagcagtttgaggttcacagcaaaattgagcagaatgtacagagattttccctatacccgcttcccctacgcatgtgcggcctcccctactatcaacatcccccaccagagtggtttgttacaattaatgaacctacattgacacatcattatcactcaaggtccgtagtttacattagagtccactcttggtgttgtgtatgggtttggtcgattttataatgacatttatccaccattatagtgtcatacatagtaattttgctaccctaaaaatccagtgtgctccacctgttcctccttccctcctccctcatccctggcaaccactgaactttttaacatctccatagttttgccttttccagaatgtcatatcattggaatcacacagtatgcagccttttcaaatgggcttctttccgttagtaataggcatttaagtttcatcctcatcttttcatggcttgatagctcatttctttccctccctcttttcttccctgtcttccttccttcctcttctttcctgtttcctctttcttcttccttttttaagagacaaggtgtctcactctgttgcccaggctggagtgcagtggcccaatcatagctcattgcagccttgaattcctgggctcaagtgatcctcctgcgttagcctcctgagtagctgggatcacaggctccagtcattttagtgctgaataatatttcattatctggatgtaccgcctattcattcacctactgaagaatatcttggttgcttctaagttttggcaattatgagtgaagttactataaacattgtatacaagttttatgtggatgtatgttgtcatctcccttgggcagataccaaggagtgccattgttggatcatatggtaaatatatctttagttttgtacagaattctaggttggtatttttttctctctcagtcctttattttatttggagacagtctcgctatgtcgcccaggctgccatacagtggtgccatctgggctcactgaaacctccacctcccaggttcaagcgattcttgtgccttggcctcccaagtagctgggattacaggagtgcgccaccacgcctgctaatttttgtatttttagtagagacagggttttgccatgttgcccaggctggtctcaaactcctgaccttaagtgattcacccacctcaatctcccaaaatcctgggattacaggcctgagctactgtgcctgatctctctcagtactttaaagaaatatttcattccacttttcttttttttcttctttttgagatggagtctcactctgtcgcctgggctggagtgcagtggcgcgatctcagctcactgccacctccgcctcctgggttcaagtgattctcctgcctcagcctcctgaatagctgagattacaggcgcccaccaccatgcccagctaattttttgcatttttagtagagacgggggttccaccatgttggccaggctggtctcgaactcctgacctcgtgattcgcacatctcggcctcccaaattgctgggattacaggtgtgagctaccacgcctggcccactcttcttgcttacatagtttctgaggagatgtcagatgtaatttttatttttgctcttctgtaggcaagttgagttttttccccctctagcttctctcaggatttttttctttatctttgattttcagtagtttgaaaattatatgcctagctgtcagggttttttgcttgtttgtttttgttttctcaggtgtgactccagaaaggttctaaagaggagctttacaatctcttctctggggtttatggagacttcctttacccttctgtgttagccccttaaagcactgcgtcaaccttaaaagggcacaggaaagggtgtctatgccatttttatgccatttatcctgcttggtgttttctgagctttcttcatctgcggtttaatgtctcacattaatttgtagaaattctctgtcattgtttcaaatttttcttcagttcttttctctgtttcttcttctggtgttcccattatgcttttgtggttgtcgtacagttattggatattttgttccaggcttttttttttccagtctttttttccttttgcttctcggttttgtaggtgtctgttgagatactctcaagtgcagatattctttcctcagctttgtctagtttactaataagcccattaaaggcagtcttcatttctgttacagtctttttgatcagtagcatttcttttttattctttcttaaaatttctgtctttctgcttacattgcccatctgttcttgcatggtttctactttgtccattagagttcttaggatatttatcataattatttcaaatttctggtgtaacaattccaacatccctgcaacatccaagtctagtttcgatgcttactgtgtctcttccagctgtgttttttcctatttaatatgtcttataattttttcttgatagccatacatgatgcattaggtaacagaaactgctgtgagtggacctttagtaatgtggtggtaaggtgtgcatggaggggaaacattttcagtctgttagtgaacttttgtcaacttcacatgtgcttctcaagtccatcctgtaagtgggagagtagggctagagaggactgaagttgggtatatattaaatactttctcctacaaagaagcctagaggggacgcattaggggattttttttcccccagtattcactgtgatgacccttattgagctcctggaggtaaaactcacaaaactgtggttctcccccctgcccatattactacatgtccctggagtttatatctttcagacttgtctgcactgagcttccaccaatttgtcaaatacagatcaggtttccctaccacccgtgcagttgaaaacccacatacaacttttgactcctccagagcttaactactcatagcctgctattgactggaagccttgccaataacataaacagttgattaatacatattttatatgttttctgtattatatattgtattcttacaataaagagaaaagaagatgttattaagaaaatcataaggaagataaaatatatttactgttcattaagtggttcccatgggtgctggttcccatggaggttgccccttgtgagtttttgctcagggaagttgtgattctctatatttgcctgttggtctcctaatttgggagtcatcagttttccctgtgacctcacttctcttacagagttaagaacagttgttggtttttcagtttgttcagtgttttacatgttgttagaacacagtggtacttctaagtttcttaacatgctagatcagaaacctgaagtctcacctaatttggctttttatattttttcttcttttttttcttccattgctaccaaagcatttttcatctgtgtctggggtgacattagagcagaatgtgatttctaggtaaacattattgggctccctagcagaaaaatttttgaaagtagtacatgaattctgtataattaaaattttcttttcatcttaataggtataggtaataggcacggcctattttttttttgctcaacagtctaaaatagtaatttaatcacctaatagccttagttatatagttgaaagaagagttggaaatctgattcatgggttggaaatcacctgtcacatatgagttttaggcactggtcactttattttgaaacagctttggggttttttcctttttcaactcataataggctttaacagcttttagttttgtttctgtttttttaacagcatgagttgccaaatttggttatagcttcttggtacaagatgggtaaatttgctttgtgttgtgtaattactttttattttaaatgctacctcttttatgaacactaactttacactaagattaggaaaatgagaattgcatgtctgcaacaaatagctatctgtagtattaaattgtgaaaatgtagactttggattggagctggcatctcttaatatgtaattgtaacatagagtaaataagtattttgtcccttgtagggtcaaacagtacagtgcatgggcagaattagagatgtaggcttttttttttttttttttttttactggcttagagaaccgtttgatcagctaatatggaattaagtccctagggctgcccaggcacaacattaactgctattaaaggaaaatttaaaagagtattagtgaaggttaaatactgaccatggacatctggcaaaattgatgttttttttcccctccaccattgtttatagtttattgttatttatcagagaattaatgtttattttcagaatctattaccataagaaatctgtttgaggacttcgtatgtgccaggaattctactaaataatgatataatgctgaacagaattagataggatcctcacttcgttaagcttacagtctagtggtatagatcaacattaatcaaagaataacacaaatagaaagcagagcagtggttcatgggattgactgtagagaagcatgagggaagttcccaggtgatggaaaatactttatttcttaatcgtggtggttacatgtgtgcatatgtttatgaaaatatattgtacatttaaagtggatacattttatcacatgtaaattatgactctataaagttaattaaaaagaataactcaggtaaggtggtgtgtgcgcctgtagtcccagctatttctgaggcaggaagatcacttgagcccaggagtttgagttcagcatgggcaacatgagacctgtgagactttgtctctaaaaaaatttaaataaataactaagataaatgtaaaattacagctgtagtaagttctacaaaggagagttacatgggctatgacgatgtaagatagcaagaactgacattggcagggaggaaatgatgatgagtagaagtaaataagtgaagtgtggggattgatgtcaaggggacagtataaaagaaataacagcatgcgccaaggccctaaaattggaaagtccttggcaaattaaaggagtttgaaaaaggccattgtgtgcaaagcagaaaataggtactacaaggtaaaagatggagctaagcggtaggtaaggctaaaccttgtcagccattgttaaatattgaattgtatcctaagcacaactcagtggaaagcagttaaagttctttaattgggggaggcaatgaaggggtaataaaattggttatagaaatactgctctggctctagtgttgagaatgaattggagtagccagagtagattcaagaagactttagtaagattattccaacaggccaggacctgttatagggtggtggcaatggagagagatggacagaatggagagtgtatttaggaggtaaaaatgacagaacttggtgatgcactgaatgtgaaatggggaaggtgtctaggaggactactaggtttatggtttgcgtattagggtggatgatagcagtttcatttactgagacagggagccctggcagagtacccagcttttagagtgggtagggggaaggggagagtgcatctggtgttgggcattttgaagtgatttacatacaacaaactgaaggtatctttaacactgagtccagcaggttagcatatttattcagcaagcattgcacctttttttgttgtttttggggtcttcaactcctggcctcgaatcctccctccttcccccgcctctcccagcctccgcctcccaaagtgctgggatttcaggagtgagccaccgcgcctggccagcatcgcgctgtttgtgcagtgtgccctgtgctaggtcttgcagtgggtaccagtagagacataaaagtacaaaagataattggacgtttagtagagtcctgaaagggggcgggataggaagatacctaaccataagaaaaaccagcaagagcggaaaaggagctagtcctccagatcaataagttaatcacttatgtttgtgattccctgcattttgggtgattctctgtcgaggtcctcttaagtccagacttttgatataatctgcagtttgcgccatttggattcctgaagcatctttacaagccacctacattccttatggagctgtggcacaacagcaagcccacgatgtctcaccggattaataaaaatataggcgctcacgcttttgtttaccgatatagtatctcctcctcccctcactccatcaacccccacgcgacacaactttccggaagtaagcaaaatccgttatcaaggtgaaactccggggaccaggctccacagctgccataaactggatggcacgttagaagccggtgggtgtaggtgaggcacgctggcgcccgcgggcccttctccagccgctacccagtgggaatccgcggggctgaagccccgaaaccaggctgagcgtcccagagcgcaacctccctttcccccagcagcgccggcgccgcagaagccgcgtgtccccaggcgcactcccccaaggtgaacccccgccccccacggaggcggctgggtcgcgggtctgggcggggcgctccggacgccctcccgccgctgcgcacccctcccgcgagctgccagctccctcggcctctccacccaaaactggcccaaccgccaatcgtctgcctctcacctcctacagcaggtgacccatggccaatcgccaggggtctctttgccaggagccgccagggccagccaatcggggcgacccctccgccggggaggggacgggaaaggggtggggggtgaagggggtgaagggggtgtcccgggggacgggctgaacctcagtcaggaccgcctgcaccgcagtccggggatcgggtcgaggggagaagaaaaaggggtgctcgggagcagcccccggctacctcccctggaggcacagagggcgggggccttggcgaatggctttcttgctggccacttgcggagtgagtagaccccgagggtctgggagaggggccggcccctacccctgagtccccggggtcccggccgccaggccggagcgcgaatgtcgtgctcaccctgcctccttcccgccgccccctgggggtttggattcaggatttgttcctagtgtccaagattttgataagaaacttacagaagctgatgcttacctacaaatcttgattgaacaattaaagctttttgatgacaagcttcaaaactgcaaagaagatgaacagagaaagaaaattgaaactctcaaagagacaacaaatagcatggtagaatcaattaaacactgcattgtgttgctgcagattgccaaagaccagagtaatgcggagaagcacgcagatggaatgataagtactattaatcccgtagatgcaatatatcaacctagtcctttggaacctgtgatcagcacaatgccttcccagactgtgttacctccagaacctgttcagttgtgtaagtcagagcagcgtccatcttccctaccagttggacctgtgttggctaccttgggacatcatcagactcctacaccaaatagtacaggcagtggccattcaccaccgagtagcagtctcacttctccaagccacgtgaacttgtctccaaatacagtcccagagttctcttactccagcagtgaagatgaattttatgatgctgatgaattccatcaaagtggctcatccccaaagcgcttaatagattcttctggatctgcctcagtcctgacacacagcagctcgggaaatagtctaaaacgcccagataccacagaatcacttaattcttccttgtccaatggaacaagtgatgctgacctgtttgattcacatgatgacagagatgatgatgcggaggcagggtctgtggaggagcacaagagcgttatcatgcatctcttgtcgcaggttagacttggaatggatcttactaaggtagttcttccaacgtttattcttgaaagaagatctcttttagaaatgtatgcagacttttttgcacatccggacctgtttgtgagcattagtgaccagaaggatcccaaggatcgaatggttcaggttgtgaaatggtacctctcagcctttcatgcgggaaggaaaggatcagttgccaaaaagccatacaatcccattttgggcgagatttttcagtgtcattggacattaccaaatgatactgaagagaacacagaactagtttcagaaggaccagttccctgggtttccaaaaacagtgtaacatttggtccagatatgagcattgaattgtatcttcttgttaaaacactcagcataaaaggctgaaatgggtggatgatgggaaacctgctcagccacaaatgttagtcgagc

SEQ ID NO: 735109 - DNA, 16853 bp, Homo sapiens
gtaagggtctttacatggtttccagatagttcattagttgttgctttctttttttgtctgttttctgttttttttttttaaataactgtggtatgatgtaataggaacttataatttctgagttgcttatttttcctttacagttatagtaaagttatactcatttattttctcctgctttctgcagagtaaaatactgatttttgtctagaaacaagacagtgcaagacaatgttgaaagtgaaattctatgttaaaatatgccagatttattttaagaatttaatatctgtagtcagttatcaatacaaccaaattacataattatgcatgataataggtaaatactgagaagttcacctcattttcttgttaaaggatttggctattaccgtatgtgtcagttagtactcttttgtatggtagtgaaagaaaactcaacccaaactgattcatgaagaagaaagtaaatctggttagatgtggtttgaattaggtaattcatgtcatgaggactcagatctcccatctctatttctacgttccacttttgcattggcttcattttcggttaggttctcccttggtggtggtaaggtggttgtagcaatgtcagcctcccatttttggaaccgagtccataggaggctattctttctagaccttaataggagtaacacaattattgctcatcaccctagctttggccatgtgtcaaatcctgaccagtcacaatttcacagtcatagattctaccctggagctgggatgttactggcctcactagaaacacattgctgatagggtagaaggtgtgttcatcctacccaacccgacccgcaccaaagtcagaatagggaaaaacagatgttgggtgacatgcaactaacgtctgccgtactacactgaagatatttttctatgtttattctccagtgaaagagcttatatttgtggtacataggggattttgttttaatttagaaaatttaattgtagaaaacatgttttataaccctttctctgtactttgttctatatcaggaattgacttgattagataaggtgacatagggtatcttaggccctacaagatagtaaaccccccatcacttgaaagtattcagtagaggcttaaaaaacattattaaaggatgtggttattaggggactttaagaaatgaatatgaaattgaagtaggaaatctttaagctactctgtgagttatgccttttaaaagcaatttgtaattcctgtagatttcttttaaatttaggcagtttcataaatgactatagcatcattttagcaaatttgtgatcctgtaagaggaggataagtgttttttgtttgtttgtttgttttttgtttttttgagacagagtctcactttgtaccccagaaagtaaatctagttagatgtggtttgtctcggctcactgcaacctccaccccgtgcgttctagcaattctcctgcctcagccaccacacctggcctaagaggggaggataagtgttttagtgatcatattagactgaatgtggcagatgagatttcccgcccccccattgttggttagactgacattcaacattcaacaagagccacctgcccttgtaggcatttctgccactatacccctacataaacctagagtgctattgcttacttgctttccttcaaatacattttttcatttgtggcctccacattcttgtgtgtgatgtcctttctctgtgaaatgtcttctaccctttttttcaaagcctagtttagaactgacctcttctatgaaccctctgccgactggcctttccttccccagtcccccaagttcaaaatgatctctttcctttgaatactatagtatttgcacaattcactatctccttatcatattcttcttgtttatttgttatcagctgatgttgacatcataagttcaggttcctaactagatccaatattggaatttttcagcttttgctaagaagagagcttgtatgtctttgggaataatgggcagaaaaagataactttgagaagtcttagacttctaatagctttgatatttaaaagtacatgtaatacaagaggtttttttcctacatttaatgcatggagaagataggacatttagaaatatggaattaatgttcatttgactggcaaaagattattttctcagatgtagtgaagtgtggtaaagaacttcactctagagccagaatgtctgtgtttgtatcccagagcccaccacttacatttaaccattaacattcaacttactgtctctgagtttcagtggcctcatctataaaatgaggataataagagtacctacttcatagagttgttttagtggttaaataaactaacgtaaacttgctagaacttgataaactaatattggatgagaactggttgaaataatgcctggctatagtaaaaacttggtaaatgttagttgccattacaatgcaactactgttcctaccattccctctgccagtgcctggtattcagtagcactcagtaaatgttagttaaatgaagaaataactgaaggaatgaatgaacaaatggttgatgtagagattgcttttccattgttgtttattgaatattttgagatgtataacatactgtctgttaggcactgtgggatgggcactcacggagctgtcttccaaaggggtataggagaggagacgcagtgatctcagcaacctacctttaaaacatatcctagtatctactgccatgttaggttctcttcttttgctttttttaaaaaaaaattctcacaaaactccccccacccacttcagtttatagatgaggaagctcctactacataatagtgcttcccagtctaattcttgacctcattgtatttatatgtcctttttttttttgacagagtctcactcattgcagtggcacaatcacagctcactgcaacctctgcctcccctgctcaagtgatcctcccacctcaacctcctgagtagctgggactacaggcatgcaccaccacgcctggctaatttttgtatttttttgtagagatgcggttttgccatgttggccaggctggtctcgaactcctgggctcaagccatctgcccactttggcctctgagagtgctgagattataggcatgagccaccattcccagccatgttttcctttttcattgaactttatctactttagccattaaactccactccattggtcttgtcattactaagagctgaaccacctgcaaaatattaagttaaaaagcgttttctttgacaacagttttcttttcttcatcttcctctatcactttacttctgaacttttattctctcattttgatctgacccctacttctctgtttttcctggccatttagtactttcttgttttgctcatcccatttcccagtggagaccttctggtctgctgctttatcactggttttgttagaagacatacaaatggcaaggaggtatatgaaaaggtgcctaacatcattgatcatcagagaaatgcagaccaaaactacaatgagatatcatttcaccccagttaaaatggctttttttttttttttccaaaagacaggcaataacaaagtactggtgaggatgtggagtaaagggaacccacatacactattagtaggaatgtaaattagtacagccactgtggagaacagtttgaaggttcctcaaaaaactaaaaatagagctaccatataatccagcaatcccactgctaggtatatatccaaaagaaaggcaatcaatatacggaagagatacctgcacacccaggtttattgcagcactattcacaatagccaagatttggaagcaacccaggtgtccaacagatgaatggataaagaaaacatggtatataaacacaatggaatactattcagctgtgaaaaagaatgaaatcctgtcatttgcaatcctgtcttgaatagaactggaggtcatgatgttaagtgaaataagacaggcacaaacttcacatgttctcacttatttgtgggagctaaaaattaaaacaatcgaactcatggagctagagaatagaattatggttaccagaggctggaagggtggttgggcgtataagtgtagggggagtggggatggttaatgggtacaaaaaaatgagaacgaataagatctacttgataacacaacagggtgactatagtcaacagtaattatacatttaaaaataactagaagagtataattagattgtaacacaaaagataaatgcttgaggtgatggatacctatttaccctgatgtgattattacttatttcatgcctatatcaaaatatttatactccaaaaatatatatacctactatgtacccacaaaaatttaaaaatttatatattgtttttgctatcacctttagaatttcttgtcattggatagttcgtctgtataccattctggtcttcattccccagggcccccgttgtctgatttttctgcttctagaactgttagaggtcacaaaagcaagatggttgtatctatcacaatttttgtctgactttaactgggtatctgttacgatttagtagtcatcttactgacttcttgttggtttccaattgaatcctcacagtagactgttttcattgtaatcagtatcgaattatagcctgttcccttcttcataaatgaaggctttcttcttcaacagttcttagtgacttcacctgtactttatttctctgctttgaatatttcgaagaaaacatattcttgctctttcccaaggttaacactacatacattaccttgaccacaggatgttttcttgcagattgtgacctaattccatcacccttcagcagcccccaccgttttcatggattcagctaaaccttctgtaagatgactctttttccccctaatctttatatctcttttgatatgtagctttagtctcactttttttccttttggattttgccagttagatgtctccctggaattccacttcagcatggctaagactaagcttgtcttctctttcctccccaaagcaaattgtaattaggatagactgaaggtgacagaagataactaagatcttcttcatcctttcggctcttatggaagctgaattccagtagtcattctaaatttgttgtatgtcagcttatggtatcttttcatgtctttacattcagccaaagaggaagttccttgaaggggagaccagagggcgtgctgtgcttcttaatcctctctttcttaaccagtaagaggcattcagtagatatctgatgatactgattaatagaggggaacttttcagattcttttttttttttaaccctagtaagctttagtacaaactaaatgctgagagattatcaagtaagggattgatcatcacaagaagactcaggatgttacatcctgtaggttttatagtttcctatattgtaaaaaatatgagttatagcagcttgtctggatgtcatacaggtataaaaatcagttttataaacttgagtaaattggggcccattttagaaaaaactcttgcaggctgtgaatgccaatatataagtaaagtattaagtataatgttatttaatgtgggcaaacataaagccaggtgtaaattttttaggtttaaaatcttatagaactatacatccaaaagaaaatttcaagttaaacataatacaaagcaatacaatctaaattaacattaatttaatgtgatgaatgatattgccttgctaaaagtgggtcactacttacaatgtgcaaatggtactcatcgttagggtatagattcttttaaactatgacatacgtacactaccatgtggaacgtgatgatgtgttctctgttctaactactgggaagacttccttggcatagcacatgccatggggtcagttggctttgacttcatatagatatgccatttacttggtcagtgtcacttctatgacaagtagtatgttgtgccagtttgattataagtacaaatatgggcaatgaagtaacttggttttaaggttgttactaagctgagtaacagtgtgtggctatacaaatttttataggctatcaggaatgaaaacacaggagattgttgtagattcaagtattttagattcaagtttgaagatgctcatgcagatgtttaactgagttgtatagacctttatgtttctttctttttctctttttttttttttgagacagagtcttgctctgtcacccaagctggagtgcaatggtgtgatctcggcttactgcaacctccgcctcccaggttcaagcaattctcctgcctcagcctcccaagtagctgggattacagatgtgcaccacgacgcccagctgattttttgtattttagtagaggcggggtctcaccatgttgtcaagatggtctcaatctcctgaccttgtgatccacccacctctgcctcccaaagtgctgtgattacaggcgtgagccaccgcgcctgactgacctttatgtttcttaactttatgctatacatcagttgatatttcaaaaatttaaatggtttctatgattattctttgggctaagaaattgggcattaattgtcctcatatgtatggtttttgtggctacttcatgtagattttatttttggtggttatcaaattggaatttttttttttttttttttttttgagacggagtctcattctgtttcccaggttggagtacagtggtgcaatctcagctcactgcagcctcgacctcccaggctcaagcagtcctctcacctcagccttctaagtagctgggactacaggcacgcaccaccacacctggctagttttttgtgtttttagtagagatggggttttaccctgttggccaggctggtcttgaactcctggcctcaagtgatccacctgcctcagcctcccaaagtgctgggattagaggcatgagccaccacacctggctgaaattggaatttcattggtactgcctgtaattttatgttaatttttttttttttttgtcgtcactagcttttatctaaagcccctagagagaaaggccatgataccttgtatacaaggttataagagtatacaagggaaagggagggctgaagggaacagggtgggctggtacaagcctcattagaaataccattgagtctgtgagtaaaacatcattatatgaaaaggagatgtggttttagggtggtccaattacttttgcaccagcctaataaaattacaagtcattatcaatagagacattgtaaaacctttttttttcccaaaagaagtatcaggtatgataattacatgtctgcccaactttcgttatagattaacataacttaattgtatttaaggtacaatttaggagagttgctgaaaaatgaatctttagtattgggatgccttgattctaccctcaatagctataatggattatgtgtctgagtagattaataaaaatcttttgagcatttttcttgaactacttcactgaagattagctttttgagcatccattttaatttctcagtatataaggatcggtttatcacaactgtattgttttccctggccttgttagattatattttcatatcatgtagaaaaataggtgtattcgttctcccttgaagtcctttgtctcccaaaggaaatggttgcaatacagatgtgtcacctcttccacaggtaaagtggaatggagaagtagccagttaaatagtgcatgctcaatttggaacatttagagcatacaggaaagttatttatttggtaaatattttttaagcatttactatgtttcatgcattgtactagttgtagaggatataattgaatacaactacatgtagcccttgactttatggaactagtctagtataaagatttaagattgcctggcatggtggctcacgccactaatcccagcactttgagaggccaaggcaggattgcttgaggccagaagtttaagagtagcttggtcaacataatgagactccatctctaaaataaatagatagatagatagatagatagatagatagatagatagatagaagtagttagacaacacaaagcagtttcactcatcttgtggcaaggagttatgtatttctaatcaaatttggcaactcaagcattttcaacaaaatctacatgttttttcagaataaagtgaccaacacagaatgttacctgtaaaaatcagagcaataattgctatctaaaataattttgaaaattaagtggtactgaaaggctcatatagcaaaaatatggcctcctgtcattgtactttcctacttcccagactcaccattttcaacattttttagtagtttattttgccattttatagcatagtacctgacattttatttattcaacagacatttcttaagtacctaatacatgccattccttgtttgaagggatgctaaggatacagtggtgaacaaggcgttgtggggttgtatagagggtattcattcctaaccttgaaccaaatatttctttctgttggataatgcattaaaaattgcaaacagtttacaaacttttggagcaatggtggccttgatcataaagtagggactgcttctaccgtatacatgcttggtggtgtatttgtgatatctggctaaagtttctacatggaaattgactgactttagttttgagacttctgggaaccagtcaggcaaaatagtgaaactgtgtatcctgtttccaagagttgtcttttaaggttatctgcttcattcatttggcctgacttgctaggcaaatgcctagggtaaatatgatttgattaactataacaacaacagcaacaacaacaactttattttttagagcagtttgaggttcacagcaaaattgagcagaatgtacagagattttccctatacccgcttcccctacgcatgtgcggcctcccctactatcaacatcccccaccagagtggtttgttacaattaatgaacctacattgacacatcattatcactcaaggtccgtagtttacattagagtccactcttggtgttgtgtatgggtttggtcgattttataatgacatttatccaccattatagtgtcatacatagtaattttgctaccctaaaaatccagtgtgctccacctgttcctccttccctcctccctcatccctggcaaccactgaactttttaacatctccatagttttgccttttccagaatgtcatatcattggaatcacacagtatgcagccttttcaaatgggcttctttccgttagtaataggcatttaagtttcatcctcatcttttcatggcttgatagctcatttctttccctccctcttttcttccctgtcttccttccttcctcttctttcctgtttcctctttcttcttccttttttaagagacaaggtgtctcactctgttgcccaggctggagtgcagtggcccaatcatagctcattgcagccttgaattcctgggctcaagtgatcctcctgcgttagcctcctgagtagctgggatcacaggctccagtcattttagtgctgaataatatttcattatctggatgtaccgcctattcattcacctactgaagaatatcttggttgcttctaagttttggcaattatgagtgaagttactataaacattgtatacaagttttatgtggatgtatgttgtcatctcccttgggcagataccaaggagtgccattgttggatcatatggtaaatatatctttagttttgtacagaattctaggttggtatttttttctctctcagtcctttattttatttggagacagtctcgctatgtcgcccaggctgccatacagtggtgccatctgggctcactgaaacctccacctcccaggttcaagcgattcttgtgccttggcctcccaagtagctgggattacaggagtgcgccaccacgcctgctaatttttgtatttttagtagagacagggttttgccatgttgcccaggctggtctcaaactcctgaccttaagtgattcacccacctcaatctcccaaaatcctgggattacaggcctgagctactgtgcctgatctctctcagtactttaaagaaatatttcattccacttttcttttttttcttctttttgagatggagtctcactctgtcgcctgggctggagtgcagtggcgcgatctcagctcactgccacctccgcctcctgggttcaagtgattctcctgcctcagcctcctgaatagctgagattacaggcgcccaccaccatgcccagctaattttttgcatttttagtagagacgggggttccaccatgttggccaggctggtctcgaactcctgacctcgtgattcgcacatctcggcctcccaaattgctgggattacaggtgtgagctaccacgcctggcccactcttcttgcttacatagtttctgaggagatgtcagatgtaatttttatttttgctcttctgtaggcaagttgagttttttccccctctagcttctctcaggatttttttctttatctttgattttcagtagtttgaaaattatatgcctagctgtcagggttttttgcttgtttgtttttgttttctcaggtgtgactccagaaaggttctaaagaggagctttacaatctcttctctggggtttatggagacttcctttacccttctgtgttagccccttaaagcactgcgtcaaccttaaaagggcacaggaaagggtgtctatgccatttttatgccatttatcctgcttggtgttttctgagctttcttcatctgcggtttaatgtctcacattaatttgtagaaattctctgtcattgtttcaaatttttcttcagttcttttctctgtttcttcttctggtgttcccattatgcttttgtggttgtcgtacagttattggatattttgttccaggcttttttttttccagtctttttttccttttgcttctcggttttgtaggtgtctgttgagatactctcaagtgcagatattctttcctcagctttgtctagtttactaataagcccattaaaggcagtcttcatttctgttacagtctttttgatcagtagcatttcttttttattctttcttaaaatttctgtctttctgcttacattgcccatctgttcttgcatggtttctactttgtccattagagttcttaggatatttatcataattatttcaaatttctggtgtaacaattccaacatccctgcaacatccaagtctagtttcgatgcttactgtgtctcttccagctgtgttttttcctatttaatatgtcttataattttttcttgatagccatacatgatgcattaggtaacagaaactgctgtgagtggacctttagtaatgtggtggtaaggtgtgcatggaggggaaacattttcagtctgttagtgaacttttgtcaacttcacatgtgcttctcaagtccatcctgtaagtgggagagtagggctagagaggactgaagttgggtatatattaaatactttctcctacaaagaagcctagaggggacgcattaggggattttttttcccccagtattcactgtgatgacccttattgagctcctggaggtaaaactcacaaaactgtggttctcccccctgcccatattactacatgtccctggagtttatatctttcagacttgtctgcactgagcttccaccaatttgtcaaatacagatcaggtttccctaccacccgtgcagttgaaaacccacatacaacttttgactcctccagagcttaactactcatagcctgctattgactggaagccttgccaataacataaacagttgattaatacatattttatatgttttctgtattatatattgtattcttacaataaagagaaaagaagatgttattaagaaaatcataaggaagataaaatatatttactgttcattaagtggttcccatgggtgctggttcccatggaggttgccccttgtgagtttttgctcagggaagttgtgattctctatatttgcctgttggtctcctaatttgggagtcatcagttttccctgtgacctcacttctcttacagagttaagaacagttgttggtttttcagtttgttcagtgttttacatgttgttagaacacagtggtacttctaagtttcttaacatgctagatcagaaacctgaagtctcacctaatttggctttttatattttttcttcttttttttcttccattgctaccaaagcatttttcatctgtgtctggggtgacattagagcagaatgtgatttctaggtaaacattattgggctccctagcagaaaaatttttgaaagtagtacatgaattctgtataattaaaattttcttttcatcttaataggtataggtaataggcacggcctattttttttttgctcaacagtctaaaatagtaatttaatcacctaatagccttagttatatagttgaaagaagagttggaaatctgattcatgggttggaaatcacctgtcacatatgagttttaggcactggtcactttattttgaaacagctttggggttttttcctttttcaactcataataggctttaacagcttttagttttgtttctgtttttttaacagcatgagttgccaaatttggttatagcttcttggtacaagatgggtaaatttgctttgtgttgtgtaattactttttattttaaatgctacctcttttatgaacactaactttacactaagattaggaaaatgagaattgcatgtctgcaacaaatagctatctgtagtattaaattgtgaaaatgtagactttggattggagctggcatctcttaatatgtaattgtaacatagagtaaataagtattttgtcccttgtagggtcaaacagtacagtgcatgggcagaattagagatgtaggcttttttttttttttttttttttactggcttagagaaccgtttgatcagctaatatggaattaagtccctagggctgcccaggcacaacattaactgctattaaaggaaaatttaaaagagtattagtgaaggttaaatactgaccatggacatctggcaaaattgatgttttttttcccctccaccattgtttatagtttattgttatttatcagagaattaatgtttattttcagaatctattaccataagaaatctgtttgaggacttcgtatgtgccaggaattctactaaataatgatataatgctgaacagaattagataggatcctcacttcgttaagcttacagtctagtggtatagatcaacattaatcaaagaataacacaaatagaaagcagagcagtggttcatgggattgactgtagagaagcatgagggaagttcccaggtgatggaaaatactttatttcttaatcgtggtggttacatgtgtgcatatgtttatgaaaatatattgtacatttaaagtggatacattttatcacatgtaaattatgactctataaagttaattaaaaagaataactcaggtaaggtggtgtgtgcgcctgtagtcccagctatttctgaggcaggaagatcacttgagcccaggagtttgagttcagcatgggcaacatgagacctgtgagactttgtctctaaaaaaatttaaataaataactaagataaatgtaaaattacagctgtagtaagttctacaaaggagagttacatgggctatgacgatgtaagatagcaagaactgacattggcagggaggaaatgatgatgagtagaagtaaataagtgaagtgtggggattgatgtcaaggggacagtataaaagaaataacagcatgcgccaaggccctaaaattggaaagtccttggcaaattaaaggagtttgaaaaaggccattgtgtgcaaagcagaaaataggtactacaaggtaaaagatggagctaagcggtaggtaaggctaaaccttgtcagccattgttaaatattgaattgtatcctaagcacaactcagtggaaagcagttaaagttctttaattgggggaggcaatgaaggggtaataaaattggttatagaaatactgctctggctctagtgttgagaatgaattggagtagccagagtagattcaagaagactttagtaagattattccaacaggccaggacctgttatagggtggtggcaatggagagagatggacagaatggagagtgtatttaggaggtaaaaatgacagaacttggtgatgcactgaatgtgaaatggggaaggtgtctaggaggactactaggtttatggtttgcgtattagggtggatgatagcagtttcatttactgagacagggagccctggcagagtacccagcttttagagtgggtagggggaaggggagagtgcatctggtgttgggcattttgaagtgatttacatacaacaaactgaaggtatctttaacactgagtccagcaggttagcatatttattcagcaagcattgcacctttttttgttgtttttggggtcttcaactcctggcctcgaatcctccctccttcccccgcctctcccagcctccgcctcccaaagtgctgggatttcaggagtgagccaccgcgcctggccagcatcgcgctgtttgtgcagtgtgccctgtgctaggtcttgcagtgggtaccagtagagacataaaagtacaaaagataattggacgtttagtagagtcctgaaagggggcgggataggaagatacctaaccataagaaaaaccagcaagagcggaaaaggagctagtcctccagatcaataagttaatcacttatgtttgtgattccctgcattttgggtgattctctgtcgaggtcctcttaagtccagacttttgatataatctgcagtttgcgccatttggattcctgaagcatctttacaagccacctacattccttatggagctgtggcacaacagcaagcccacgatgtctcaccggattaataaaaatataggcgctcacgcttttgtttaccgatatagtatctcctcctcccctcactccatcaacccccacgcgacacaactttccggaagtaagcaaaatccgttatcaaggtgaaactccggggaccaggctccacagctgccataaactggatggcacgttagaagccggtgggtgtaggtgaggcacgctggcgcccgcgggcccttctccagccgctacccagtgggaatccgcggggctgaagccccgaaaccaggctgagcgtcccagagcgcaacctccctttcccccagcagcgccggcgccgcagaagccgcgtgtccccaggcgcactcccccaaggtgaacccccgccccccacggaggcggctgggtcgcgggtctgggcggggcgctccggacgccctcccgccgctgcgcacccctcccgcgagctgccagctccctcggcctctccacccaaaactggcccaaccgccaatcgtctgcctctcacctcctacagcaggtgacccatggccaatcgccaggggtctctttgccaggagccgccagggccagccaatcggggcgacccctccgccggggaggggacgggaaaggggtggggggtgaagggggtgaagggggtgtcccgggggacgggctgaacctcagtcaggaccgcctgcaccgcagtccggggatcgggtcgaggggagaagaaaaaggggtgctcgggagcagcccccggctacctcccctggaggcacagagggcgggggccttggcgaatggctttcttgctggccacttgcggagtgagtagaccccgagggtctgggagaggggccggcccctacccctgagtccccggggtcccggccgccaggccggagcgcgaatgtcgtgctcaccctgcctccttcccgccgccccctgggggtttggattcaggatttgttcctagtgtccaagattttgataagaaacttacagaagctgatgcttacctacaaatcttgattgaacaattaaagctttttgatgacaagcttcaaaactgcaaagaagatgaacagagaaagaaaattgaaactctcaaagagacaacaaatagcatggtagaatcaattaaacactgcattgtgttgctgcagattgccaaagaccagagtaatgcggagaagcacgcagatggaatgataagtactattaatcccgtagatgcaatatatcaacctagtcctttggaacctgtgatcagcacaatgccttcccagactgtgttacctccagaacctgttcagttgtgtaagtcagagcagcgtccatcttccctaccagttggacctgtgttggctaccttgggacatcatcagactcctacaccaaatagtacaggcagtggccattcaccaccgagtagcagtctcacttctccaagccacgtgaacttgtctccaaatacagtcccagagttctcttactccagcagtgaagatgaattttatgatgctgatgaattccatcaaagtggctcatccccaaagcgcttaatagattcttctggatctgcctcagtcctgacacacagcagctcgggaaatagtctaaaacgcccagataccacagaatcacttaattcttccttgtccaatggaacaagtgatgctgacctgtttgattcacatgatgacagagatgatgatgcggaggcagggtctgcttcagtttcgtcgacgcggccgc

SEQ ID NO: 735110 - DNA, 18856 bp, Homo sapiens
gtaagggtctttacatggtttccagatagttcattagttgttgctttctttttttgtctgttttctgttttttttttttaaataactgtggtatgatgtaataggaacttataatttctgagttgcttatttttcctttacagttatagtaaagttatactcatttattttctcctgctttctgcagagtaaaatactgatttttgtctagaaacaagacagtgcaagacaatgttgaaagtgaaattctatgttaaaatatgccagatttattttaagaatttaatatctgtagtcagttatcaatacaaccaaattacataattatgcatgataataggtaaatactgagaagttcacctcattttcttgttaaaggatttggctattaccgtatgtgtcagttagtactcttttgtatggtagtgaaagaaaactcaacccaaactgattcatgaagaagaaagtaaatctggttagatgtggtttgaattaggtaattcatgtcatgaggactcagatctcccatctctatttctacgttccacttttgcattggcttcattttcggttaggttctcccttggtggtggtaaggtggttgtagcaatgtcagcctcccatttttggaaccgagtccataggaggctattctttctagaccttaataggagtaacacaattattgctcatcaccctagctttggccatgtgtcaaatcctgaccagtcacaatttcacagtcatagattctaccctggagctgggatgttactggcctcactagaaacacattgctgatagggtagaaggtgtgttcatcctacccaacccgacccgcaccaaagtcagaatagggaaaaacagatgttgggtgacatgcaactaacgtctgccgtactacactgaagatatttttctatgtttattctccagtgaaagagcttatatttgtggtacataggggattttgttttaatttagaaaatttaattgtagaaaacatgttttataaccctttctctgtactttgttctatatcaggaattgacttgattagataaggtgacatagggtatcttaggccctacaagatagtaaaccccccatcacttgaaagtattcagtagaggcttaaaaaacattattaaaggatgtggttattaggggactttaagaaatgaatatgaaattgaagtaggaaatctttaagctactctgtgagttatgccttttaaaagcaatttgtaattcctgtagatttcttttaaatttaggcagtttcataaatgactatagcatcattttagcaaatttgtgatcctgtaagaggaggataagtgttttttgtttgtttgtttgttttttgtttttttgagacagagtctcactttgtaccccagaaagtaaatctagttagatgtggtttgtctcggctcactgcaacctccaccccgtgcgttctagcaattctcctgcctcagccaccacacctggcctaagaggggaggataagtgttttagtgatcatattagactgaatgtggcagatgagatttcccgcccccccattgttggttagactgacattcaacattcaacaagagccacctgcccttgtaggcatttctgccactatacccctacataaacctagagtgctattgcttacttgctttccttcaaatacattttttcatttgtggcctccacattcttgtgtgtgatgtcctttctctgtgaaatgtcttctaccctttttttcaaagcctagtttagaactgacctcttctatgaaccctctgccgactggcctttccttccccagtcccccaagttcaaaatgatctctttcctttgaatactatagtatttgcacaattcactatctccttatcatattcttcttgtttatttgttatcagctgatgttgacatcataagttcaggttcctaactagatccaatattggaatttttcagcttttgctaagaagagagcttgtatgtctttgggaataatgggcagaaaaagataactttgagaagtcttagacttctaatagctttgatatttaaaagtacatgtaatacaagaggtttttttcctacatttaatgcatggagaagataggacatttagaaatatggaattaatgttcatttgactggcaaaagattattttctcagatgtagtgaagtgtggtaaagaacttcactctagagccagaatgtctgtgtttgtatcccagagcccaccacttacatttaaccattaacattcaacttactgtctctgagtttcagtggcctcatctataaaatgaggataataagagtacctacttcatagagttgttttagtggttaaataaactaacgtaaacttgctagaacttgataaactaatattggatgagaactggttgaaataatgcctggctatagtaaaaacttggtaaatgttagttgccattacaatgcaactactgttcctaccattccctctgccagtgcctggtattcagtagcactcagtaaatgttagttaaatgaagaaataactgaaggaatgaatgaacaaatggttgatgtagagattgcttttccattgttgtttattgaatattttgagatgtataacatactgtctgttaggcactgtgggatgggcactcacggagctgtcttccaaaggggtataggagaggagacgcagtgatctcagcaacctacctttaaaacatatcctagtatctactgccatgttaggttctcttcttttgctttttttaaaaaaaaattctcacaaaactccccccacccacttcagtttatagatgaggaagctcctactacataatagtgcttcccagtctaattcttgacctcattgtatttatatgtcctttttttttttgacagagtctcactcattgcagtggcacaatcacagctcactgcaacctctgcctcccctgctcaagtgatcctcccacctcaacctcctgagtagctgggactacaggcatgcaccaccacgcctggctaatttttgtatttttttgtagagatgcggttttgccatgttggccaggctggtctcgaactcctgggctcaagccatctgcccactttggcctctgagagtgctgagattataggcatgagccaccattcccagccatgttttcctttttcattgaactttatctactttagccattaaactccactccattggtcttgtcattactaagagctgaaccacctgcaaaatattaagttaaaaagcgttttctttgacaacagttttcttttcttcatcttcctctatcactttacttctgaacttttattctctcattttgatctgacccctacttctctgtttttcctggccatttagtactttcttgttttgctcatcccatttcccagtggagaccttctggtctgctgctttatcactggttttgttagaagacatacaaatggcaaggaggtatatgaaaaggtgcctaacatcattgatcatcagagaaatgcagaccaaaactacaatgagatatcatttcaccccagttaaaatggctttttttttttttttccaaaagacaggcaataacaaagtactggtgaggatgtggagtaaagggaacccacatacactattagtaggaatgtaaattagtacagccactgtggagaacagtttgaaggttcctcaaaaaactaaaaatagagctaccatataatccagcaatcccactgctaggtatatatccaaaagaaaggcaatcaatatacggaagagatacctgcacacccaggtttattgcagcactattcacaatagccaagatttggaagcaacccaggtgtccaacagatgaatggataaagaaaacatggtatataaacacaatggaatactattcagctgtgaaaaagaatgaaatcctgtcatttgcaatcctgtcttgaatagaactggaggtcatgatgttaagtgaaataagacaggcacaaacttcacatgttctcacttatttgtgggagctaaaaattaaaacaatcgaactcatggagctagagaatagaattatggttaccagaggctggaagggtggttgggcgtataagtgtagggggagtggggatggttaatgggtacaaaaaaatgagaacgaataagatctacttgataacacaacagggtgactatagtcaacagtaattatacatttaaaaataactagaagagtataattagattgtaacacaaaagataaatgcttgaggtgatggatacctatttaccctgatgtgattattacttatttcatgcctatatcaaaatatttatactccaaaaatatatatacctactatgtacccacaaaaatttaaaaatttatatattgtttttgctatcacctttagaatttcttgtcattggatagttcgtctgtataccattctggtcttcattccccagggcccccgttgtctgatttttctgcttctagaactgttagaggtcacaaaagcaagatggttgtatctatcacaatttttgtctgactttaactgggtatctgttacgatttagtagtcatcttactgacttcttgttggtttccaattgaatcctcacagtagactgttttcattgtaatcagtatcgaattatagcctgttcccttcttcataaatgaaggctttcttcttcaacagttcttagtgacttcacctgtactttatttctctgctttgaatatttcgaagaaaacatattcttgctctttcccaaggttaacactacatacattaccttgaccacaggatgttttcttgcagattgtgacctaattccatcacccttcagcagcccccaccgttttcatggattcagctaaaccttctgtaagatgactctttttccccctaatctttatatctcttttgatatgtagctttagtctcactttttttccttttggattttgccagttagatgtctccctggaattccacttcagcatggctaagactaagcttgtcttctctttcctccccaaagcaaattgtaattaggatagactgaaggtgacagaagataactaagatcttcttcatcctttcggctcttatggaagctgaattccagtagtcattctaaatttgttgtatgtcagcttatggtatcttttcatgtctttacattcagccaaagaggaagttccttgaaggggagaccagagggcgtgctgtgcttcttaatcctctctttcttaaccagtaagaggcattcagtagatatctgatgatactgattaatagaggggaacttttcagattcttttttttttttaaccctagtaagctttagtacaaactaaatgctgagagattatcaagtaagggattgatcatcacaagaagactcaggatgttacatcctgtaggttttatagtttcctatattgtaaaaaatatgagttatagcagcttgtctggatgtcatacaggtataaaaatcagttttataaacttgagtaaattggggcccattttagaaaaaactcttgcaggctgtgaatgccaatatataagtaaagtattaagtataatgttatttaatgtgggcaaacataaagccaggtgtaaattttttaggtttaaaatcttatagaactatacatccaaaagaaaatttcaagttaaacataatacaaagcaatacaatctaaattaacattaatttaatgtgatgaatgatattgccttgctaaaagtgggtcactacttacaatgtgcaaatggtactcatcgttagggtatagattcttttaaactatgacatacgtacactaccatgtggaacgtgatgatgtgttctctgttctaactactgggaagacttccttggcatagcacatgccatggggtcagttggctttgacttcatatagatatgccatttacttggtcagtgtcacttctatgacaagtagtatgttgtgccagtttgattataagtacaaatatgggcaatgaagtaacttggttttaaggttgttactaagctgagtaacagtgtgtggctatacaaatttttataggctatcaggaatgaaaacacaggagattgttgtagattcaagtattttagattcaagtttgaagatgctcatgcagatgtttaactgagttgtatagacctttatgtttctttctttttctctttttttttttttgagacagagtcttgctctgtcacccaagctggagtgcaatggtgtgatctcggcttactgcaacctccgcctcccaggttcaagcaattctcctgcctcagcctcccaagtagctgggattacagatgtgcaccacgacgcccagctgattttttgtattttagtagaggcggggtctcaccatgttgtcaagatggtctcaatctcctgaccttgtgatccacccacctctgcctcccaaagtgctgtgattacaggcgtgagccaccgcgcctgactgacctttatgtttcttaactttatgctatacatcagttgatatttcaaaaatttaaatggtttctatgattattctttgggctaagaaattgggcattaattgtcctcatatgtatggtttttgtggctacttcatgtagattttatttttggtggttatcaaattggaatttttttttttttttttttttttgagacggagtctcattctgtttcccaggttggagtacagtggtgcaatctcagctcactgcagcctcgacctcccaggctcaagcagtcctctcacctcagccttctaagtagctgggactacaggcacgcaccaccacacctggctagttttttgtgtttttagtagagatggggttttaccctgttggccaggctggtcttgaactcctggcctcaagtgatccacctgcctcagcctcccaaagtgctgggattagaggcatgagccaccacacctggctgaaattggaatttcattggtactgcctgtaattttatgttaatttttttttttttttgtcgtcactagcttttatctaaagcccctagagagaaaggccatgataccttgtatacaaggttataagagtatacaagggaaagggagggctgaagggaacagggtgggctggtacaagcctcattagaaataccattgagtctgtgagtaaaacatcattatatgaaaaggagatgtggttttagggtggtccaattacttttgcaccagcctaataaaattacaagtcattatcaatagagacattgtaaaacctttttttttcccaaaagaagtatcaggtatgataattacatgtctgcccaactttcgttatagattaacataacttaattgtatttaaggtacaatttaggagagttgctgaaaaatgaatctttagtattgggatgccttgattctaccctcaatagctataatggattatgtgtctgagtagattaataaaaatcttttgagcatttttcttgaactacttcactgaagattagctttttgagcatccattttaatttctcagtatataaggatcggtttatcacaactgtattgttttccctggccttgttagattatattttcatatcatgtagaaaaataggtgtattcgttctcccttgaagtcctttgtctcccaaaggaaatggttgcaatacagatgtgtcacctcttccacaggtaaagtggaatggagaagtagccagttaaatagtgcatgctcaatttggaacatttagagcatacaggaaagttatttatttggtaaatattttttaagcatttactatgtttcatgcattgtactagttgtagaggatataattgaatacaactacatgtagcccttgactttatggaactagtctagtataaagatttaagattgcctggcatggtggctcacgccactaatcccagcactttgagaggccaaggcaggattgcttgaggccagaagtttaagagtagcttggtcaacataatgagactccatctctaaaataaatagatagatagatagatagatagatagatagatagatagatagaagtagttagacaacacaaagcagtttcactcatcttgtggcaaggagttatgtatttctaatcaaatttggcaactcaagcattttcaacaaaatctacatgttttttcagaataaagtgaccaacacagaatgttacctgtaaaaatcagagcaataattgctatctaaaataattttgaaaattaagtggtactgaaaggctcatatagcaaaaatatggcctcctgtcattgtactttcctacttcccagactcaccattttcaacattttttagtagtttattttgccattttatagcatagtacctgacattttatttattcaacagacatttcttaagtacctaatacatgccattccttgtttgaagggatgctaaggatacagtggtgaacaaggcgttgtggggttgtatagagggtattcattcctaaccttgaaccaaatatttctttctgttggataatgcattaaaaattgcaaacagtttacaaacttttggagcaatggtggccttgatcataaagtagggactgcttctaccgtatacatgcttggtggtgtatttgtgatatctggctaaagtttctacatggaaattgactgactttagttttgagacttctgggaaccagtcaggcaaaatagtgaaactgtgtatcctgtttccaagagttgtcttttaaggttatctgcttcattcatttggcctgacttgctaggcaaatgcctagggtaaatatgatttgattaactataacaacaacagcaacaacaacaactttattttttagagcagtttgaggttcacagcaaaattgagcagaatgtacagagattttccctatacccgcttcccctacgcatgtgcggcctcccctactatcaacatcccccaccagagtggtttgttacaattaatgaacctacattgacacatcattatcactcaaggtccgtagtttacattagagtccactcttggtgttgtgtatgggtttggtcgattttataatgacatttatccaccattatagtgtcatacatagtaattttgctaccctaaaaatccagtgtgctccacctgttcctccttccctcctccctcatccctggcaaccactgaactttttaacatctccatagttttgccttttccagaatgtcatatcattggaatcacacagtatgcagccttttcaaatgggcttctttccgttagtaataggcatttaagtttcatcctcatcttttcatggcttgatagctcatttctttccctccctcttttcttccctgtcttccttccttcctcttctttcctgtttcctctttcttcttccttttttaagagacaaggtgtctcactctgttgcccaggctggagtgcagtggcccaatcatagctcattgcagccttgaattcctgggctcaagtgatcctcctgcgttagcctcctgagtagctgggatcacaggctccagtcattttagtgctgaataatatttcattatctggatgtaccgcctattcattcacctactgaagaatatcttggttgcttctaagttttggcaattatgagtgaagttactataaacattgtatacaagttttatgtggatgtatgttgtcatctcccttgggcagataccaaggagtgccattgttggatcatatggtaaatatatctttagttttgtacagaattctaggttggtatttttttctctctcagtcctttattttatttggagacagtctcgctatgtcgcccaggctgccatacagtggtgccatctgggctcactgaaacctccacctcccaggttcaagcgattcttgtgccttggcctcccaagtagctgggattacaggagtgcgccaccacgcctgctaatttttgtatttttagtagagacagggttttgccatgttgcccaggctggtctcaaactcctgaccttaagtgattcacccacctcaatctcccaaaatcctgggattacaggcctgagctactgtgcctgatctctctcagtactttaaagaaatatttcattccacttttcttttttttcttctttttgagatggagtctcactctgtcgcctgggctggagtgcagtggcgcgatctcagctcactgccacctccgcctcctgggttcaagtgattctcctgcctcagcctcctgaatagctgagattacaggcgcccaccaccatgcccagctaattttttgcatttttagtagagacgggggttccaccatgttggccaggctggtctcgaactcctgacctcgtgattcgcacatctcggcctcccaaattgctgggattacaggtgtgagctaccacgcctggcccactcttcttgcttacatagtttctgaggagatgtcagatgtaatttttatttttgctcttctgtaggcaagttgagttttttccccctctagcttctctcaggatttttttctttatctttgattttcagtagtttgaaaattatatgcctagctgtcagggttttttgcttgtttgtttttgttttctcaggtgtgactccagaaaggttctaaagaggagctttacaatctcttctctggggtttatggagacttcctttacccttctgtgttagccccttaaagcactgcgtcaaccttaaaagggcacaggaaagggtgtctatgccatttttatgccatttatcctgcttggtgttttctgagctttcttcatctgcggtttaatgtctcacattaatttgtagaaattctctgtcattgtttcaaatttttcttcagttcttttctctgtttcttcttctggtgttcccattatgcttttgtggttgtcgtacagttattggatattttgttccaggcttttttttttccagtctttttttccttttgcttctcggttttgtaggtgtctgttgagatactctcaagtgcagatattctttcctcagctttgtctagtttactaataagcccattaaaggcagtcttcatttctgttacagtctttttgatcagtagcatttcttttttattctttcttaaaatttctgtctttctgcttacattgcccatctgttcttgcatggtttctactttgtccattagagttcttaggatatttatcataattatttcaaatttctggtgtaacaattccaacatccctgcaacatccaagtctagtttcgatgcttactgtgtctcttccagctgtgttttttcctatttaatatgtcttataattttttcttgatagccatacatgatgcattaggtaacagaaactgctgtgagtggacctttagtaatgtggtggtaaggtgtgcatggaggggaaacattttcagtctgttagtgaacttttgtcaacttcacatgtgcttctcaagtccatcctgtaagtgggagagtagggctagagaggactgaagttgggtatatattaaatactttctcctacaaagaagcctagaggggacgcattaggggattttttttcccccagtattcactgtgatgacccttattgagctcctggaggtaaaactcacaaaactgtggttctcccccctgcccatattactacatgtccctggagtttatatctttcagacttgtctgcactgagcttccaccaatttgtcaaatacagatcaggtttccctaccacccgtgcagttgaaaacccacatacaacttttgactcctccagagcttaactactcatagcctgctattgactggaagccttgccaataacataaacagttgattaatacatattttatatgttttctgtattatatattgtattcttacaataaagagaaaagaagatgttattaagaaaatcataaggaagataaaatatatttactgttcattaagtggttcccatgggtgctggttcccatggaggttgccccttgtgagtttttgctcagggaagttgtgattctctatatttgcctgttggtctcctaatttgggagtcatcagttttccctgtgacctcacttctcttacagagttaagaacagttgttggtttttcagtttgttcagtgttttacatgttgttagaacacagtggtacttctaagtttcttaacatgctagatcagaaacctgaagtctcacctaatttggctttttatattttttcttcttttttttcttccattgctaccaaagcatttttcatctgtgtctggggtgacattagagcagaatgtgatttctaggtaaacattattgggctccctagcagaaaaatttttgaaagtagtacatgaattctgtataattaaaattttcttttcatcttaataggtataggtaataggcacggcctattttttttttgctcaacagtctaaaatagtaatttaatcacctaatagccttagttatatagttgaaagaagagttggaaatctgattcatgggttggaaatcacctgtcacatatgagttttaggcactggtcactttattttgaaacagctttggggttttttcctttttcaactcataataggctttaacagcttttagttttgtttctgtttttttaacagcatgagttgccaaatttggttatagcttcttggtacaagatgggtaaatttgctttgtgttgtgtaattactttttattttaaatgctacctcttttatgaacactaactttacactaagattaggaaaatgagaattgcatgtctgcaacaaatagctatctgtagtattaaattgtgaaaatgtagactttggattggagctggcatctcttaatatgtaattgtaacatagagtaaataagtattttgtcccttgtagggtcaaacagtacagtgcatgggcagaattagagatgtaggcttttttttttttttttttttttactggcttagagaaccgtttgatcagctaatatggaattaagtccctagggctgcccaggcacaacattaactgctattaaaggaaaatttaaaagagtattagtgaaggttaaatactgaccatggacatctggcaaaattgatgttttttttcccctccaccattgtttatagtttattgttatttatcagagaattaatgtttattttcagaatctattaccataagaaatctgtttgaggacttcgtatgtgccaggaattctactaaataatgatataatgctgaacagaattagataggatcctcacttcgttaagcttacagtctagtggtatagatcaacattaatcaaagaataacacaaatagaaagcagagcagtggttcatgggattgactgtagagaagcatgagggaagttcccaggtgatggaaaatactttatttcttaatcgtggtggttacatgtgtgcatatgtttatgaaaatatattgtacatttaaagtggatacattttatcacatgtaaattatgactctataaagttaattaaaaagaataactcaggtaaggtggtgtgtgcgcctgtagtcccagctatttctgaggcaggaagatcacttgagcccaggagtttgagttcagcatgggcaacatgagacctgtgagactttgtctctaaaaaaatttaaataaataactaagataaatgtaaaattacagctgtagtaagttctacaaaggagagttacatgggctatgacgatgtaagatagcaagaactgacattggcagggaggaaatgatgatgagtagaagtaaataagtgaagtgtggggattgatgtcaaggggacagtataaaagaaataacagcatgcgccaaggccctaaaattggaaagtccttggcaaattaaaggagtttgaaaaaggccattgtgtgcaaagcagaaaataggtactacaaggtaaaagatggagctaagcggtaggtaaggctaaaccttgtcagccattgttaaatattgaattgtatcctaagcacaactcagtggaaagcagttaaagttctttaattgggggaggcaatgaaggggtaataaaattggttatagaaatactgctctggctctagtgttgagaatgaattggagtagccagagtagattcaagaagactttagtaagattattccaacaggccaggacctgttatagggtggtggcaatggagagagatggacagaatggagagtgtatttaggaggtaaaaatgacagaacttggtgatgcactgaatgtgaaatggggaaggtgtctaggaggactactaggtttatggtttgcgtattagggtggatgatagcagtttcatttactgagacagggagccctggcagagtacccagcttttagagtgggtagggggaaggggagagtgcatctggtgttgggcattttgaagtgatttacatacaacaaactgaaggtatctttaacactgagtccagcaggttagcatatttattcagcaagcattgcacctttttttgttgtttttggggtcttcaactcctggcctcgaatcctccctccttcccccgcctctcccagcctccgcctcccaaagtgctgggatttcaggagtgagccaccgcgcctggccagcatcgcgctgtttgtgcagtgtgccctgtgctaggtcttgcagtgggtaccagtagagacataaaagtacaaaagataattggacgtttagtagagtcctgaaagggggcgggataggaagatacctaaccataagaaaaaccagcaagagcggaaaaggagctagtcctccagatcaataagttaatcacttatgtttgtgattccctgcattttgggtgattctctgtcgaggtcctcttaagtccagacttttgatataatctgcagtttgcgccatttggattcctgaagcatctttacaagccacctacattccttatggagctgtggcacaacagcaagcccacgatgtctcaccggattaataaaaatataggcgctcacgcttttgtttaccgatatagtatctcctcctcccctcactccatcaacccccacgcgacacaactttccggaagtaagcaaaatccgttatcaaggtgaaactccggggaccaggctccacagctgccataaactggatggcacgttagaagccggtgggtgtaggtgaggcacgctggcgcccgcgggcccttctccagccgctacccagtgggaatccgcggggctgaagccccgaaaccaggctgagcgtcccagagcgcaacctccctttcccccagcagcgccggcgccgcagaagccgcgtgtccccaggcgcactcccccaaggtgaacccccgccccccacggaggcggctgggtcgcgggtctgggcggggcgctccggacgccctcccgccgctgcgcacccctcccgcgagctgccagctccctcggcctctccacccaaaactggcccaaccgccaatcgtctgcctctcacctcctacagcaggtgacccatggccaatcgccaggggtctctttgccaggagccgccagggccagccaatcggggcgacccctccgccggggaggggacgggaaaggggtggggggtgaagggggtgaagggggtgtcccgggggacgggctgaacctcagtcaggaccgcctgcaccgcagtccggggatcgggtcgaggggagaagaaaaaggggtgctcgggagcagcccccggctacctcccctggaggcacagagggcgggggccttggcgaatggctttcttgctggccacttgcggagtgagtagaccccgagggtctgggagaggggccggcccctacccctgagtccccggggtcccggccgccaggccggagcgcgaatgtcgtgctcaccctgcctccttcccgccgccccctgggggtttggattcaggatttgttcctagtgtccaagattttgataagaaacttacagaagctgatgcttacctacaaatcttgattgaacaattaaagctttttgatgacaagcttcaaaactgcaaagaagatgaacagagaaagaaaattgaaactctcaaagagacaacaaatagcatggtagaatcaattaaacactgcattgtgttgctgcagattgccaaaagtactattaatcccgtagatgcaatatatcaacctagtcctttggaacctgtgatcagcacaatgccttcccagactgtgttacctccagaacctgttcagttgtgtaagtcagagcagcgtccatcttccctaccagttggacctgtgttggctaccttgggacatcatcagactcctacaccaaatagtacaggcagtggccattcaccaccgagtagcagtctcacttctccaagccacgtgaacttgtctccaaatacagtcccagagttctcttactccagcagtgaagatgaattttatgatgctgatgaattccatcaaagtggctcatccccaaagcgcttaatagattcttctggatctgcctcagtcctgacacacagcagctcgggaaatagtctaaaacgcccagataccacagaatcacttaattcttccttgtccaatggaacaagtgatgctgacctgtttgattcacatgatgacagagatgatgatgcggaggcagggtctgtggaggagcacaagagcgttatcatgcatctcttgtcgcaggttagacttggaatggatcttactaaggtagttcttccaacgtttattcttgaaagaagatctcttttagaaatgtatgcagacttttttgcacatccggacctgtttgtgagcattagtgaccagaaggatcccaaggatcgaatggttcaggttgtgaaatggtacctctcagcctttcatgcgggaaggaaaggatcagttgccaaaaagccatacaatcccattttgggcgagatttttcagtgtcattggacattaccaaatgatactgaagagaacacagaactagtttcagaaggaccagttccctgggtttccaaaaacagtgtaacatttgtggctgagcaggtttcccatcatccacccatttcagccttttatgctgagtgttttaacaagaagatacaattcaatgctcatatctggaccaaatcaaaattccttgggatgtcaattggggtgcacaacatagggcagggctgtgtctcatgtctagactatgatgaacattacattctcacattccccaatggctatggaaggcaagtgtgtccatttcctctgatcagcagtagactctgctgttccttgagacatgccccttccccctcttcctcttaactgtcaaccttacctaaaaacttttgattttgcaggtctatcctcacagtgccctgggtggaattaggaggagaatgcaatattaattgttccaaaacaggctatagtgcaaatatcatcttccacactaaacccttctatgggggcaagaagcacagaattactgccgagattttgtaggtattttttctgccttagagctcttatgcttttctgaaataactgccttttgtcttgaactacagcttctggattaggagtgtgaaagaatggttctgtctttgtaagcgtgtttcacattttatgtgtcatgtcttttgctgaagtcccatatcagaagaagacctaaaacatatattcagagcagtcagaggtcattgataggtttccttcctaaaaacctgacttgcaatgttgaactaaaagaggccttcctaggttgcctagctaaaccagattatggatccctaatttattcttgccagattgaatgatgagctggtccttacagcagactttgtgacccctgcagcactgcctcctggtcctcacagctatccctttttctgtgcctttgctggggaaaaacagtaaccatcacattttgcacgcatctggcttgcttccacttgacactcttgggtcacgtgcagatgactgtgccagtcagtggaaagtctatagtgatggcaccatgactctctctgcctctggaacccttaactgggggggaaggggacagtgggaaagaaagtttcaggcgttgatagcagctctcctccctctgccctggtcatgtctcccttttctggcctctttcaatcctgtttatgccttgcccttcctaaccaggcctttgctgtgttgcttatcttctcacattccatagttgtgtgtccaagtagaggtctgttacggcttttgcagaatggatccttgctcagggaaagtattcacaccatctggcacagaggtccctttcaacctgaggatgaaagcctgcattatattcttaagcaaagccttccctgacccccagtgcccatgtaagctcaccacagcacttaccacctagaatttcaatggtggttacgtctctctccactacgctgtgaacagcttgaggatagggaatttgccaactctgttatggtccttgcacccagaataggacgttcttgcccaaacccaccattcttgggatctcaagttcataagcgtcctgttgaaggccctcattcttatagttagccctggggagtccagttctgttaagatgctttcatcaaaaacttcacagttgctcttctgtgctctactctgtagttgggccacactgagcagattctttggtagaattttcaacttgagactaacacaagtatttccttttctgttcag

SEQ ID NO: 735111 - DNA, 19252 bp, Homo sapiens
gtaagggtctttacatggtttccagatagttcattagttgttgctttctttttttgtctgttttctgttttttttttttaaataactgtggtatgatgtaataggaacttataatttctgagttgcttatttttcctttacagttatagtaaagttatactcatttattttctcctgctttctgcagagtaaaatactgatttttgtctagaaacaagacagtgcaagacaatgttgaaagtgaaattctatgttaaaatatgccagatttattttaagaatttaatatctgtagtcagttatcaatacaaccaaattacataattatgcatgataataggtaaatactgagaagttcacctcattttcttgttaaaggatttggctattaccgtatgtgtcagttagtactcttttgtatggtagtgaaagaaaactcaacccaaactgattcatgaagaagaaagtaaatctggttagatgtggtttgaattaggtaattcatgtcatgaggactcagatctcccatctctatttctacgttccacttttgcattggcttcattttcggttaggttctcccttggtggtggtaaggtggttgtagcaatgtcagcctcccatttttggaaccgagtccataggaggctattctttctagaccttaataggagtaacacaattattgctcatcaccctagctttggccatgtgtcaaatcctgaccagtcacaatttcacagtcatagattctaccctggagctgggatgttactggcctcactagaaacacattgctgatagggtagaaggtgtgttcatcctacccaacccgacccgcaccaaagtcagaatagggaaaaacagatgttgggtgacatgcaactaacgtctgccgtactacactgaagatatttttctatgtttattctccagtgaaagagcttatatttgtggtacataggggattttgttttaatttagaaaatttaattgtagaaaacatgttttataaccctttctctgtactttgttctatatcaggaattgacttgattagataaggtgacatagggtatcttaggccctacaagatagtaaaccccccatcacttgaaagtattcagtagaggcttaaaaaacattattaaaggatgtggttattaggggactttaagaaatgaatatgaaattgaagtaggaaatctttaagctactctgtgagttatgccttttaaaagcaatttgtaattcctgtagatttcttttaaatttaggcagtttcataaatgactatagcatcattttagcaaatttgtgatcctgtaagaggaggataagtgttttttgtttgtttgtttgttttttgtttttttgagacagagtctcactttgtaccccagaaagtaaatctagttagatgtggtttgtctcggctcactgcaacctccaccccgtgcgttctagcaattctcctgcctcagccaccacacctggcctaagaggggaggataagtgttttagtgatcatattagactgaatgtggcagatgagatttcccgcccccccattgttggttagactgacattcaacattcaacaagagccacctgcccttgtaggcatttctgccactatacccctacataaacctagagtgctattgcttacttgctttccttcaaatacattttttcatttgtggcctccacattcttgtgtgtgatgtcctttctctgtgaaatgtcttctaccctttttttcaaagcctagtttagaactgacctcttctatgaaccctctgccgactggcctttccttccccagtcccccaagttcaaaatgatctctttcctttgaatactatagtatttgcacaattcactatctccttatcatattcttcttgtttatttgttatcagctgatgttgacatcataagttcaggttcctaactagatccaatattggaatttttcagcttttgctaagaagagagcttgtatgtctttgggaataatgggcagaaaaagataactttgagaagtcttagacttctaatagctttgatatttaaaagtacatgtaatacaagaggtttttttcctacatttaatgcatggagaagataggacatttagaaatatggaattaatgttcatttgactggcaaaagattattttctcagatgtagtgaagtgtggtaaagaacttcactctagagccagaatgtctgtgtttgtatcccagagcccaccacttacatttaaccattaacattcaacttactgtctctgagtttcagtggcctcatctataaaatgaggataataagagtacctacttcatagagttgttttagtggttaaataaactaacgtaaacttgctagaacttgataaactaatattggatgagaactggttgaaataatgcctggctatagtaaaaacttggtaaatgttagttgccattacaatgcaactactgttcctaccattccctctgccagtgcctggtattcagtagcactcagtaaatgttagttaaatgaagaaataactgaaggaatgaatgaacaaatggttgatgtagagattgcttttccattgttgtttattgaatattttgagatgtataacatactgtctgttaggcactgtgggatgggcactcacggagctgtcttccaaaggggtataggagaggagacgcagtgatctcagcaacctacctttaaaacatatcctagtatctactgccatgttaggttctcttcttttgctttttttaaaaaaaaattctcacaaaactccccccacccacttcagtttatagatgaggaagctcctactacataatagtgcttcccagtctaattcttgacctcattgtatttatatgtcctttttttttttgacagagtctcactcattgcagtggcacaatcacagctcactgcaacctctgcctcccctgctcaagtgatcctcccacctcaacctcctgagtagctgggactacaggcatgcaccaccacgcctggctaatttttgtatttttttgtagagatgcggttttgccatgttggccaggctggtctcgaactcctgggctcaagccatctgcccactttggcctctgagagtgctgagattataggcatgagccaccattcccagccatgttttcctttttcattgaactttatctactttagccattaaactccactccattggtcttgtcattactaagagctgaaccacctgcaaaatattaagttaaaaagcgttttctttgacaacagttttcttttcttcatcttcctctatcactttacttctgaacttttattctctcattttgatctgacccctacttctctgtttttcctggccatttagtactttcttgttttgctcatcccatttcccagtggagaccttctggtctgctgctttatcactggttttgttagaagacatacaaatggcaaggaggtatatgaaaaggtgcctaacatcattgatcatcagagaaatgcagaccaaaactacaatgagatatcatttcaccccagttaaaatggctttttttttttttttccaaaagacaggcaataacaaagtactggtgaggatgtggagtaaagggaacccacatacactattagtaggaatgtaaattagtacagccactgtggagaacagtttgaaggttcctcaaaaaactaaaaatagagctaccatataatccagcaatcccactgctaggtatatatccaaaagaaaggcaatcaatatacggaagagatacctgcacacccaggtttattgcagcactattcacaatagccaagatttggaagcaacccaggtgtccaacagatgaatggataaagaaaacatggtatataaacacaatggaatactattcagctgtgaaaaagaatgaaatcctgtcatttgcaatcctgtcttgaatagaactggaggtcatgatgttaagtgaaataagacaggcacaaacttcacatgttctcacttatttgtgggagctaaaaattaaaacaatcgaactcatggagctagagaatagaattatggttaccagaggctggaagggtggttgggcgtataagtgtagggggagtggggatggttaatgggtacaaaaaaatgagaacgaataagatctacttgataacacaacagggtgactatagtcaacagtaattatacatttaaaaataactagaagagtataattagattgtaacacaaaagataaatgcttgaggtgatggatacctatttaccctgatgtgattattacttatttcatgcctatatcaaaatatttatactccaaaaatatatatacctactatgtacccacaaaaatttaaaaatttatatattgtttttgctatcacctttagaatttcttgtcattggatagttcgtctgtataccattctggtcttcattccccagggcccccgttgtctgatttttctgcttctagaactgttagaggtcacaaaagcaagatggttgtatctatcacaatttttgtctgactttaactgggtatctgttacgatttagtagtcatcttactgacttcttgttggtttccaattgaatcctcacagtagactgttttcattgtaatcagtatcgaattatagcctgttcccttcttcataaatgaaggctttcttcttcaacagttcttagtgacttcacctgtactttatttctctgctttgaatatttcgaagaaaacatattcttgctctttcccaaggttaacactacatacattaccttgaccacaggatgttttcttgcagattgtgacctaattccatcacccttcagcagcccccaccgttttcatggattcagctaaaccttctgtaagatgactctttttccccctaatctttatatctcttttgatatgtagctttagtctcactttttttccttttggattttgccagttagatgtctccctggaattccacttcagcatggctaagactaagcttgtcttctctttcctccccaaagcaaattgtaattaggatagactgaaggtgacagaagataactaagatcttcttcatcctttcggctcttatggaagctgaattccagtagtcattctaaatttgttgtatgtcagcttatggtatcttttcatgtctttacattcagccaaagaggaagttccttgaaggggagaccagagggcgtgctgtgcttcttaatcctctctttcttaaccagtaagaggcattcagtagatatctgatgatactgattaatagaggggaacttttcagattcttttttttttttaaccctagtaagctttagtacaaactaaatgctgagagattatcaagtaagggattgatcatcacaagaagactcaggatgttacatcctgtaggttttatagtttcctatattgtaaaaaatatgagttatagcagcttgtctggatgtcatacaggtataaaaatcagttttataaacttgagtaaattggggcccattttagaaaaaactcttgcaggctgtgaatgccaatatataagtaaagtattaagtataatgttatttaatgtgggcaaacataaagccaggtgtaaattttttaggtttaaaatcttatagaactatacatccaaaagaaaatttcaagttaaacataatacaaagcaatacaatctaaattaacattaatttaatgtgatgaatgatattgccttgctaaaagtgggtcactacttacaatgtgcaaatggtactcatcgttagggtatagattcttttaaactatgacatacgtacactaccatgtggaacgtgatgatgtgttctctgttctaactactgggaagacttccttggcatagcacatgccatggggtcagttggctttgacttcatatagatatgccatttacttggtcagtgtcacttctatgacaagtagtatgttgtgccagtttgattataagtacaaatatgggcaatgaagtaacttggttttaaggttgttactaagctgagtaacagtgtgtggctatacaaatttttataggctatcaggaatgaaaacacaggagattgttgtagattcaagtattttagattcaagtttgaagatgctcatgcagatgtttaactgagttgtatagacctttatgtttctttctttttctctttttttttttttgagacagagtcttgctctgtcacccaagctggagtgcaatggtgtgatctcggcttactgcaacctccgcctcccaggttcaagcaattctcctgcctcagcctcccaagtagctgggattacagatgtgcaccacgacgcccagctgattttttgtattttagtagaggcggggtctcaccatgttgtcaagatggtctcaatctcctgaccttgtgatccacccacctctgcctcccaaagtgctgtgattacaggcgtgagccaccgcgcctgactgacctttatgtttcttaactttatgctatacatcagttgatatttcaaaaatttaaatggtttctatgattattctttgggctaagaaattgggcattaattgtcctcatatgtatggtttttgtggctacttcatgtagattttatttttggtggttatcaaattggaatttttttttttttttttttttttgagacggagtctcattctgtttcccaggttggagtacagtggtgcaatctcagctcactgcagcctcgacctcccaggctcaagcagtcctctcacctcagccttctaagtagctgggactacaggcacgcaccaccacacctggctagttttttgtgtttttagtagagatggggttttaccctgttggccaggctggtcttgaactcctggcctcaagtgatccacctgcctcagcctcccaaagtgctgggattagaggcatgagccaccacacctggctgaaattggaatttcattggtactgcctgtaattttatgttaatttttttttttttttgtcgtcactagcttttatctaaagcccctagagagaaaggccatgataccttgtatacaaggttataagagtatacaagggaaagggagggctgaagggaacagggtgggctggtacaagcctcattagaaataccattgagtctgtgagtaaaacatcattatatgaaaaggagatgtggttttagggtggtccaattacttttgcaccagcctaataaaattacaagtcattatcaatagagacattgtaaaacctttttttttcccaaaagaagtatcaggtatgataattacatgtctgcccaactttcgttatagattaacataacttaattgtatttaaggtacaatttaggagagttgctgaaaaatgaatctttagtattgggatgccttgattctaccctcaatagctataatggattatgtgtctgagtagattaataaaaatcttttgagcatttttcttgaactacttcactgaagattagctttttgagcatccattttaatttctcagtatataaggatcggtttatcacaactgtattgttttccctggccttgttagattatattttcatatcatgtagaaaaataggtgtattcgttctcccttgaagtcctttgtctcccaaaggaaatggttgcaatacagatgtgtcacctcttccacaggtaaagtggaatggagaagtagccagttaaatagtgcatgctcaatttggaacatttagagcatacaggaaagttatttatttggtaaatattttttaagcatttactatgtttcatgcattgtactagttgtagaggatataattgaatacaactacatgtagcccttgactttatggaactagtctagtataaagatttaagattgcctggcatggtggctcacgccactaatcccagcactttgagaggccaaggcaggattgcttgaggccagaagtttaagagtagcttggtcaacataatgagactccatctctaaaataaatagatagatagatagatagatagatagatagatagatagatagaagtagttagacaacacaaagcagtttcactcatcttgtggcaaggagttatgtatttctaatcaaatttggcaactcaagcattttcaacaaaatctacatgttttttcagaataaagtgaccaacacagaatgttacctgtaaaaatcagagcaataattgctatctaaaataattttgaaaattaagtggtactgaaaggctcatatagcaaaaatatggcctcctgtcattgtactttcctacttcccagactcaccattttcaacattttttagtagtttattttgccattttatagcatagtacctgacattttatttattcaacagacatttcttaagtacctaatacatgccattccttgtttgaagggatgctaaggatacagtggtgaacaaggcgttgtggggttgtatagagggtattcattcctaaccttgaaccaaatatttctttctgttggataatgcattaaaaattgcaaacagtttacaaacttttggagcaatggtggccttgatcataaagtagggactgcttctaccgtatacatgcttggtggtgtatttgtgatatctggctaaagtttctacatggaaattgactgactttagttttgagacttctgggaaccagtcaggcaaaatagtgaaactgtgtatcctgtttccaagagttgtcttttaaggttatctgcttcattcatttggcctgacttgctaggcaaatgcctagggtaaatatgatttgattaactataacaacaacagcaacaacaacaactttattttttagagcagtttgaggttcacagcaaaattgagcagaatgtacagagattttccctatacccgcttcccctacgcatgtgcggcctcccctactatcaacatcccccaccagagtggtttgttacaattaatgaacctacattgacacatcattatcactcaaggtccgtagtttacattagagtccactcttggtgttgtgtatgggtttggtcgattttataatgacatttatccaccattatagtgtcatacatagtaattttgctaccctaaaaatccagtgtgctccacctgttcctccttccctcctccctcatccctggcaaccactgaactttttaacatctccatagttttgccttttccagaatgtcatatcattggaatcacacagtatgcagccttttcaaatgggcttctttccgttagtaataggcatttaagtttcatcctcatcttttcatggcttgatagctcatttctttccctccctcttttcttccctgtcttccttccttcctcttctttcctgtttcctctttcttcttccttttttaagagacaaggtgtctcactctgttgcccaggctggagtgcagtggcccaatcatagctcattgcagccttgaattcctgggctcaagtgatcctcctgcgttagcctcctgagtagctgggatcacaggctccagtcattttagtgctgaataatatttcattatctggatgtaccgcctattcattcacctactgaagaatatcttggttgcttctaagttttggcaattatgagtgaagttactataaacattgtatacaagttttatgtggatgtatgttgtcatctcccttgggcagataccaaggagtgccattgttggatcatatggtaaatatatctttagttttgtacagaattctaggttggtatttttttctctctcagtcctttattttatttggagacagtctcgctatgtcgcccaggctgccatacagtggtgccatctgggctcactgaaacctccacctcccaggttcaagcgattcttgtgccttggcctcccaagtagctgggattacaggagtgcgccaccacgcctgctaatttttgtatttttagtagagacagggttttgccatgttgcccaggctggtctcaaactcctgaccttaagtgattcacccacctcaatctcccaaaatcctgggattacaggcctgagctactgtgcctgatctctctcagtactttaaagaaatatttcattccacttttcttttttttcttctttttgagatggagtctcactctgtcgcctgggctggagtgcagtggcgcgatctcagctcactgccacctccgcctcctgggttcaagtgattctcctgcctcagcctcctgaatagctgagattacaggcgcccaccaccatgcccagctaattttttgcatttttagtagagacgggggttccaccatgttggccaggctggtctcgaactcctgacctcgtgattcgcacatctcggcctcccaaattgctgggattacaggtgtgagctaccacgcctggcccactcttcttgcttacatagtttctgaggagatgtcagatgtaatttttatttttgctcttctgtaggcaagttgagttttttccccctctagcttctctcaggatttttttctttatctttgattttcagtagtttgaaaattatatgcctagctgtcagggttttttgcttgtttgtttttgttttctcaggtgtgactccagaaaggttctaaagaggagctttacaatctcttctctggggtttatggagacttcctttacccttctgtgttagccccttaaagcactgcgtcaaccttaaaagggcacaggaaagggtgtctatgccatttttatgccatttatcctgcttggtgttttctgagctttcttcatctgcggtttaatgtctcacattaatttgtagaaattctctgtcattgtttcaaatttttcttcagttcttttctctgtttcttcttctggtgttcccattatgcttttgtggttgtcgtacagttattggatattttgttccaggcttttttttttccagtctttttttccttttgcttctcggttttgtaggtgtctgttgagatactctcaagtgcagatattctttcctcagctttgtctagtttactaataagcccattaaaggcagtcttcatttctgttacagtctttttgatcagtagcatttcttttttattctttcttaaaatttctgtctttctgcttacattgcccatctgttcttgcatggtttctactttgtccattagagttcttaggatatttatcataattatttcaaatttctggtgtaacaattccaacatccctgcaacatccaagtctagtttcgatgcttactgtgtctcttccagctgtgttttttcctatttaatatgtcttataattttttcttgatagccatacatgatgcattaggtaacagaaactgctgtgagtggacctttagtaatgtggtggtaaggtgtgcatggaggggaaacattttcagtctgttagtgaacttttgtcaacttcacatgtgcttctcaagtccatcctgtaagtgggagagtagggctagagaggactgaagttgggtatatattaaatactttctcctacaaagaagcctagaggggacgcattaggggattttttttcccccagtattcactgtgatgacccttattgagctcctggaggtaaaactcacaaaactgtggttctcccccctgcccatattactacatgtccctggagtttatatctttcagacttgtctgcactgagcttccaccaatttgtcaaatacagatcaggtttccctaccacccgtgcagttgaaaacccacatacaacttttgactcctccagagcttaactactcatagcctgctattgactggaagccttgccaataacataaacagttgattaatacatattttatatgttttctgtattatatattgtattcttacaataaagagaaaagaagatgttattaagaaaatcataaggaagataaaatatatttactgttcattaagtggttcccatgggtgctggttcccatggaggttgccccttgtgagtttttgctcagggaagttgtgattctctatatttgcctgttggtctcctaatttgggagtcatcagttttccctgtgacctcacttctcttacagagttaagaacagttgttggtttttcagtttgttcagtgttttacatgttgttagaacacagtggtacttctaagtttcttaacatgctagatcagaaacctgaagtctcacctaatttggctttttatattttttcttcttttttttcttccattgctaccaaagcatttttcatctgtgtctggggtgacattagagcagaatgtgatttctaggtaaacattattgggctccctagcagaaaaatttttgaaagtagtacatgaattctgtataattaaaattttcttttcatcttaataggtataggtaataggcacggcctattttttttttgctcaacagtctaaaatagtaatttaatcacctaatagccttagttatatagttgaaagaagagttggaaatctgattcatgggttggaaatcacctgtcacatatgagttttaggcactggtcactttattttgaaacagctttggggttttttcctttttcaactcataataggctttaacagcttttagttttgtttctgtttttttaacagcatgagttgccaaatttggttatagcttcttggtacaagatgggtaaatttgctttgtgttgtgtaattactttttattttaaatgctacctcttttatgaacactaactttacactaagattaggaaaatgagaattgcatgtctgcaacaaatagctatctgtagtattaaattgtgaaaatgtagactttggattggagctggcatctcttaatatgtaattgtaacatagagtaaataagtattttgtcccttgtagggtcaaacagtacagtgcatgggcagaattagagatgtaggcttttttttttttttttttttttactggcttagagaaccgtttgatcagctaatatggaattaagtccctagggctgcccaggcacaacattaactgctattaaaggaaaatttaaaagagtattagtgaaggttaaatactgaccatggacatctggcaaaattgatgttttttttcccctccaccattgtttatagtttattgttatttatcagagaattaatgtttattttcagaatctattaccataagaaatctgtttgaggacttcgtatgtgccaggaattctactaaataatgatataatgctgaacagaattagataggatcctcacttcgttaagcttacagtctagtggtatagatcaacattaatcaaagaataacacaaatagaaagcagagcagtggttcatgggattgactgtagagaagcatgagggaagttcccaggtgatggaaaatactttatttcttaatcgtggtggttacatgtgtgcatatgtttatgaaaatatattgtacatttaaagtggatacattttatcacatgtaaattatgactctataaagttaattaaaaagaataactcaggtaaggtggtgtgtgcgcctgtagtcccagctatttctgaggcaggaagatcacttgagcccaggagtttgagttcagcatgggcaacatgagacctgtgagactttgtctctaaaaaaatttaaataaataactaagataaatgtaaaattacagctgtagtaagttctacaaaggagagttacatgggctatgacgatgtaagatagcaagaactgacattggcagggaggaaatgatgatgagtagaagtaaataagtgaagtgtggggattgatgtcaaggggacagtataaaagaaataacagcatgcgccaaggccctaaaattggaaagtccttggcaaattaaaggagtttgaaaaaggccattgtgtgcaaagcagaaaataggtactacaaggtaaaagatggagctaagcggtaggtaaggctaaaccttgtcagccattgttaaatattgaattgtatcctaagcacaactcagtggaaagcagttaaagttctttaattgggggaggcaatgaaggggtaataaaattggttatagaaatactgctctggctctagtgttgagaatgaattggagtagccagagtagattcaagaagactttagtaagattattccaacaggccaggacctgttatagggtggtggcaatggagagagatggacagaatggagagtgtatttaggaggtaaaaatgacagaacttggtgatgcactgaatgtgaaatggggaaggtgtctaggaggactactaggtttatggtttgcgtattagggtggatgatagcagtttcatttactgagacagggagccctggcagagtacccagcttttagagtgggtagggggaaggggagagtgcatctggtgttgggcattttgaagtgatttacatacaacaaactgaaggtatctttaacactgagtccagcaggttagcatatttattcagcaagcattgcacctttttttgttgtttttggggtcttcaactcctggcctcgaatcctccctccttcccccgcctctcccagcctccgcctcccaaagtgctgggatttcaggagtgagccaccgcgcctggccagcatcgcgctgtttgtgcagtgtgccctgtgctaggtcttgcagtgggtaccagtagagacataaaagtacaaaagataattggacgtttagtagagtcctgaaagggggcgggataggaagatacctaaccataagaaaaaccagcaagagcggaaaaggagctagtcctccagatcaataagttaatcacttatgtttgtgattccctgcattttgggtgattctctgtcgaggtcctcttaagtccagacttttgatataatctgcagtttgcgccatttggattcctgaagcatctttacaagccacctacattccttatggagctgtggcacaacagcaagcccacgatgtctcaccggattaataaaaatataggcgctcacgcttttgtttaccgatatagtatctcctcctcccctcactccatcaacccccacgcgacacaactttccggaagtaagcaaaatccgttatcaaggtgaaactccggggaccaggctccacagctgccataaactggatggcacgttagaagccggtgggtgtaggtgaggcacgctggcgcccgcgggcccttctccagccgctacccagtgggaatccgcggggctgaagccccgaaaccaggctgagcgtcccagagcgcaacctccctttcccccagcagcgccggcgccgcagaagccgcgtgtccccaggcgcactcccccaaggtgaacccccgccccccacggaggcggctgggtcgcgggtctgggcggggcgctccggacgccctcccgccgctgcgcacccctcccgcgagctgccagctccctcggcctctccacccaaaactggcccaaccgccaatcgtctgcctctcacctcctacagcaggtgacccatggccaatcgccaggggtctctttgccaggagccgccagggccagccaatcggggcgacccctccgccggggaggggacgggaaaggggtggggggtgaagggggtgaagggggtgtcccgggggacgggctgaacctcagtcaggaccgcctgcaccgcagtccggggatcgggtcgaggggagaagaaaaaggggtgctcgggagcagcccccggctacctcccctggaggcacagagggcgggggccttggcgaatggctttcttgctggccacttgcggagtgagtagaccccgagggtctgggagaggggccggcccctacccctgagtccccggggtcccggccgccaggccggagcgcgaatgtcgtgctcaccctgcctccttcccgccgccccctgggggtttggattcaggatttgttcctagtgtccaagattttgataagaaacttacagaagctgatgcttacctacaaatcttgattgaacaattaaagctttttgatgacaagcttcaaaactgcaaagaagatgaacagagaaagaaaattgaaactctcaaagagacaacaaatagcatggtagaatcaattaaacactgcattgtgttgctgcagattgccaaaagtactattaatcccgtagatgcaatatatcaacctagtcctttggaacctgtgatcagcacaatgccttcccagactgtgttacctccagaacctgttcagttgtgtaagtcagagcagcgtccatcttccctaccagttggacctgtgttggctaccttgggacatcatcagactcctacaccaaatagtacaggcagtggccattcaccaccgagtagcagtctcacttctccaagccacgtgaacttgtctccaaatacagtcccagagttctcttactccagcagtgaagatgaattttatgatgctgatgaattccatcaaagtggctcatccccaaagcgcttaatagattcttctggatctgcctcagtcctgacacacagcagctcgggaaatagtctaaaacgcccagataccacagaatcacttaattcttccttgtccaatggaacaagtgatgctgacctgtttgattcacatgatgacagagatgatgatgcggaggcagggtctgtggaggagcacaagagcgttatcatgcatctcttgtcgcaggttagacttggaatggatcttactaaggtagttcttccaacgtttattcttgaaagaagatctcttttagaaatgtatgcagacttttttgcacatccggacctgtttgtgagcattagtgaccagaaggatcccaaggatcgaatggttcaggttgtgaaatggtacctctcagcctttcatgcgggaaggaaaggatcagttgccaaaaagccatacaatcccattttgggcgagatttttcagtgtcattggacattaccaaatgatactgaagagaacacagaactagtttcagaaggaccagttccctgggtttccaaaaacagtgtaacatttgtggctgagcaggtttcccatcatccacccatttcagccttttatgctgagtgttttaacaagaagatacaattcaatgctcatatctggaccaaatcaaaattccttgggatgtcaattggggtgcacaacatagggcagggctgtgtctcatgtctagactatgatgaacattacattctcacattccccaatggctatggaaggcaagtgtgtccatttcctctgatcagcagtagactctgctgttccttgagacatgccccttccccctcttcctcttaactgtcaaccttacctaaaaacttttgattttgcaggtctatcctcacagtgccctgggtggaattaggaggagaatgcaatattaattgttccaaaacaggctatagtgcaaatatcatcttccacactaaacccttctatgggggcaagaagcacagaattactgccgagattttttctccaaatgacaagaagtctttttgctcaattgaaggggaatggaatggtgtgatgtatgcaaaatatgcaacaggggaaaatacagtctttgtagataccaagaagttgcctataatcaagaagaaagtgaggaagttggaagatcagaacgagtatgaatcccgcagcctttggaaggatgtcactttcaacttaaaaatcagagacattgatgcagcaactgaagcaaagcacaggcttgaagaaagacaaagagcagaagcccgagaaaggaaggagaaggaaattcagtgggagacaaggttatttcatgaagatggagaatgctgggtttatgatgaaccattactgaaacgtcttggtgctgccaagcattaggttggaagatgcaaagtttatacctgatgatcagggcagtaggcataattcagcaacaaacaatcttcctttgggagaaacctgttcattccaatcttctaattacagtggttcctatctcagggatactggactttctgacgcagatgaacaattaaggggaaaagcttcccttttccctctgtggcagttacgattttgacttcagtcctgagaaaaacttcaggttttgaaaatcagatgatgtcttctccttttccaaacaccacacgttgaaagcatttataaatccaagtctgaaactctgcgctctagtactgctgttaagatacacaacttgtttcttagttcatataatctcgggatacacacacacacacacatatatatacacacacatacgtatacacacacatacatatatataaatatacctgatgccagatttttttcataaatattctgcctactgtaaatatgggttcctctgagttgttttagaaaattagcgcaatgtattaaaatcaagtgttaggaaatttcatggtcttacctacaataacttttattttggaattgaactattattaaattgtatctaatcctggattacagtttaattaattattcttagtgcttaaggcttcataaagtaatttttccaacctttttttaaaaagagcatcttttattatcttttatggttaaacttggaagccaattatttggcaaccttgaatacaagagctagcttttcaaagaaagacacttgaaataatggaggatccattcttttcctctgtcagattgtatgttctgtctttagcccctgccaggcaattccccagaatcttcacttaactcatattgcacatgtagggctgcctaccaacattttatccaaaaatgttttattgccttagagggtttgggaagagtgtgtatttatagatccccaccccacagtgaacaaaaatagatagatagatagaataaaatgaatgccacagcagcagatggctcattctgaagggaaatacagaactatatctatctatctatctatcatcttttttatttaaaaatacattaaaaaaacaggtattagtacctagcatttagttagttattcaatatactggttacgtaaggcctttcaagaagtagattctcagtctgagaggacacaggccagggcttctcaaagtgctgctgcaggctttctggtctcgcttggcc

SEQ ID NO: 735112 - DNA, 19294 bp, Homo sapiens
  misc_feature (19294)..(19294): n is a, c, g, or t
gtaagggtctttacatggtttccagatagttcattagttgttgctttctttttttgtctgttttctgttttttttttttaaataactgtggtatgatgtaataggaacttataatttctgagttgcttatttttcctttacagttatagtaaagttatactcatttattttctcctgctttctgcagagtaaaatactgatttttgtctagaaacaagacagtgcaagacaatgttgaaagtgaaattctatgttaaaatatgccagatttattttaagaatttaatatctgtagtcagttatcaatacaaccaaattacataattatgcatgataataggtaaatactgagaagttcacctcattttcttgttaaaggatttggctattaccgtatgtgtcagttagtactcttttgtatggtagtgaaagaaaactcaacccaaactgattcatgaagaagaaagtaaatctggttagatgtggtttgaattaggtaattcatgtcatgaggactcagatctcccatctctatttctacgttccacttttgcattggcttcattttcggttaggttctcccttggtggtggtaaggtggttgtagcaatgtcagcctcccatttttggaaccgagtccataggaggctattctttctagaccttaataggagtaacacaattattgctcatcaccctagctttggccatgtgtcaaatcctgaccagtcacaatttcacagtcatagattctaccctggagctgggatgttactggcctcactagaaacacattgctgatagggtagaaggtgtgttcatcctacccaacccgacccgcaccaaagtcagaatagggaaaaacagatgttgggtgacatgcaactaacgtctgccgtactacactgaagatatttttctatgtttattctccagtgaaagagcttatatttgtggtacataggggattttgttttaatttagaaaatttaattgtagaaaacatgttttataaccctttctctgtactttgttctatatcaggaattgacttgattagataaggtgacatagggtatcttaggccctacaagatagtaaaccccccatcacttgaaagtattcagtagaggcttaaaaaacattattaaaggatgtggttattaggggactttaagaaatgaatatgaaattgaagtaggaaatctttaagctactctgtgagttatgccttttaaaagcaatttgtaattcctgtagatttcttttaaatttaggcagtttcataaatgactatagcatcattttagcaaatttgtgatcctgtaagaggaggataagtgttttttgtttgtttgtttgttttttgtttttttgagacagagtctcactttgtaccccagaaagtaaatctagttagatgtggtttgtctcggctcactgcaacctccaccccgtgcgttctagcaattctcctgcctcagccaccacacctggcctaagaggggaggataagtgttttagtgatcatattagactgaatgtggcagatgagatttcccgcccccccattgttggttagactgacattcaacattcaacaagagccacctgcccttgtaggcatttctgccactatacccctacataaacctagagtgctattgcttacttgctttccttcaaatacattttttcatttgtggcctccacattcttgtgtgtgatgtcctttctctgtgaaatgtcttctaccctttttttcaaagcctagtttagaactgacctcttctatgaaccctctgccgactggcctttccttccccagtcccccaagttcaaaatgatctctttcctttgaatactatagtatttgcacaattcactatctccttatcatattcttcttgtttatttgttatcagctgatgttgacatcataagttcaggttcctaactagatccaatattggaatttttcagcttttgctaagaagagagcttgtatgtctttgggaataatgggcagaaaaagataactttgagaagtcttagacttctaatagctttgatatttaaaagtacatgtaatacaagaggtttttttcctacatttaatgcatggagaagataggacatttagaaatatggaattaatgttcatttgactggcaaaagattattttctcagatgtagtgaagtgtggtaaagaacttcactctagagccagaatgtctgtgtttgtatcccagagcccaccacttacatttaaccattaacattcaacttactgtctctgagtttcagtggcctcatctataaaatgaggataataagagtacctacttcatagagttgttttagtggttaaataaactaacgtaaacttgctagaacttgataaactaatattggatgagaactggttgaaataatgcctggctatagtaaaaacttggtaaatgttagttgccattacaatgcaactactgttcctaccattccctctgccagtgcctggtattcagtagcactcagtaaatgttagttaaatgaagaaataactgaaggaatgaatgaacaaatggttgatgtagagattgcttttccattgttgtttattgaatattttgagatgtataacatactgtctgttaggcactgtgggatgggcactcacggagctgtcttccaaaggggtataggagaggagacgcagtgatctcagcaacctacctttaaaacatatcctagtatctactgccatgttaggttctcttcttttgctttttttaaaaaaaaattctcacaaaactccccccacccacttcagtttatagatgaggaagctcctactacataatagtgcttcccagtctaattcttgacctcattgtatttatatgtcctttttttttttgacagagtctcactcattgcagtggcacaatcacagctcactgcaacctctgcctcccctgctcaagtgatcctcccacctcaacctcctgagtagctgggactacaggcatgcaccaccacgcctggctaatttttgtatttttttgtagagatgcggttttgccatgttggccaggctggtctcgaactcctgggctcaagccatctgcccactttggcctctgagagtgctgagattataggcatgagccaccattcccagccatgttttcctttttcattgaactttatctactttagccattaaactccactccattggtcttgtcattactaagagctgaaccacctgcaaaatattaagttaaaaagcgttttctttgacaacagttttcttttcttcatcttcctctatcactttacttctgaacttttattctctcattttgatctgacccctacttctctgtttttcctggccatttagtactttcttgttttgctcatcccatttcccagtggagaccttctggtctgctgctttatcactggttttgttagaagacatacaaatggcaaggaggtatatgaaaaggtgcctaacatcattgatcatcagagaaatgcagaccaaaactacaatgagatatcatttcaccccagttaaaatggctttttttttttttttccaaaagacaggcaataacaaagtactggtgaggatgtggagtaaagggaacccacatacactattagtaggaatgtaaattagtacagccactgtggagaacagtttgaaggttcctcaaaaaactaaaaatagagctaccatataatccagcaatcccactgctaggtatatatccaaaagaaaggcaatcaatatacggaagagatacctgcacacccaggtttattgcagcactattcacaatagccaagatttggaagcaacccaggtgtccaacagatgaatggataaagaaaacatggtatataaacacaatggaatactattcagctgtgaaaaagaatgaaatcctgtcatttgcaatcctgtcttgaatagaactggaggtcatgatgttaagtgaaataagacaggcacaaacttcacatgttctcacttatttgtgggagctaaaaattaaaacaatcgaactcatggagctagagaatagaattatggttaccagaggctggaagggtggttgggcgtataagtgtagggggagtggggatggttaatgggtacaaaaaaatgagaacgaataagatctacttgataacacaacagggtgactatagtcaacagtaattatacatttaaaaataactagaagagtataattagattgtaacacaaaagataaatgcttgaggtgatggatacctatttaccctgatgtgattattacttatttcatgcctatatcaaaatatttatactccaaaaatatatatacctactatgtacccacaaaaatttaaaaatttatatattgtttttgctatcacctttagaatttcttgtcattggatagttcgtctgtataccattctggtcttcattccccagggcccccgttgtctgatttttctgcttctagaactgttagaggtcacaaaagcaagatggttgtatctatcacaatttttgtctgactttaactgggtatctgttacgatttagtagtcatcttactgacttcttgttggtttccaattgaatcctcacagtagactgttttcattgtaatcagtatcgaattatagcctgttcccttcttcataaatgaaggctttcttcttcaacagttcttagtgacttcacctgtactttatttctctgctttgaatatttcgaagaaaacatattcttgctctttcccaaggttaacactacatacattaccttgaccacaggatgttttcttgcagattgtgacctaattccatcacccttcagcagcccccaccgttttcatggattcagctaaaccttctgtaagatgactctttttccccctaatctttatatctcttttgatatgtagctttagtctcactttttttccttttggattttgccagttagatgtctccctggaattccacttcagcatggctaagactaagcttgtcttctctttcctccccaaagcaaattgtaattaggatagactgaaggtgacagaagataactaagatcttcttcatcctttcggctcttatggaagctgaattccagtagtcattctaaatttgttgtatgtcagcttatggtatcttttcatgtctttacattcagccaaagaggaagttccttgaaggggagaccagagggcgtgctgtgcttcttaatcctctctttcttaaccagtaagaggcattcagtagatatctgatgatactgattaatagaggggaacttttcagattcttttttttttttaaccctagtaagctttagtacaaactaaatgctgagagattatcaagtaagggattgatcatcacaagaagactcaggatgttacatcctgtaggttttatagtttcctatattgtaaaaaatatgagttatagcagcttgtctggatgtcatacaggtataaaaatcagttttataaacttgagtaaattggggcccattttagaaaaaactcttgcaggctgtgaatgccaatatataagtaaagtattaagtataatgttatttaatgtgggcaaacataaagccaggtgtaaattttttaggtttaaaatcttatagaactatacatccaaaagaaaatttcaagttaaacataatacaaagcaatacaatctaaattaacattaatttaatgtgatgaatgatattgccttgctaaaagtgggtcactacttacaatgtgcaaatggtactcatcgttagggtatagattcttttaaactatgacatacgtacactaccatgtggaacgtgatgatgtgttctctgttctaactactgggaagacttccttggcatagcacatgccatggggtcagttggctttgacttcatatagatatgccatttacttggtcagtgtcacttctatgacaagtagtatgttgtgccagtttgattataagtacaaatatgggcaatgaagtaacttggttttaaggttgttactaagctgagtaacagtgtgtggctatacaaatttttataggctatcaggaatgaaaacacaggagattgttgtagattcaagtattttagattcaagtttgaagatgctcatgcagatgtttaactgagttgtatagacctttatgtttctttctttttctctttttttttttttgagacagagtcttgctctgtcacccaagctggagtgcaatggtgtgatctcggcttactgcaacctccgcctcccaggttcaagcaattctcctgcctcagcctcccaagtagctgggattacagatgtgcaccacgacgcccagctgattttttgtattttagtagaggcggggtctcaccatgttgtcaagatggtctcaatctcctgaccttgtgatccacccacctctgcctcccaaagtgctgtgattacaggcgtgagccaccgcgcctgactgacctttatgtttcttaactttatgctatacatcagttgatatttcaaaaatttaaatggtttctatgattattctttgggctaagaaattgggcattaattgtcctcatatgtatggtttttgtggctacttcatgtagattttatttttggtggttatcaaattggaatttttttttttttttttttttttgagacggagtctcattctgtttcccaggttggagtacagtggtgcaatctcagctcactgcagcctcgacctcccaggctcaagcagtcctctcacctcagccttctaagtagctgggactacaggcacgcaccaccacacctggctagttttttgtgtttttagtagagatggggttttaccctgttggccaggctggtcttgaactcctggcctcaagtgatccacctgcctcagcctcccaaagtgctgggattagaggcatgagccaccacacctggctgaaattggaatttcattggtactgcctgtaattttatgttaatttttttttttttttgtcgtcactagcttttatctaaagcccctagagagaaaggccatgataccttgtatacaaggttataagagtatacaagggaaagggagggctgaagggaacagggtgggctggtacaagcctcattagaaataccattgagtctgtgagtaaaacatcattatatgaaaaggagatgtggttttagggtggtccaattacttttgcaccagcctaataaaattacaagtcattatcaatagagacattgtaaaacctttttttttcccaaaagaagtatcaggtatgataattacatgtctgcccaactttcgttatagattaacataacttaattgtatttaaggtacaatttaggagagttgctgaaaaatgaatctttagtattgggatgccttgattctaccctcaatagctataatggattatgtgtctgagtagattaataaaaatcttttgagcatttttcttgaactacttcactgaagattagctttttgagcatccattttaatttctcagtatataaggatcggtttatcacaactgtattgttttccctggccttgttagattatattttcatatcatgtagaaaaataggtgtattcgttctcccttgaagtcctttgtctcccaaaggaaatggttgcaatacagatgtgtcacctcttccacaggtaaagtggaatggagaagtagccagttaaatagtgcatgctcaatttggaacatttagagcatacaggaaagttatttatttggtaaatattttttaagcatttactatgtttcatgcattgtactagttgtagaggatataattgaatacaactacatgtagcccttgactttatggaactagtctagtataaagatttaagattgcctggcatggtggctcacgccactaatcccagcactttgagaggccaaggcaggattgcttgaggccagaagtttaagagtagcttggtcaacataatgagactccatctctaaaataaatagatagatagatagatagatagatagatagatagatagatagaagtagttagacaacacaaagcagtttcactcatcttgtggcaaggagttatgtatttctaatcaaatttggcaactcaagcattttcaacaaaatctacatgttttttcagaataaagtgaccaacacagaatgttacctgtaaaaatcagagcaataattgctatctaaaataattttgaaaattaagtggtactgaaaggctcatatagcaaaaatatggcctcctgtcattgtactttcctacttcccagactcaccattttcaacattttttagtagtttattttgccattttatagcatagtacctgacattttatttattcaacagacatttcttaagtacctaatacatgccattccttgtttgaagggatgctaaggatacagtggtgaacaaggcgttgtggggttgtatagagggtattcattcctaaccttgaaccaaatatttctttctgttggataatgcattaaaaattgcaaacagtttacaaacttttggagcaatggtggccttgatcataaagtagggactgcttctaccgtatacatgcttggtggtgtatttgtgatatctggctaaagtttctacatggaaattgactgactttagttttgagacttctgggaaccagtcaggcaaaatagtgaaactgtgtatcctgtttccaagagttgtcttttaaggttatctgcttcattcatttggcctgacttgctaggcaaatgcctagggtaaatatgatttgattaactataacaacaacagcaacaacaacaactttattttttagagcagtttgaggttcacagcaaaattgagcagaatgtacagagattttccctatacccgcttcccctacgcatgtgcggcctcccctactatcaacatcccccaccagagtggtttgttacaattaatgaacctacattgacacatcattatcactcaaggtccgtagtttacattagagtccactcttggtgttgtgtatgggtttggtcgattttataatgacatttatccaccattatagtgtcatacatagtaattttgctaccctaaaaatccagtgtgctccacctgttcctccttccctcctccctcatccctggcaaccactgaactttttaacatctccatagttttgccttttccagaatgtcatatcattggaatcacacagtatgcagccttttcaaatgggcttctttccgttagtaataggcatttaagtttcatcctcatcttttcatggcttgatagctcatttctttccctccctcttttcttccctgtcttccttccttcctcttctttcctgtttcctctttcttcttccttttttaagagacaaggtgtctcactctgttgcccaggctggagtgcagtggcccaatcatagctcattgcagccttgaattcctgggctcaagtgatcctcctgcgttagcctcctgagtagctgggatcacaggctccagtcattttagtgctgaataatatttcattatctggatgtaccgcctattcattcacctactgaagaatatcttggttgcttctaagttttggcaattatgagtgaagttactataaacattgtatacaagttttatgtggatgtatgttgtcatctcccttgggcagataccaaggagtgccattgttggatcatatggtaaatatatctttagttttgtacagaattctaggttggtatttttttctctctcagtcctttattttatttggagacagtctcgctatgtcgcccaggctgccatacagtggtgccatctgggctcactgaaacctccacctcccaggttcaagcgattcttgtgccttggcctcccaagtagctgggattacaggagtgcgccaccacgcctgctaatttttgtatttttagtagagacagggttttgccatgttgcccaggctggtctcaaactcctgaccttaagtgattcacccacctcaatctcccaaaatcctgggattacaggcctgagctactgtgcctgatctctctcagtactttaaagaaatatttcattccacttttcttttttttcttctttttgagatggagtctcactctgtcgcctgggctggagtgcagtggcgcgatctcagctcactgccacctccgcctcctgggttcaagtgattctcctgcctcagcctcctgaatagctgagattacaggcgcccaccaccatgcccagctaattttttgcatttttagtagagacgggggttccaccatgttggccaggctggtctcgaactcctgacctcgtgattcgcacatctcggcctcccaaattgctgggattacaggtgtgagctaccacgcctggcccactcttcttgcttacatagtttctgaggagatgtcagatgtaatttttatttttgctcttctgtaggcaagttgagttttttccccctctagcttctctcaggatttttttctttatctttgattttcagtagtttgaaaattatatgcctagctgtcagggttttttgcttgtttgtttttgttttctcaggtgtgactccagaaaggttctaaagaggagctttacaatctcttctctggggtttatggagacttcctttacccttctgtgttagccccttaaagcactgcgtcaaccttaaaagggcacaggaaagggtgtctatgccatttttatgccatttatcctgcttggtgttttctgagctttcttcatctgcggtttaatgtctcacattaatttgtagaaattctctgtcattgtttcaaatttttcttcagttcttttctctgtttcttcttctggtgttcccattatgcttttgtggttgtcgtacagttattggatattttgttccaggcttttttttttccagtctttttttccttttgcttctcggttttgtaggtgtctgttgagatactctcaagtgcagatattctttcctcagctttgtctagtttactaataagcccattaaaggcagtcttcatttctgttacagtctttttgatcagtagcatttcttttttattctttcttaaaatttctgtctttctgcttacattgcccatctgttcttgcatggtttctactttgtccattagagttcttaggatatttatcataattatttcaaatttctggtgtaacaattccaacatccctgcaacatccaagtctagtttcgatgcttactgtgtctcttccagctgtgttttttcctatttaatatgtcttataattttttcttgatagccatacatgatgcattaggtaacagaaactgctgtgagtggacctttagtaatgtggtggtaaggtgtgcatggaggggaaacattttcagtctgttagtgaacttttgtcaacttcacatgtgcttctcaagtccatcctgtaagtgggagagtagggctagagaggactgaagttgggtatatattaaatactttctcctacaaagaagcctagaggggacgcattaggggattttttttcccccagtattcactgtgatgacccttattgagctcctggaggtaaaactcacaaaactgtggttctcccccctgcccatattactacatgtccctggagtttatatctttcagacttgtctgcactgagcttccaccaatttgtcaaatacagatcaggtttccctaccacccgtgcagttgaaaacccacatacaacttttgactcctccagagcttaactactcatagcctgctattgactggaagccttgccaataacataaacagttgattaatacatattttatatgttttctgtattatatattgtattcttacaataaagagaaaagaagatgttattaagaaaatcataaggaagataaaatatatttactgttcattaagtggttcccatgggtgctggttcccatggaggttgccccttgtgagtttttgctcagggaagttgtgattctctatatttgcctgttggtctcctaatttgggagtcatcagttttccctgtgacctcacttctcttacagagttaagaacagttgttggtttttcagtttgttcagtgttttacatgttgttagaacacagtggtacttctaagtttcttaacatgctagatcagaaacctgaagtctcacctaatttggctttttatattttttcttcttttttttcttccattgctaccaaagcatttttcatctgtgtctggggtgacattagagcagaatgtgatttctaggtaaacattattgggctccctagcagaaaaatttttgaaagtagtacatgaattctgtataattaaaattttcttttcatcttaataggtataggtaataggcacggcctattttttttttgctcaacagtctaaaatagtaatttaatcacctaatagccttagttatatagttgaaagaagagttggaaatctgattcatgggttggaaatcacctgtcacatatgagttttaggcactggtcactttattttgaaacagctttggggttttttcctttttcaactcataataggctttaacagcttttagttttgtttctgtttttttaacagcatgagttgccaaatttggttatagcttcttggtacaagatgggtaaatttgctttgtgttgtgtaattactttttattttaaatgctacctcttttatgaacactaactttacactaagattaggaaaatgagaattgcatgtctgcaacaaatagctatctgtagtattaaattgtgaaaatgtagactttggattggagctggcatctcttaatatgtaattgtaacatagagtaaataagtattttgtcccttgtagggtcaaacagtacagtgcatgggcagaattagagatgtaggcttttttttttttttttttttttactggcttagagaaccgtttgatcagctaatatggaattaagtccctagggctgcccaggcacaacattaactgctattaaaggaaaatttaaaagagtattagtgaaggttaaatactgaccatggacatctggcaaaattgatgttttttttcccctccaccattgtttatagtttattgttatttatcagagaattaatgtttattttcagaatctattaccataagaaatctgtttgaggacttcgtatgtgccaggaattctactaaataatgatataatgctgaacagaattagataggatcctcacttcgttaagcttacagtctagtggtatagatcaacattaatcaaagaataacacaaatagaaagcagagcagtggttcatgggattgactgtagagaagcatgagggaagttcccaggtgatggaaaatactttatttcttaatcgtggtggttacatgtgtgcatatgtttatgaaaatatattgtacatttaaagtggatacattttatcacatgtaaattatgactctataaagttaattaaaaagaataactcaggtaaggtggtgtgtgcgcctgtagtcccagctatttctgaggcaggaagatcacttgagcccaggagtttgagttcagcatgggcaacatgagacctgtgagactttgtctctaaaaaaatttaaataaataactaagataaatgtaaaattacagctgtagtaagttctacaaaggagagttacatgggctatgacgatgtaagatagcaagaactgacattggcagggaggaaatgatgatgagtagaagtaaataagtgaagtgtggggattgatgtcaaggggacagtataaaagaaataacagcatgcgccaaggccctaaaattggaaagtccttggcaaattaaaggagtttgaaaaaggccattgtgtgcaaagcagaaaataggtactacaaggtaaaagatggagctaagcggtaggtaaggctaaaccttgtcagccattgttaaatattgaattgtatcctaagcacaactcagtggaaagcagttaaagttctttaattgggggaggcaatgaaggggtaataaaattggttatagaaatactgctctggctctagtgttgagaatgaattggagtagccagagtagattcaagaagactttagtaagattattccaacaggccaggacctgttatagggtggtggcaatggagagagatggacagaatggagagtgtatttaggaggtaaaaatgacagaacttggtgatgcactgaatgtgaaatggggaaggtgtctaggaggactactaggtttatggtttgcgtattagggtggatgatagcagtttcatttactgagacagggagccctggcagagtacccagcttttagagtgggtagggggaaggggagagtgcatctggtgttgggcattttgaagtgatttacatacaacaaactgaaggtatctttaacactgagtccagcaggttagcatatttattcagcaagcattgcacctttttttgttgtttttggggtcttcaactcctggcctcgaatcctccctccttcccccgcctctcccagcctccgcctcccaaagtgctgggatttcaggagtgagccaccgcgcctggccagcatcgcgctgtttgtgcagtgtgccctgtgctaggtcttgcagtgggtaccagtagagacataaaagtacaaaagataattggacgtttagtagagtcctgaaagggggcgggataggaagatacctaaccataagaaaaaccagcaagagcggaaaaggagctagtcctccagatcaataagttaatcacttatgtttgtgattccctgcattttgggtgattctctgtcgaggtcctcttaagtccagacttttgatataatctgcagtttgcgccatttggattcctgaagcatctttacaagccacctacattccttatggagctgtggcacaacagcaagcccacgatgtctcaccggattaataaaaatataggcgctcacgcttttgtttaccgatatagtatctcctcctcccctcactccatcaacccccacgcgacacaactttccggaagtaagcaaaatccgttatcaaggtgaaactccggggaccaggctccacagctgccataaactggatggcacgttagaagccggtgggtgtaggtgaggcacgctggcgcccgcgggcccttctccagccgctacccagtgggaatccgcggggctgaagccccgaaaccaggctgagcgtcccagagcgcaacctccctttcccccagcagcgccggcgccgcagaagccgcgtgtccccaggcgcactcccccaaggtgaacccccgccccccacggaggcggctgggtcgcgggtctgggcggggcgctccggacgccctcccgccgctgcgcacccctcccgcgagctgccagctccctcggcctctccacccaaaactggcccaaccgccaatcgtctgcctctcacctcctacagcaggtgacccatggccaatcgccaggggtctctttgccaggagccgccagggccagccaatcggggcgacccctccgccggggaggggacgggaaaggggtggggggtgaagggggtgaagggggtgtcccgggggacgggctgaacctcagtcaggaccgcctgcaccgcagtccggggatcgggtcgaggggagaagaaaaaggggtgctcgggagcagcccccggctacctcccctggaggcacagagggcgggggccttggcgaatggctttcttgctggccacttgcggagtgagtagaccccgagggtctgggagaggggccggcccctacccctgagtccccggggtcccggccgccaggccggagcgcgaatgtcgtgctcaccctgcctccttcccgccgccccctgggggtttggattcaggatttgttcctagtgtccaagattttgataagaaacttacagaagctgatgcttacctacaaatcttgattgaacaattaaagctttttgatgacaagcttcaaaactgcaaagaagatgaacagagaaagaaaattgaaactctcaaagagacaacaaatagcatggtagaatcaattaaacactgcattgtgttgctgcagattgccaaaagtactattaatcccgtagatgcaatatatcaacctagtcctttggaacctgtgatcagcacaatgccttcccagactgtgttacctccagaacctgttcagttgtgtaagtcagagcagcgtccatcttccctaccagttggacctgtgttggctaccttgggacatcatcagactcctacaccaaatagtacaggcagtggccattcaccaccgagtagcagtctcacttctccaagccacgtgaacttgtctccaaatacagtcccagagttctcttactccagcagtgaagatgaattttatgatgctgatgaattccatcaaagtggctcatccccaaagcgcttaatagattcttctggatctgcctcagtcctgacacacagcagctcgggaaatagtctaaaacgcccagataccacagaatcacttaattcttccttgtccaatggaacaagtgatgctgacctgtttgattcacatgatgacagagatgatgatgcggaggcagggtctgtggaggagcacaagagcgttatcatgcatctcttgtcgcaggttagacttggaatggatcttactaaggtagttcttccaacgtttattcttgaaagaagatctcttttagaaatgtatgcagacttttttgcacatccggacctgtttgtgagcattagtgaccagaaggatcccaaggatcgaatggttcaggttgtgaaatggtacctctcagcctttcatgcgggaaggaaaggatcagttgccaaaaagccatacaatcccattttgggcgagatttttcagtgtcattggacattaccaaatgatactgaagagaacacagaactagtttcagaaggaccagttccctgggtttccaaaaacagtgtaacatttgtggctgagcaggtttcccatcatccacccatttcagccttttatgctgagtgttttaacaagaagatacaattcaatgctcatatctggaccaaatcaaaattccttgggatgtcaattggggtgcacaacatagggcagggctgtgtctcatgtctagactatgatgaacattacattctcacattccccaatggctatggaaggcaagtgtgtccatttcctctgatcagcagtagactctgctgttccttgagacatgccccttccccctcttcctcttaactgtcaaccttacctaaaaacttttgattttgcaggtctatcctcacagtgccctgggtggaattaggaggagaatgcaatattaattgttccaaaacaggctatagtgcaaatatcatcttccacactaaacccttctatgggggcaagaagcacagaattactgccgagattttttctccaaatgacaagaagtctttttgctcaattgaaggggaatggaatggtgtgatgtatgcaaaatatgcaacaggggaaaatacagtctttgtagataccaagaagttgcctataatcaagaagaaagtgaggaagttggaagatcagaacgagtatgaatcccgcagcctttggaaggatgtcactttcaacttaaaaatcagagacattgatgcagcaactgaagcaaagcacaggcttgaagaaagacaaagagcagaagcccgagaaaggaaggagaaggaaattcagtgggagacaaggttatttcatgaagatggagaatgctgggtttatgatgaaccattactgaaacgtcttggtgctgccaagcattaggttggaagatgcaaagtttatacctgatgatcagggcagtaggcataattcagcaacaaacaatcttcctttgggagaaacctgttcattccaatcttctaattacagtggttcctatctcagggatactggactttctgacgcagatgaacaattaaggggaaaagcttcccttttccctctgtggcagttacgattttgacttcagtcctgagaaaaacttcaggttttgaaaatcagatgatgtcttctccttttccaaacaccacacgttgaaagcatttataaatccaagtctgaaactctgcgctctagtactgctgttaagatacacaacttgtttcttagttcatataatctcgggatacacacacacacacacatatatatacacacacatacgtatacacacacatacatatatataaatatacctgatgccagatttttttcataaatattctgcctactgtaaatatgggttcctctgagttgttttagaaaattagcgcaatgtattaaaatcaagtgttaggaaatttcatggtcttacctacaataacttttattttggaattgaactattattaaattgtatctaatcctggaaaaaaaaaaaaaaaaaaaaaaaaaaaaaaaacaaaaaaaagaacaaaataaaaaaaaagaaaacaacaaaaaaaaaaacaacaaaaaacaaaagagagggaggaggcgcaacaagcacaacgaagcactaccccgggagggggcacgccgcacacagaacgccggagcggcacgcccggaccccactatctagaaacgacaaagcgtgtgcccacacaaaacaaaagtaaaaagagcgcagacttatcaatcagacacacgccaagcgacgagacgcggccgcagatcctcaacaaacacagcacactgaatagcaaggtggagagaaacacaacctggtggctgacgcagcgacacacatcctgcgaaggaaaagacgagacactcacactaccatgggagagtggaggagcaaaacaacacacaggcgagaagaacaacaaaaacccagccacaccagcaaacataaacacgccaccatgacaacggcgacaacacaacaacgaccacgtctcaagcccgagtcactaactgagcacagacaacaccgcacacacaactacaatcagccgcggaacaaaggacaactaactacgaacgacaaccgactgatcagagcagagacaaacactcaactccaaccgagggagcgatcaaagaacaaataaggan
